United States Patent Application Publication US 2007/0042382 A1 - sequence listing, part 4

SEQ ID NO: 8746 - DNA, 173995 bp, Homo sapiens
tgagatacgtcccatcaatacctaatttattgacagtttttagcatgaagggttgttgaattttgtcgaaggccttttctgcatctattgagataatcatgtggtttttgtctttggttctgtttatatgctggactacattttttgatttgtgtatattgaatcagccttccatcccagggatgaagcccacttgatcatggtggataagctttttgatgtgctgctggatttggtttgccagtattttattgaggatttttgcatcaatgctcatcaaggatattggtctaaaattctcttttttggttgagtctctgcctggctttggtatcaggatgatgctggcctcataaaatgagttacggagggttccctctttttctattgattggagtagtttcagaaggaatggtaccagttcctccttgtacctctggttgaattcggctgtgaatccatctggtcctggactcttttttgttggtaagctattgattattgccacaatttcagagcctgttattcgtctattcagagagtcaatttcttcctggtttagtcttgggagggtgtatgtgtcgaggaatttatacatttcttccagattttctagtttatttgcatagaggtgtttgtagtattctctgatggtagtttgtatttctgtaggatcggtggtgatatcccctttatcattttttattgcgtctatttgattcttctctcttttcttctttattagtcttgctagcggtctatcaattttgttgatcctttcaaaaagcagctcctggattcattaattctttgaagggttttttgtgtctctatttccttcagttctgctctgattttagttatttcttgccttctgctagcttttgaatgtgtttgctcttgcttttctagttcttttaattgtgatggtagggtgtcaattttggatctttcctgctttctcttgtgggcattgagtgctataaatttccctctacacactgctttgaatgtgtcccagagattctgttatgttgtgtctttgttctcattggtttcaaagaacttcttaacccaggaatacagtgaactgataagacagagccctgtcgcagaggcacaatccagtggagaagggaatgctaaccctcctgggtcaccatactcaggactcaggaaccatgtcttcctcaggtttgcattctgagaaagttctcctgcagaaacctatgcttactacatgcttgattatatttaagtaaatttgccatttttaatttaatgaaaattcaaaacatgtaagtcatttcaacatatggtatgttgctaaataaaaacctttattttaaaaataggttttaattattaataatttatattactttcctgatccacaatgtggtctagcacagaggtgttagccattgcatgaaagataggaactgagcccctcttctctcttcagaaacttggaagcaagaaacaaaagtcagacattcatgtctttactcatctacacaaatttcatattttacctttttaaaatagctttacttatatatactctacatactatacagttcacccatttaaagaattaagtttatcctaaagctgcttccttacgtattttaaatttggcctaaaagtttctcagtatgtagtgaactgtaacctaactggatgctgaaaagactgaaacctactcttgtgccaatcacagagtttcagcatatctaaggtggtcagttgttcaaactgtgttcaaataaggcaaatgccaaattataaccaattctatttctgtacctcatttttgtcttctttacatcactttcctttttctgcccataaatctttttcaaccacgaggcagtgctggagtctctctgaacctattgcagttcagtggctgcccgatttgcacatcactctttgctcaattaagcactgttaaatttaatttgactaggtttgtcttttaacaaagatgtacagttcaatgttttttgtatgttttcaaacatacaaaagttgtgtaatgatcaccataatcaaatgtacaattttttatcatcgtccaattagcagacactaccattccctcctacccctccactctcagcctaggcaatcaaaattctctacagttatgtcactcctgaatatttcatataaatgaaatcatataatatgtcttcttctgtgactggcttctttcaattagcacaaggttttcaaggcacttccatgtgtaacatgtactttattcccttttattgccaaacaatatcctatggtatggagatatcacattttatctattcatcagttgatagatatttgacttatttctgctttggggctattatgaataatgctgctatgaattttcacgtctacatttttgtgtggacatatgttttcatttctaatgagtatatacctaggaatggaattgctgagccatatggtaactctatctatgcttagcattttgaagaattgccactgttttccaaaatggctgcactattttatattcccaccaacaatatatgagggatccaatttctccacattctggacaacacttgttactatctgactttttgattatagctatcctagtaggcctaaaatcataactaattgttcctttgagttgcattttcctgctggctaataatgttgagtttttttatgtgtttgtctaccttctttagagaaatgtatattaagatcctttgaccatttttaatggtgtttttattatctttgtgtgtgctttattatctttatatgttctatacacaagtccttatcaggtatataatttgcaaatatctttgcacattcttggctttttcttttcactttcttgatacccttggaagtacagatgctgttaatattgatgaaatcaaattaatttacctactttttcttgtatttcttatgcttttggagttgtatctaagatggctttgcataacccaaggtaacaaaggtttactcctacgttttctatttagttttataatttttctcttaagcttgggtctatgatccattttgacttaatttttacatgtggtattataaggagtccaacttcattcttctgcatgcagatatccaattattccagtaccatttgtaataaagattactcattctgcattttttcaacccttttcaaaatctagtggctcataaatgtaagggtttagtttgtggacacaattctgttccattgatctttctatctattgctatgccagtaccacattgtcttgtttattgtaattttgcagtaaattttgaaattggtaagtttgttctttttcagaattgtcttgactattctgggcccctcgcactgctacatgtttttaggataactccattcatttctgcaataaaagcttgctgggttttgatagagattttgtttaacctgtagatcatttgaagattaatgccattgtaacgatattaaatctttcaatccaagaacatggaatgtcattccatttatttaggtctaccttatttcaacaattctttttgtttgttttcagactacaagttttagatccttttgttaaatttatttcttagggttttttttgttttgttttgttttgttggttggttggtttgttttgagatggagtctcactctgtcacccaggctggagtgcagtggcacaatctcagctcacagcaacctctacctcctgggttcaagcaattcttctgcctcagcctcctcctcctgagtagctggaactacaggcatgcaccaccacgcctggcttttttttttttttttcttttgcatttttagtagagacagggtttcacgatgttggccagcctggtctcgaatccctgaccttgtgattcacccacctcggcctcccaaagtgctgagattacaggagtgagccactacaccaggtcatttcttagtatttttactcttttgatctatagtaagtaaaattgtttttatctttgaatttttaaatttttaacacagttcaaatcagtgtgtctgatttcatctccttctctaacaaaccagggtgccagaactgcttcagtttctctgccttctctttgtctatgatgactaatgtatgaaggtatctgctgcatcaaactttaaacttcacattatccttatttctcttgaccttgacagatctggcatcttttcacctggctgtaagcagaaagtccttgatctccttaactttttgaggcatggcagcatgtgaggcagggagaggacacagacccacacagcaagtggtgagaagccaacagtggaattgttttcttaattccatttgttgattgtttattgctagtgtatagaaatacaactgatttttgtatattgatcttgtattctaaaaacttgctcaacttgtttcttagttctaatagttaattaattgattccttagggctttttaatacaagatcatgtcatctacaaatagaaattgttttactttctttctaatctggatgccatttatctttttttcttgtccaattgccctcactagaacctttagtacaaagttaaatagaaatgggaagactagacattttgtcttgttcctgatcttagacataaaaacgttgtcttccgttattatgtgtgatattagttaagtttttcataaataaacttcacagtttgaggaagttcctattcctagtttgttgagtgttagcatgaaaaagtgttgaattttgtccaatagtttttaaaaatttttttagacaatcatgtaggctttgtccattttttacttctttaaatttatttttattgatacacaatagatgtacactttttaggtacatgcaataatttaatgcccctcactataaattcggagctgcctcctcgccgatgattccagcgcctgacagccaggaccccaggcagcagcgagtgacaggactttttaggtacatgcaataatttaatgcattcatataaagatcaaatcagtgcaattggcatatccatcaccttaaatatttgtcttttcttcatgctagaaacattcaagttattttctcctagctactctgaaatatacaatagattactgtaaactacagtcaccctactcacctatctaacattaattgatttttggtaaactaatctaatcttgctttctggcatcaacctcacttgaccatggtgtatagtccctttcatatgttattggatgcaatttgcctacattttgttgagaatttttatctatactcttaagaaatattgatctgtagtctcgtgatgtctttatctggttttgttatcagggtgatactggcctcatagcatgagttgggagatcatccttactcttctattttttggaagagtttgtgaagaattgatattatttcttctttaaatatttattgggtttttaaaatacatttttaaaatgcaacttgggtagcatgtccaataggaacaaatgagtgtccacccttgaatttcataaccctggaattaatccatgtaatctatgatccacaactgtattaccaaagttcgagttactcataggaaagagaaagaagttctctaattcgtccttaaaagttttccaagttcagaaaaaaaaaatgttgaagaacacgaatctccgcaggaaatgatactcctgtacccccagctcgctctccctcacgacccctcgctaggcggggttcgggaccaggtgaacgctgatctgatagttgacacgggacgactgtggcatcatccttgctgccgtcaatatcccgagagggaggaggttgggccgggagggtctcccggggcggggcggaggaggagggaatgcaaaacagagcctcgtccccggaacccaagaagcagcaacgcccctcactataaattcggagctgcctcctcgccaatgattccagcgcctgacagccaggaccccaggcagcagcgagtgacaggacgtctggaccggcgcgccgctagcagctctgccgggccgcggcggtgatcgatggggagcggctggagcggacccagcgagtgagggcgcacagccgggacgccgaggcggcgggcgggagaccmgcaccagcgcagccggccctcggcgggacgtgacgcagcgcccggggcgcgggtgagtccgcgcggaccgccaggcatgcttgggggacttcaagggcggggtgctaagtttcatgtcacggtgtcctaactgctggctctatactgggaagctctcggggaccaaggaaagagcgaccgtagttctggtcagcgcctgcccctggagctggccacactttcccaaatcaggtgaggggcttctggaatgggagggaacaaggtaggtttgtttgccacgtgcctcgaaattctcaatccattttaaccaaactcttccgagtgcaaggaagaaatctacagaaataagatgcaattcaataaactttcttcctgaggcttttagttaactcttgtattttagccatcatctgagcgggaagccggtatgactctgcaaggcgttcgtttaaaagttgtgctacttttgaggtgaagttaagagtgtctccatccacgccctctgcttcccagtcaatgtccctgcactgctcacgtccctttagctctctccctgcaaaccatagcggtgggtcctagacacgggacatcgctccaaccttggccaaactctcccaccctcagggttcccagatgtcctttgaataatcaaactgargaaggagaagcaagatgtctccacaccccaatccctacagccttagccaatgcatgtgtgtaactgagacagaattttagcaaaaggtctcctgcttccaggactaaacagagcctctggcaggccactgcccgacacccaactccatcctccaattttcttaaatgtccaggtaaacatctccatagtgccagcctgctatagtctcccgaagacctcagcaattcttccccaaagcgtctccttctgcaccgtttttttytttgggcaaccatttgtgacctggctattgagcccacctgggcctcttctctttgtttgctgatagcctcgttaagtattaaaaacctactcccccycttcaggagccctcttttaatgaaagtttgggtactgggatcagatttgggacttggctacatttatttcctgtgtcattctgagaagagaaagtaatagaggcaagaaatttggcaccctattgatctattttattactttgttgagcaacttgtgcttccsgctgaagatgctgcatcccaacatgattctcttattattagttaccacctgagggttttggatctccaggtgtttatttcacatagcatatgctttaacccccttataagtcttctctaaggaagaaactgccatacttcccttgtcttctcyggtgtttccctagctataaaggccccacctgcataacctgtcctcaggctgtgatgtattcccgggtgccctggtaccttctccttcctctccaccacccttcctgacagtgcaggggcaggaaagcatggggagaagggaaatggagactcccacttaacttgctgtgtgatagtaagagcattatttcacaactctgaacctcaagtctctgcccataaggttccctccagtgatataattccttaatttcttttgttttggttattgctttaaaataaaagtctaagcttaaggctaggttatagaaactgcccatcataattgctaggtctcaacatttgcttaagttttgtgattcttagtttcaagtctgttacccactctctctccccgccaccttttttccccctgacttcattgttctttgttcccatcctgaggccttgatttctggttctgctcttctttgaccttaaactgaatcaactcttccatcatccaactcagaataaaattggttttcttccaccggttccactgatgccaatggaagacttgtcttccttgcgatttgcaaaatgtctttcagtcacaggtgctgcggcaatgctgctgtcccacagcattctaagcttcagtctttctctctcttatcgtgggtcagtattcagaaaagggcagatttgtgggttgttcaggtttctcacttttctttttcttctttctagtttgggatcagagttgtgtgagtatttgtgtatataattttgttttggttttttgttcctgctgctacttacgactgctgttattatttcaattatgactaattaatactaatgactaattttcccctatgctagagggaaaataaggaagaaaagtttactctgctacttacccaaagcccaggtaaaatgcttagctgagaaggaatttaaaactcatagtttaaatgcatgatgcatgyctgctgtcattttatctgtgctgccacagtgtcctttcaagcagataactgagagttgctgtattttgctttcgaatttgttacagggacaaaaatagtgacccctcacatttaggtgttttggctgcttaatgcgagctcctgccctctagccgcatgcttattagtttacctagccctttttctggtcagtsatgactggagaatgccaaagagtctcccaagtaggctaccaaattaagaattgtgtttagaagtttgaagtcagtccaagtgttgtaaagattaaaacgttgttttgaagatatgctgtgtcaataaacaaatatggagccagagcaacacaatgtgaccaagtgtccaagcccagcttaggaacacttttctcccatgttatctagcaaactgacaaatcagctttccaacacgtgatgattggaaaatgctattagtttccttcaaaattctcctaatgtttctttttcaaaattgcctaagatcattggattatgtggtttgtgtttcttttcactgtagctgcttgttaaagcagtatactcaatctctgataagcaacagtaaatttgatcgatttgtatcctaaatttagctatcactttacattttgttttattcataatatgaactttagcttctaaaaatcaactttttaatagcttaatatataaagccatcttaaatcaaggaatatctatagggacttaaggtaatattcaactaaattggcaagtgactaccattatcctattaaagctctaaaatgcaatatttcaatcacagaaaaaaaatcttataatttaaagaactataaattgccagatgtttccctagttattacgttagtgacaaattagacaactggaaatagaaaacagagtatatgtttggaacagtcataaaaggactagtgactattgctgctagctgtggttgtattaacattaaaatatttgctatgggatttttcttcttatcaaagcagatgctcagatgaggaaaaactytcttgcatatgaaaatcaaaattgtcttccaaaatatttaagtaacaaaaaattcattatgtagtataaatgctgtatgattacattattcttatagttaatttagaagggtttgaatttgtttttgttttgtttgtgtttgtttcttcgataggtgcattctctaactgtcttaagtagaaacaaatgtctagaatctctcagtgattatcagtctccttcctattaccaagaatgtttttattgtgttgttaatctcacatgtaatttttttaacatttaaaagtttggaaaatgggtaaaaaatgagtgtgccttgtttcctattattacaatgtgccttcctatttcaagtcccaattctagatttccttaaaacttaaaatcatagaattaataatctttcagtttaagtcaacttttgtgtgatttcttgtccacttatacacacatagatgccttcatcttcaccaaataatgtagaaattttatttagttcaatggatttaagtactctgtatgcttaagtacaaaataagaatattgagaaatacacatatgattgtgtaccttttttttttttttttttgagacagagtcttgctctgttgcccaggctggcgtgcagtggcatgatctcggctcactgcaacctctgcctcccaggttcaaatgattttcctgcctcagcctccttagtagctgggattacaggtgcatgccgccacgcccagctaatttttgtatttttagtagagaagaggttcgccatgttggccaggctggtctcaaacttctgacctcaagtgatctccctgcctcggcctcccaaagtgctgggattacagacatgagccacctcacctggcctgattttgtacttttaaagagaatttgttgttgctaatttgctaagtttatttagatattttctgattctatattagtcaaagctcctcttatctactttggaaaatgaagaattatgtctataaaatatatcaacaacagctgcaggtacttacagaggaaatactgtggatctgagtgatattaggccctgaggatacaagccaaagtataaaaatggtctttgccgtagagagatagtagtcaagctaagcacatattttggcatgggtctctaatagcctaatgctagtagggtgggaagccatttaaaaatggcccctccttctgtcctgcctttcagaccagatggtgtgtctaaagtggtcacactgtttggttctggccacttctgtaataaccactgctcctttcccctcctcgtgagattataactcctttgacagtatggayggcacctaacgcatccttgttttcttttactaaatgttccacggagtcacttgcttgcctgtttgttgcttatttgtttgtttttggctaaaactacagaaaatgttaaatacattttcagacctttatattttaaaaaagaaatgttaagaaataaataatttttctaatctcatttagatacactgtcctattacacacaatgacaaatttgatgcttttgtcttgctaattgaagagctaagcatgaatacagtttttcagtctacagcagcaatgacaagggtaaagtggagaaaagagtaaggaaagaaaaaattaaaaagaataaaaggttgaaatatcaaatcggtggttcttaagatgacagaggcaggtgagacaagaatactggaatcacccagggggcatatgaaatctgtacatttcatccacaccttcttttctccccctgtcctcattccccctgttgagacacattgtattacaaattaggaggaaaccatctaaaattatctcacgtatcccagttcccatattagcatcatgagtatcacctgagagtttgttggaactgcagaatctcagaccctgtccagacccattgattgcataagaatctgcattttagcaaaatcctcaggtgattcaaatgcacattaagggaaaagaaacacagtgtaccgtacctgtggcttgtttagaataattatgaagaggtgttttcttggctcttmackaacgtttttaataaagctaatatttattgagtacataaatgtgccaaacacaacgttcagtctttctttaaattttttttatttaatcctcacaacaaccctgtgagatagtttctgttttatccttattttatagattgggataccaagtaataatgagataagtagtttacccaaaagctgtaactgatacagtcgagatgtaaacataagaattctaatttcattgcctgttctcttagctgttacctacagtgtctgctctatactgggctacctactttttaaggccaactaattatttgaaaatttatttaaagttttaatttgagatcaaaatctgtttccctcataaattttttttwaaaaaagcaaacaagatctattccattttgatctaatgttttcctgtcaccttacctttaagtgcaataatgggaaattctagaaattccttctttaactgtttgaaaaaataccaaaactatgacagcctgtccaaatccactaaaatatatttttatatgcatgctttttgtatatcaattatacttcaataaagctttttaaaaaaatagtagatgacatacttttaaaaattaactttggagcccaggtatggtggctcagacctgtaatcccagcactttgggaggatcacttgaggccaggagtttgagaccagctgaggcaacaaactgagacccccatctctacaaaaaataaaaaattgccagagcatggtggcgcacaccatgtagtagttgggacctgtagtcccaactactcaggagactgagttgggaggattgcttgagtctgggaggtgaaggctgcagtgagccatgatcacaccactgcactccagcctgagcaacagagaaagaccctgtctcgaataataataataataatamcaacttttgatatctctattttttcccataaaaatccaaaattttctgtttactttttggtgctctcatgctataaagtaaattctcccttggattggacaagttattttctgttttctacatacacatagactgttcagcattccaactcaaattacatattactttttcagcttttaatataaatgcttatttactacaagcatggtttacaaaaatgtagtaaaatatagttactaaccagtcaatgctcaagccagtgactccccaaatgattcagtccctgagctgtttcacccagtgcaggtagattctctgacagccatcagttggatctgtccgaatatctcctgttttgacaggggcttattgatgttggtcaaaagacaggtgtgtatgggttccctgggatcatgtttgaggggaaacctgtgccaacaggactgagcagccactttttcaatggtattgagaaaatttgtaggagataaaatttcaccagctccttgaatctagaactgtagatattcaggtagcactgacattacaacatctaatttgtaagttatgggttagggcaaaatcaatccagggctgccatcatgacaagtagtggaagtttgaaagaaggagaaatacccaaaagatatcttacacatagcaggcagagtttcttagtactaataaaaaataaagtaccagtgatcaccctctatagcccctaagagtcccctggtttcactaagccccaatatttgtggctgtggctgaatgcaatctgcacaaggttttctttttaacagttggaaaaaatctcatagcatagcatttttttctttttaacagttggaaaaattctcgtagcatagcatttttttctagtaaatttcatatacttaacaactttatcagcacatatattttccttcacacttacaatttcatcaacacatatactttactttttgactcaaattcttcttgccatcaattcaaatgctcctgcccttagaatgagaattttccattaacccagctttaataatctaactctcccattcaaatgatgtcacttcatataaaacacattttatcatgatgtctcccagccctcagttacacagttaattgctgccactttatcatgaatgaaaaagatgtgattcttgggtaatgatttcttgagtatgtcctggtctattatctactgagttaccagagtggatttttgagagaacacacagttattcctattccttttaatttccattaacttaagccatatgatagaacattacagttgttatatattttgtataaatataaaatgtaatatataatttatatattttaaaatatttagtggcaagtaaagatagtagtaagtgaaaaaatcactgtataacatatgaatcgtaagtgtgatcccatgtatgtgtatacctggtagatgcttgtcaaggtgccattaaggtcttgggttattggcatcttaatgaaattcatttaattatgttaggattgatttgttagtaaaatcacttacatgttttttaaatgcatgcatatctgtggagccaataagaaaaattaggaacaatatacaacaaatcttaagagcttttgaggatgattttttttctttctttcttttgtatgtacctacaaaattttctataatggatctctattgattttatattttttactttctatttgtcttggaatttctattactttatttataattcactctagattttaggtactagacaactactattaactctctggagaatggtactataaatctgaccctttctgtcatttttttttcctgtggtacactagtgtctcacaaagagtccacagaattcacacggtcatgatattttatagaagaaatcattttatgggaactttcttttgttaatagatccttccaatgctaacattattctgtataacartgctaaagttggtatgcctaaatgctaaacttggtatgctaaagttggtttaaaaattaacctatatacaatcttcttgaataactcttcaactttaaataaatttcttatttaaaaaatcctcctatatataattaaaaatactgatgaatttgactacataaaaataaatgcttatacagtaaaaagtaccataaacaaagttatcatctaaacaagaaacctgggaaagctatttgccagccattacatgtaaaatttaagtttccttaacataacatgagctctttaatgtgagaaacaataaacaacctaattgaaacatgagcaaaagccatggctgagaaaactcgtagaagaattactatggaaacaataagaaaatgaaaagaagttcaacctcattcataattaacgaaatgcaagtcaaaacaaagatataccttttacttatcagataaagaaaaaatgatttgataaaacccagattcttggtattataaattggtataaccttaacggaggacattttatgaatatctatcaaaaacttagcatatacaaacaatttggttcaacagtctgttagaatttattatatagatacattcatataagtacaaaagtgcatatatgtaaatattattattgggacatttttgtagcagccaaaaggaaaactgaaaaaaaagattaaggctcattaatagcagactggttaaataaactatgtgtgagtacaatgaatgaaatattgtacagccatcaaaatgaatgaggtagatttatatatgctgatgtaggaaatctgcwagccatcataagtaaaataaatgaaacaaagaagaaaatactatgatgtacaaaaagaaaaaactatagatatacatatttatatgcatgtgtatgcattttttatgaatatacatatttatatgcatgtgtatrcaagtcctagaaggagacataggtaactattagtagtacctctgggaagtaaatgcagagaaaagtaatagagggtaaggatatgtttacttttattttacatccttctgtaacttgacatttatacgacgcgttagcattacttctgggaaaaagaaaaacagaaaaggtaatcttttaaaaaggtattttttaaattatggtacaataaaatgtgcataagctttatactaagtaatagaatcatttaagtttagctgtagattcacaagtaaaaatccaatctrttttcatattcttacatttatagacatttcttacatgtctatagaaagaaatggctaggaatgagactgcactattttaccctaaaacgttctttttctctttgcctaatgtatatctacaagggcattggggaagatgttgaccacaggcaggaagatgatgagatcctgtgcccaccacttaatgcagtctagctctatataaggaaaaatatgttcttgatgtgaaccagatggtttcactcccttcaaaaacactcttaagatgcagtgtggaagcttactctgtaaattaaaaaataaaaacctgactatattcagtggaatgcgttaatcatttttttctttttaggtttgatatttgacaaattgatctaaaatggctgggtttttatctgaataactcactgatgccatcccagaaagtcggcaccaggtaaatgccttacatctacagcagtgggtctgtcagcagttttctttaatgtgtcagcrgtggggagagcgcaaaaacccacacacaccattatcttgtgaaagaagtagaggaagcagaaaataatgaaatcccagtgttaccacatcccctccaatatacagattaagagcrtttgtatttatrtggttttaaacataaataacatcagaattactaagctatttccattcatgtactgataatgaatcatgtgagaaagtcctttggcaaggactccacatggccacaggtgattcctttgagcagtgttcttcctgtatagggcttaagaggaccagaagggaaatgattgtactctcttgtcagctacttcctgggcratttgggttctttgataccccagtgctcactttcggaagtgttaagaccataaaccttaacagttgaccttctcaccttcagaaaacccaaatgtctcggagtttcattctcacaaacttccaccttcctccaatgatgagatataggaaaaaagacaatgtgaaattggagatggaggtgccctcttagcctctttacaggcatgagtcacatggcagggcattaaactctctcacaacctgttgtggagctcagcagggttagccaggactgytttgtctatctaactcttcttacatgggcctatgtgatatttttcataacaagagtccgggatttacctaactaataagatttccccaygcccctccttacaaaaactcagttcaaagaacaagccctcagcttctcctagtcccctccagggaaaatgaagagtagcttgtcctattctgaatatgttgtgctcccattttatcaaagtagaggatagatacgtaggtgctgggtgggtagataaatattagagggatgcttcttctttgctgtaacagattggcaagtaggaatcattttctggaaggtactccacagtggtggtgttagaaaactatttagaatgcctttaatcttggagataaaaatagtaacactttacagagttctgtcaatggatatctttagggatgttttgttttgggaggttttttttctgattttgtttttttcaggtatagcgaagcttgggaatctggactgtgcagattttctgcaaaaatccagctctggaaagagtgtattaagatgcatatcctaggatgacacaaagacagtatgctttattttacatcttaaaagtattgaacagaaggagttttgtccatgatatcccatcagcccactagcaggaaaagcaggacacttacccagggkgttcctgctggaaatgattcttggaatcagccttccttctactctatttgggaagtctttggtttctaacattcacacatttgtagcaaagcttccaaaataactatgatgttttgcttaggaataacaaaacatggaagaaaacattctgtgaaattttaaactttttcaaacctttaagtttcagatgaataagcaaaacatacttaaktctaagaagctattttttgtttgtcaaagaactgatgttataccagttctaatattaattagcaactttgccctggttttcctgtaaaataatctccaaggccctatctcaatctgtgggcagtatactgaaatacaaaaagtgttcacaaaaggaccttctgaactttgcaatctccctttaaaacttttaccaacttaaaactacagaactctgatctcttattgatttaaactagtgatatgtaaacagcacttcagagcttgtttcacaggaccaaaaaatttatgctgaaatctactcatgacaaatgggaaaamcctgattagcacatttaaatgaataaataaagaaccgtattcaatggcttaaaatttatagacctgcatcatccattatggtagccatttactatatgtggctatttacatttaaatataaacgtattaaaattaaactaaaaattcagcccctctgttgcattacccccatctcaagtgctcagtagacacatgtggttagtggacaacacagatttagaacatttctatcataggaagtactactggacagtactgctgtmaacacacttattaataatgcagcagactttcttggccacttggtaagaaagttttctgctcttttaaacttatttgggaagtttttaatacttttgaaattatgatttcctcagtgttagattatctgatatacagctctcacagaccattttttgtttttcctgtttgtttgcatattaaaatatataggattcaatgtttcacgtgcttttctaaagttgcagttcttgatttcttaaaattgtgaaaagaagtacccacagttatattaagaactaaaatatatggctgttggcttggttaccaacattgctgacagctccaagtaagcaaaagtaaaaaagatgtaggatcatttttaaaggccaatattttcttccttactcattaccttctgtaaaattctgtaagattttctttagttttccartaatgataaacatttcaccattgcatagacataattaattgattttttaagcagttggagagccaaacaaaataaggggtagaatacttcttattttattttttaataaaaatgtacatattagaagcctttatttttatttaaattgtatgtcactgataaggtttggatatttgcccctccaaatctcatgttgaaatgtgatcccctgtgttggaggtggggcctggtgggaggtgtttggatcctgcaggcggatctctcatgaatggcttggtgccctccccatgttaatgaaagagttcttgctctgraactgtgacacctcccccctctctctcttgctcctgctctcgccatgtgacatgctggttccctatcaccttctgccatgattgtaagcatcctgtggcctcaccagaagcagaagctaacaccatgcttccttgtaagcctgcagaaccaggagtcagttaaagctcttttctttataaattacccagtttcaggtattcctttatagcaacacaagaatagaccaacacagtcacggataacagtagtttttcatttttcatcaatataatgatcctgctgtattcttaaagttcttaatcactatttgtcactaatacgataacattaataaaatttgagtctcagttactttccagtcacttatacctagcagttcaataacatttagttcctggactaatgatcatgtgttatataaggcaaaaaattaaaaacaaatttgtctttgagtcatcaaagcatcaagggtttgaaatagctatataactagctgtgaaaaagggatataaatatccagctgatatttcctttacacatttaatagtatcatttttcaatgaaagcataaataaaataagtttggaaccagtttggaatttttaaatattaatcgcagaatcttactaacagaaaacaaaagcaagataaatgctagtcatttgtgcctgagtttttttttcaataaacagaaatgaagcttgctttaggaaacatgtgtactccaaataacctactattcacacaattctcagtaacattctttctttgcttaaataatacagccagatgtgcttagcacataactctatagaaaataataatttaaattagatttaaatagagatagatagacagacagacagatagacagatatttttgagacaaagtctcactttgtcctctaggctagagtgtagtggcatgatcatagctcactgcagccttaaactcctgggctcaagccatcctcctatctcatcctcccaagtatctaggactacaggcacatgcactatgcccagctaattatttttttaattttttgtagagatgtcgtcttgctacattgcmtaggttgctcatgaacccccagcctcaagtgatcctcctgcctcagcctcccaaaatgctaagattacaggcatgaaccmctgcacccaaccaatattaatatttttaacaattgaaagagctcaaagaaataggttttaaatttagaggccctgttttgctgacaggaaaggcttttagctggaatcaagagtgctgttgtcttttcccttcaattagtcattccttttaagacttttaagatttaaatgtatgagtcattttttaaatcccagaaagatctagtatatctcataaatgtaataatacagtgcagacctggtggaaaataattatttatctgaaactgggcctcagtgcctttcctgaatctaaacaaatrttcatctcacccagagaactgggacaacaggaacaaggtattgcaagtccaaaatccaatccaaagcagcgttcttcctccccacctctaggcaaggccaaaatacttctgcacacagtatagacaccagaaaaaaacagagccactgtagatgaaaccagtcagggggtaagagctgtcttttgatctagagcttgcacctttgctcctcagtaatactcccaggtcaaaaaggaaaaataagatgggcagttggctgcctcctggtccctccagcctggtcagtgaacagagtgggaagataaaacagctaagtatcttccttaacaatgcaaagcaagaaatccagtctgctttgggaaagtgaaagcaatgcaaattcagattattaatcataagagcatctcatgtgatatacaaaattattgtatagcagtaatgggtcagccgtattttattcaacactgaaccattaatgaatgctagctagtcttcctttcacttacagaatgtttatctatacatgactaaacaaagaaggagcgctggaaatgatcctgtgaaaaatactggctcacaatgtatcagctgagtttggggcaactgaggtagtaggaggcgccccctggacttctgctrgaatttagatttaaatagatggatgaattagacaaaacatactctctgaaagagtgagaaatacaatattcaccaattaagtgaaggaaaaatctacactatgaataaaacaataaatgtggatacatttgaaaatttgaatttcaaaccccttaagataatgtgacaaatacaacaggcctaatttaacatcttaaagagatctgtgtgacctattttgcagttttattttcttaggacaatgcttcagtatctttaactttcatatttaatcattttttttcttttttggtttctatggtatcaccatccatcaatccatattggttggagggggggaatatatatatatatatawgtatgtctcccaagagaaagtaattctgcaatcttcctcagcaattcagtctaacaattaagaacccttaagctaaatagaaaaattcatttcacaggcaagttttactcaatatgtataattagttttagttaactttattaatgaaatgtcgcaaatcaattaggtttgcaataatcagatgccgaggacccaagaggaaccattcctctcacaagaggggaaggtgatacacaatttagttgggaagcaaatgtaattagatttgatcaattgagtattcctgtcctgatgtggagtcagtcacatacccaagcctgagaatatatttgaaaagaggtagaaaaaaacccagtatgacttagaaaatgtccttgtggtcctattggccacaactggcagccaaaaagggctttgaagccacaggtagacaggttttgttcagacagggctatgttttagatttctctttcaaatctgaatggttttacgtagggcaatatataaactttcctatttgtcacagattctagcactctttaatgccttatactgggtgtttcacacagttatttaactgcccaaatcccaatggcacttcagtttgcaactatcatgacctagaagttagttattgaacagttatgaggtaacttaaagtttcttccctttgcctctagaataagaatatcaaagaaatgtcatgatgataggaatactactgaaagaggatattaaacactaggtattcctacttagggctacagtttgcagcagattctattgtgtttcagtcaataagtgtttttggacacctacatgccagacactattctcagcattgagcacaaagtcgtgagcaaggtagacaaaaatgcttggcctcataaaacttacattccagtgyataaagatgagaacaatcamgtaaaatttataatatgttggatggcatggaaaatggaaataaagtggaagggaggcttcaggttaaaaagagtgtttagggaaggtcttcttaggaagaaggaggaagctatgtggacatctgggagaagatcgctccaggcagagggtagagcaaatgcaaattccttgaggcagcaatgtgctggcatrgtcaaggcacagcgagtatgccagggtcttcagaaaccacagagaagagtggataacaaaagtgaaatcaagtattgaagagtatgaactgacaggaactagagacatatttagaatggatgccrgaacaggagaaatgggtgggattttaaaagctaaatgatttaaagacttaaaatgctctgaagtgtagtgaaatgttccccaaactgcagattttcccargaaaccaggtgcataatttagtcatcgatgactggttctgtggcaatgactctagtaattagacccctgcattttatgtcagttccttctggatactcagctacmttatttggtgcttttggyatacttcaaatatgcattgcctatcactgacctgtaatcctgtgtctctgggcctgaaaatataacttttcatgtagtagagaattagggctgtgcaacattgccactagattatttttaatgaaagctttgcccttttrgataaatacagcaatgtattcaaacaagtcctagggataccactgagtgcaaaatgtcatgtactagttattccatttaaattattttatcttcaagtctaataagaaaattctaaataaaattatatatttgggattgtgtgtgtatcatccatccacatgtaagtaggaataaaattatttaatggaaaatttcaaataggctaactctaaaaatgtacagataatctgratgagagaaaactatcctcactttgtgttatttttyaatggtagcattttctcataatccccatgcttttttcatgtcctgctattctttaagatttcctaatgaggattagggaataggcatatttaacaatctgtgttcgcaggttgaaaacaagaaaatgaagactaatagtttctctcctgttaatttgattttctacagctcctctcctaccagcttaggcagaggacttagttactatttccaatagatgggagccaaggaaaagacaagcatctgtgatgtcatgtctcccccaaacgggtagctgcctcaccagcctccattagagacatcccccasagtaagaaataagaaataatcatgagtagaatgagaaaaaaatrcagcttcctttatctgagaaaaacaatagtagctcaatgctgtggcctaaagggctttgaaaataatgcaatttctgataaaaataaatgccattattcttgcttattgtcactgttttagtcaaataagattttagcaagcatatttcaaattgttctaaatctaagtaaattggtaattaaatgctatcattagaaagtattttaatatcaraaaaattggaccataagaaagttagtttacccttgtattcatatatacatgtgctttgtgctaaaaattgttatcatttagtgagaacctgtgactatattaattaatttaatttaatcttcatatttctctgaccgttagagagtttgtgacttggataactttcaaacaactagtaccctgatggaaatccagaattttgttaacccagatcacagstgcatacttaaatgctatgcaacagtggcacttacccccaaaccgtatcctatggaaatgcctttttagcaaattaaactgaattgtgttcagagatccacaggtctaagcaacattagggaaggggtaaagtagtcctcagcaaggcccttttcagagcactccaccagtgcccttgtcctcctgggcagagctcctcagctatactccctttcctagtctaccctatcccacaacggaaccatacttctctcatggaagccctggtctcacagaactaaaaaggaggctcctagaaatggggttgtgttgagttgacagagatgtgtggctctttaaactgaaatataatccaaagagaacaagatctagtagaatttcaggtcctaagsctggttaaatttcaggtcctaaggctggttaatagtacaaatacagttatttatttataactagtgcaaatacagttatttatttataactatacaggaatttatttcccagtaccttctatattactaacatcccataaaaccagccatgtaaggaactagaacattttgagaatatgcaatacataactttaaacaagaagttttcattcttaattaaaaagaaataagcatagttcatcacaagttccttcaaatccttgtgccatttattctctctccccagagatattagacggcattttagagaaaacaaactctttaagtcacaaggagtggaataatcatagttgcattttaagcaagattatggttttttctttgagttctctgaatttgaatagtttcttaaccttagttttttaactgctctgaaaatggtttctgtccctggtggactcttgtttcaatgcagttattttgtctggtagagtcacagagttaagcygtcattcagatcagaaaaaataaaagagagagatgaattaatctcaatggcacagtctccttattcaaaaaataaaaataaaaataaatctcaagtccaacaatgaatcatctttgagactctcccaagtgatctagttttaarggcaaaaactttggggaaactgttgggggagcaactggtgcccagtactgtttcacacacgtggtttttcttatctattgctcacacacttagacataactggaattattgcctttgtattgttgttgccattttataaaggaagacaaaaargatcagacaaaataatagtgaacatctattaattggacacttactggtgtcargcactgtgtcatgcactgtgtcargcactgtattttcttatttaatccaacaaaaaaaaataggmtaaattatcttattggctcaattttctttacagaaactgagcctaaatttcccaaatggctaaccaatgccagggccagcaactcaaatttgggagtaattccgacacctaggttccaaccatttttctcccagaaataacccaccaaattcaccagagtctaagatcttactgttactgtttaattaactgctacaattgcagcattttaaaaaaatataaatgagcactgtgctagtatttaattatagctttatactgatactgggtacaagtataagctaacaccattttgaattatagtagaagagtcaggagctctgagaggaatgttcaggatagaataaagcagatattttaatgtctcatttcagtgaggaaaattgttaattcatatgccaccagccatyggcagaaatgtaacaggaaatgaagaaaaacttaattactttaaatacagtggtctgtagtacaaattattgtgccgtgaattagtttccttctgctgtagaattgatcattttgattatgtagccaagcagtgtaagacattactaaaattattcttgaatcctacctttgagatctatataaaacactaggcaatttgcctgcaaatacatagaaaacaatttttaaaaggattgggaygagttattttcccctctgttaaatattagcctttgaaatgaacccagctgatctgccaaataacacttggaaattgttgtgttttaataaagtgacagactgagagggaagccacactagacgtccttatgcttttagaggccttacagggcaggaacattatgcaataatgccttttaaaagaagtgagcttcctagtattacaccttgcctggcaacaaatgtagccacttactgaaatgcaggcgtaattagaatctatgaaaatctagcatcagaatcccaaacctctatgcaatactcagtaaattacagcttttatgtctgtaatattttcaaccattctacttaaatatgtgaatacatgagtgtggagttctttaggaggcctgctgcatatgctagggaaaggtttcatcatttctaatcaggatggctctgtaaatgggatgyctcatgttcaggtttctggaaggctcagagcctgggcttctactggcagagggtagacccaaatggactactctagtgaaaatctccaggtgaacatggaaygcagtgaaaacctggggtatccaacttgcagtataggccaccagcaagtgtcacctctattataactttaaccaggcaagctcagtctcatgcattagtttataaaattgcaacagagccttctaagactgaaaggacattagtttttwaacctatatattatgacctaattaaatgaaattttattttaaagccctcataaaagtagtaaaattggtgttttaaataaaccaaatgggaattcaaccactttaatttttcttttgttccaataggaaaataaatgctttaaaatttgaagttgaaacatgggttttaaatatattgagataaaaactattttgcataggcattttgaagaaaataaattttgttctcgtgatttgtgattggccattgatttccgtgtttaagattatgaaggtgtgctcagctgtctactagaaataacaggggagactcagtcttgtttcaaatggaagggctcctattcggttttctccttcatttcttaaagtgttgtgatttttttattccctggtgttatgtcttgagattttaaatcttaaaacatgcaattaggtattgaagttgaaagctggaagtctcagccagctagtaatggttttttaaaataggtaatacagacctctagtggttgaacagtttgaaagcctctgcaagaaaaggaaattgcgcagaaagtgcctgcattttaaggggaaaagttagttaaaattattcagatgataaaattcacatatttcataggaaaaaaaaagccagaatgggcttcaagggaaggtggcacacttcccatccttttagatgttcctcaattcctctaaataagcaaaaactctctggccaaagtcacagtaagaagtctggatctgtattatttttctctaaaagatcttgtgaacagagctgctagatctctgtattatatgaaacatatatttttgtacacagttttgcctcactggggctttgcttcctttgtactccagaggctccccatgaaaacaatctgcagccacctcaacttgcctgtgctgttctcaggttctgtccatggggagccacacttcagtgagctcagcgattggatggctwtttagtctacatgagagggaaactccatgtgcctctagactagtgcttctcaaactctaatgaacacccaagtcayctggggaatctgcttgaaatgcagattctrtctcggtctggggtggggcctgaggctgtcttgttcgtaaactcccagttgatgctaacgctgcccatccagggccacccagagcagcaagccggttctatgacagctctctttattttttagttacatattttgtttttactcatttcttctttrtttgctcttttactttaataacttctgttaaatttttaatatttggatctgtaaaacatttaaagttctctttcacttcactatgtacaagtatctctgggaatctgttattgaagttttgagaagttgatctcacattttaaaaatagattcagtgtcatctctttatcttgaaaagttcatggtagttgtgagcatctctctaaccacttgaagctattgggttagaggtagctacaattaaatatctgattagccatattgggagagtgggtgaaaacaggttttgtgcatgtggtagatgtgtaggaagctaaggacccaaaaaacaaccacatcataaaatcaagcagaaacacacacacaccacacacacacacagargctcaaagcataagtgtcaacagatcagaagaaaacatgggagaatgtattttttcataccaaattattaaaattccatcatctaaataacttcctatcatagcatgttgtcgacctyatttttcaaatccataattttagaacttatgtcgtggggtagtctaaaagcctcttgcaaacttttaacatctagtttcaaatcaaaaataatatattaacaagctgtagcatagagggagtacataaattatcatcattgccctgcatgaatagtaattcacaggtttggctcacacacaacttagatgaaataattaactatgtacagtacttaacagtataaaagtaattaatctagctgcctcgtaccggtttggcctaaataaacatgcaataaaaaagccataggattttattatttttttactcackwtactactttagtgtgttggaattttaatatgtcagaagaaagatatctttgcattaaaaaatcattttcttttcaaatgttaatgtactgattataactaagtgaattccatatatttataattgtgggcagatgttctcaattaatagtttyattcattctacttcacagtttagtgaaaaggattattttaaattaaggtgtaaataagaacaaatgagatttttattactacaaatcacacagaatttgttggtggtgctataatcctgtgtaggtatagctttggcaaaacatttcagataagcttgttttttgccccatgggttctgggacgaggtgagttgtctgtttgtcctataaggttcagaaaggtaaaagggcaaggtcattaattggctagagggcaacaaagaaggtagttatccctgtgtggtcaagaaaaagtggctcaggttatcttgctcgggagagaaaatgttcattcagctccagtccttttggtaaaagcccactctcagtgtatgagtgttcctttgcctaatcatgtagactataacatgttttcccctatatgactccatcgattaatcattgcagtattatccccacttcataaatgggcaaagaggaggatgaagccgagtagttcttccaaaatcaagtagcatgtaagatgtaggagcaaaactcaaatccagagacttctgcttccagccaagatggaataacagggactagatttacctccccacctaaaacaattttaaaaactggacatacatatgaaacaatggttttcaagagagtggacatcagataacaaagggcagtgatccctggaggataggaaacaaatgacctgggattgtcccagcccactgcctggagggagtttgcaggcatgatacagggatggtacacccaggcagaactcgaggtcctctctgagttaaggacacagagctgggagtccagagaggccaaggaggctagagttcagagtaccagagagttgagagctgcacagagaacccagagatctgcaaatggtaccccttgtgcttcagtgcatgtgggcaaataatcacccaaaygtattagagagaacaagccccagaggtcatcaagagctagaaaatagttgctatttccaccagccacagtggaaagtctcataattcatggagcatcaggtagcatactcagtaggttcttgcctcaggaatgggaaaaatttagccctagactaattgctgctctggtaccacctaagaaaccrtaaaagtcagactcaaaagaattaaattatttgcaagtaactcaactgcttttcagaaaacaactggagaaattttgtaggaatacaaaagcatccaatatccaacaaagtaaaattcacaatgtttagcatccattataaaatcaccaggcatgcgaagaagctggaaagtacaacccataaaaagaaaaaaatgaatagaaacagacccagtcagtaatgacacagatgataggattattacactattacattaaatggttattatgactatttcatatgttcaaaatgcttgatggaagtttgaacatattaaatgaagacatgggagatataaaaaagactgaaattgaacttctagagatgaaaactacaatgtctgagatgaaaacttaaactgagacttcagatgctaagactacatttgtttcacatccccacaacattcttccctggacgctgagtttcctcccagcagctgaatacttcatgcttcatcctttcttaatgctgaactctcagaaaaagtccttcattctaagaagaggcgggagggtgccactctgtagcccctttctcatctcactctggtccctgctggcctggaacagattccactcccttcatgcactgatactccactctagactgagcctcttcatgaggtagccatcaagccatccgcagtcatcaacatggcaccttctgagtcagttacaagagtttgcatcatcagaccaccattttccgtctctgttttctgacttaccccaaaactctagttaaaactcatgaaatattatctcttcacatgaaatacaattaatatggaagtcagcatttttgcatctcccaacgcttcacatccaaggagctgtgtatgaaatcatgaactatgttcttccagccaaccaagcaattaaccaaagtatacatgtccatgttgtccttgtacagagtttgaaatatgctcatgagaattaaactatttttcagtaaatctgaaaaatcaacttgcttgtccaggaagttttattagggatagaatcccaaacaatgaatgtgctagccaagtgttactattaatcagaaatactccatattcatccaggattaatcctgtgtaactccctcagtcagtgtagcaatgtgttctcttcctgcactttttttatgtgtgtgtattcccaaatctgcagtgaatgtatttaggaaatacattagtatcaaaaggacaaatgtagccttaaaacataaatgtacagataatttcctatttgtagcaaagttcacttcagaaacacttgataagaactattcaaaaataaatattttcagtatttatttaaaatattttaaaatgtaaactcctcaccagtcatctagccagggccactgagtgtggctctatgaaatagcttcagtccctttcactactgatgaccttttgaacacaagataatatttgtcgagtaaatgtcaaaatagtataagaatacccaaatcatggattctatgctgtattcactcacatagagacttcactttggagcacttcagagcagcaacagctctaagagatgtaacagtatgctttccaggatagaagaacgaaaagggaaaaataagttgctagcaagaacaatgaggggtaggggtgaagttcaggctgccattctgaaagcttcctcagactgagtcaggcacatctcacgaagtgcagactatgcaagctggctgtgtgagatcaagggtagacagttgactcatcctgtcacatctctgtgttttaccgtaacctccaactattcagccatgaatcgctgcatgtggaatggaagggggaatgtctaacaaacagagacatacttcaagtcttcagtctagttaaaacattggaatgagggtctgcaacatctttctggggcttggagtctcgtctcagttctaaaatgagatggttggcctggatcctaagtttcaaattggcagcctttttaactaaatctaatctagaagagttctgttaggttccacagtgttgggttttaaaatatatatatatattagttgaaaacattttaaaataggatctttcacatgaaatttgaaattttaagtttatattttaaagttagctgttttcccccacctcattacaattggcacagttgactatagctgagaagtgaccccgtggcccccctccaagaaagggggagggccctccattcaccaccatgtccacttcacctatttctcccagcctatatatgtatttgaatatgtgaaccctggaatgcataatgtctagggaccataacaacaatagaatgctatgaatctctgacttacaaggactctcttatgaatctctgacttacaaggactctcttatgaatctctgacttacaaggaaaacaaaagactgtagagaatagtagttcaaccacattttaggttaaaatagactttacttggataacctgacaaccaaaacatctttgataatatagtaattgtgtatgtttaccagacaaagggtatacatgtatattcttgtatttctcttaagaagaaaatcaataaatttgacccatgaatttctttctatagcagacatttttgtgacttcctgactcacaggagatacagctaccctccaaacctaaatcaaaagtccgtaagttgcagaatgactttttatgtaaagagaacatactagtttctgataagatataaagaaaccatgtaatttatctagggaatgactctaagctgatcattgacttatttacacaactatagctactggaatagactgattccaaaaatatattttctctgaattagaatctttttcatatcaaaatatccaaaattattagcatattatgttattctcacaaagtcctaatgaacttcacaaatctgcctgctctattctgagtacaaaaaatatttagcctaatttgtttttccattattttatatagtaataaagtaataccaaaaatgttattgccagaaacaatacagtgttgtataattattagaaagtgaactcatgaaattctattaaaaaacaacaattaccacatgttaagtcagataattcacagaagagacttatatgaatactaggggagctgtaggcaacamaatttttctctgaatcctgcattttgaaggaagtttctgtcatttaattagttgaggtttgattcaccaaccaaaggtctatagtgtgatatattttcttcctccaacataaagttaacttaaagtcatttgtactttatgtgtttattctttcacttcttccccaaaagtaattctttaaattgctttatgggattaataacaaattatatcattatatatttttgtattattagggcttctaacttcattataatcaatttattggccatatataataatgcaacaaattacatctgtaaagtaaaattttatgacgcaatttacttagtatatgtataagtctcattctgctgcccaggctggagtgcagtggcgcgatcttggctcactgcaaccttcgcctcctcctgggttcaagcgattctcctgcctcagactcccaagtagctgggattacaggcatccgccaccatgcccagctaatttttgtatttttattagagacgrggtttcaccatgttggccaggctggtctcaaactcttgacctcaaatgatccacccscctcagcctcccaaagtgctgggattacatgcatgagccaccacacccggccggagacaggttctccctgacctgtgagactgcaaaggtggtgtttcctatgagtccagccagataatagactctgctaacattaattaaattaatattcctttttaagattctaggtgctgaatatatatctcttggtctataaattagcttcgcacttcagctatttagcaaacttgttttttattgtatctagtgtattcatactgaatgggtataatatactgtcttttgaaaaagttattttgtacacataatcttaaaacactcttccaagggcaaggtagaggcttcataatattatttccatttgtcagatcaatgaaggtttaatgatttgtccaagatctcaatttctagagaagcgaagaagaatcccccaattctagttytaagtttcttttttcccttgctaaatcctgcagtctactgatttttttttttttagacggagtctcgctctgttgcccaggctggagtgcaatggcatgatctcagctcactgcaacttccacctcctgggttcaagtgattctcctacatcagcctcccragtagatgggattacaggtgcatgccaccatgcctggctaatttttgtatttttagtagagacggggtttcaccatgctggccaggctggtctcgagctcctgaccttgtgatccrcccaccttggcctcccaaagtgctgggattacaggcgtgagccaacatgcctggcctgcagtcaactgatttatgttcatcaccttcttaagttaaattgctcttttactcattgcctttggttttgtgtgttaagattcagcatcagcattcatgatatcttttcactcttaattctgagtgtttccgtccgtttttttaatttttgtactttatgggctttttcttcatttacccccaattatgcrggaaaggctgtgtgcctcttttgaaagctctgatgttctcaatgaagagaccttttaaatgaccttgtttgtcccccaccgagttgcatatcacaacttcaaatgtctcactaaaatgttacccatttggcatcagtatacagaaaaggctgcactctgagataagaaagaacagtggtgttttcatagtaagagaatagagttcttaatgggaaaggggagagtataatttccactgatttmgctggtctttcaaactttatgatgcttttctccttgaactagcctataagaaatttgtagggaaaataccacaggaatcaaattttgggcatagatgtctattaatattgctccttacaaagctttttcccagaattgtttctccttgcctacaaaaactactccatgcctttattagtcagaaaagcagttttgtagagaaggcaagtaacagagaatcaagctaagtaagtgaaactctgtaattgtcaaacttccagaaagtaacatttgtaactaagtatggtatctttgtcctctctctttctctcttctctccacttggtttctaatgaaagccttgattacatgttatatttaatgtactgttccacaaagaagaaaaggcctaatgtgaatgcaagctgaatttacacttaaatattgcagtcagttcagaccggaaggatacagatcgatgccctctgatcctgtcagattccccgaagtgtctatggcagtgataccacaagagggcagggtttgacttccggactaggtggcttcctcccttcagtgcagaccttggggccacgacaacagccatcaatctcttgaaaccctaatgatgaatctgagctcaaattccctcttcagccttatctgtgcagaatcctgaagttatgaaaaatgcttacagaaggtaatttctagaatgatctaacacagcagatatttagtaaactccctgtttgagagctcctactaagcacccaacacagctttagactttggtcacccaataggattttatcttttgtgagggatctgtagttttccccggaagatataatgcatgaaataaaagcctccaataaaattcagtatacagttaatttatttcataaaargtgagagatataaattatcaaaggttaaaacaaaaagtaggaaccagagcagggtttttcagtagcaactctattgacattttggattagataattttttggtgtgggagactgtcccacgcattgtaaaatggttagcagtatcacttgtctgcctgctagatgctagtaataccccccacacctccctctcccacattgggaaaatcaaaaatgtctcgagacattgccaaatatccctggagtacaaaatcagtctaattgagaggcactagactggagtataaagagatgaccatgccaaaaagtaaaaataataataatagagccttgaaacattacttacagaatgtcaaaaacgtaaggacctgctctctattcctgtttcttaacctgagcaatgggaataatgatgccttccctcataggtctcttgtagaaatgaaagcaattaatgcaacacttggcacatagtaagcatccaatgaataataagtgatcagtgttactattgctaatattaagccactattataagtcctttctgttaatcagcagaaacaaaaagaagtataaaataatggtacattaaatgaacttaaacacttgtatgtcattttgtgctaaagttatgaagctgaaaagattgaattgacattttccccattgatagaaatcatctcaaaaatgctccatcttccttgtgaaagccaaaggccagcagtttccacatacccagcatctgataagtagttaatgatccwgaaataaactgttaggtgcttcagggaatttctgtgtatagagaagttccatgtaaatatttctccgagaggtggatggagaatgataattcacttttaccctctgaatttgatttataagcttcacctatctggcaggagataagaaccaaagttaactgaggagaaaaaaaataaatgatttcaagtgaccatgatcttcagctggaaccagttgaaactgcaaagcaactgggctgaagaagttcagccaaaattatttgtttataaaaactagagagtgttagatatttctatcacattggcttatttgaaatttctgctggctcaaatgaaattgtattcttctatttcctactgcggggttccttccctaaccacaattgcttttggattggagacttgtaactttgagaacaagaagagcctcagcttagctagctggaagaaccagaggagagttttaatatctcctgaagaaagaaaagcactaacacggttattatagttcaggacaagtggagtcaaagttgacagtttctgacttgaacagttttgttgctggtaataaaagcagaagtcacgtgctgaacgtgaaggtgagcagaggagaacttgcgatggcaaagttaaaaacaagaggagatgatggtcttggtgtggcacaggatgttaaaaaaattctcctgtccttaaggagttactgctatttgagtaatgtgccacttccctacatagccttctatgcagaaatgctatatttccacttcacaacccagaacgtgcattttattttacatttagaggaggaacaaacaaccagaaggcaaaaactggtgcattattttttgcaattctcttggaaagagttcgtttttaacttctgctcagacagcacacaactactgggaatatattttaatttcaaatctgatgtgtgacatctggtaactcatttattgctaatgaagttttcacaggaagcagcagtcaccagtagctcatcttatttttcagttggcaaagtgttgtttaccttttattggcctggcatcggtgtctcttatcacaggatatttaattagaaaacgcaagtagcctaacatagaaaagaaatggagtggtagataatagtagatagaatggtctaaatatttttattacagtgatgtaatatcactgtaatttatgtttaaaaattatgtaatactcaaaaggaattctcagagctggcgaaacagtctggtccaagcagcctctcagcagtgcctttcagcctcccctctctgagtctttccaccccttgctggtactttagtttcttccacttctagcaccacgtgtagtttcccaatttctcttacccaaatttgctcrcagggaaaaaaataaattaaattagccatttacaccacagtgtgaacttaataacaccaacaaaagttccaaagctctagggtctcatagcacctccagatccatgatctcattcggtgtttccaacaatgttttgcaccaaactggacacatgcttgctacttcatcatcctcatcgtgaacattattattattatcatcattttccagatgaagaaaatgaatcacaagtcaactgacagtccaaaggctccacagctcagagraggtaaatcatgtgcttaattcagaacttttggctcccatcactatgctcttcccactgtcttaactctggttgtcacctgagccattgtgtttcttctcaggtagatcttagttcttcctgagaaggtatgaaggtgggtattccaccctacctgaattataggaatttcagatatctgtgagcagctgcaaaggggattttactagatgacatcctgctgggcacactttacgccagtcctgaatgtgtaatagaaatctgcagtttaatgagtaagtttctcatattcagtttttgatgcttcataaatgttaaatgaaaacattttagctgagggtacttttgttgtttgttggattggttttgcctgttcatcaggattatcagcatttaagccagagttgcaaattaagttgcctacagggcagtgcttttcaaatattagtgtgtatcagaattacctggagggctcattaaaaacagcttgccgaaccccacccacagagtttctgattcagtaggtctgtggtggggccagagatttacatctctaacaaatttctgggtgatgctgatgctgttgtttcagggaccacactttcagaaccattgctagaggggccaactaggggacgtctgtgagtaaaagcacctacactgtgcttccagtacagcagccagccccagtgtgatgagcacttgaaatgtcgctagtgtaactgaggtgtcctggaagcatacattataccctgggttttgaagacatggtacaaaaaatgtaaaatatcttaataattttatatggattacatgttgaaatgacaatagtttggatatattggattaaatattttatcaaaattaattttacctgttcctttttacatgtcaaatgtttttaatagaaaaattacaattatatatgtgtctcactttctatttcttttggacagcactgaactaaagaaccagaaaatagaggggtgtattagtgaactacagaaaattcaagtcccaaaagctgtaaatactctgaggaccaaagaaaatayatacgttgttcagatttgccctgaggggtcagtttgtacccaaacatttgctgccacaagtagtaaatgtagaagcaatscaatatctactattttacttttctttcagggttaatcaagtgccttgttataattcttcaaactaaaaacattattataataatgaaaaatatttctgctgaacttccgaataaaaaaatttagtaatattttgaaagtctgagctttatttaattcattttacttacccttgtattatagaacaattatatttttaaaaatgcttttatgtcttccaaagaactttttatttttagcagtccatgaaatagaggtgagaacaggtgttggtattctcattctaaatatcttgtaatatttaaaggaaaccaaagtgaaagattaaattgccatgtaagattgtgttgccggttactggcagagcagactctttgccaggacagcagtccagtgctttctcttccaggctgttctgctcttcctcaatttttacagcatttttatgttaatcaatmaataaataaaaagtaaagaactataatgcatacaaaactgtgatggaagaaaaggaaactatgtgataaaatcaaataaatatgamccttatagctttagttttcttagaacagaggccctttaacttcagaatgttgaaaccttctcttgaagttctcttataatactctgccctcacctctgtgtttttatctgggcaattagaccacattaactaattgctaaactttaaaaagttgtattttcttacaaagaatctgagaatagggttgattttctatgttattttaacagtatcacattgcgcccccctcttcacaggaccatgtaatcttgactctctaacttcatggcaagcttttaattttgattttcaaccatgttccaaactgtactctttgacttggtagtgtcaataaataacgtaagggatgtctgacaggcttacagcctttggccataaatggaatgaaacaaagtagtccagatagggctcaaactcataacattgacctcgttagtctagaaccacaaccagctatccaaatgtgcctgggaaatatttctttgagtaatagttaattttttaaaagaaagaaaaaaacctgtgactatgataatcttatgttgagtttctttattcatcttgagtaaacagtaaatttttttcactttgttgtttcaatacaaagagttcttgtgtttaatatagaatattattaaattagtgtgggattaaaaatatttagatagctgatttaacaatatgtgatagcattaatcaactgccttgttataattcttgaaattgttattactctacttgtcaagcaattttgcccttctcgtcaaatgatgcatacctgttcaatggaaggattataaaagttcatgcttcggaaaatttttttttttttttttttttttttgagacggagtctcgctctgtcgcccaggctggagtgcagtggcgggatcttggctcactgcaagctccgcctcccgggttcacgccattctcctgcctcagcctcccaagtagctgggactacaggcgcccgccactacgcccggctaattttttgtatttttagtagagacggggtttcaccgttttagccgggatggtctcgatctcctgacctcgtgatccgcccgcctcggcctcccaaagtgctgggattacaggcgtgagccaccgcgcccggcccggaaaatttttttaagagtataaccaactccccgaggatacaggggtccagggaagctaaatgactgcttcaaggtcacccagccagtgagtgggaaagctaaaattagaacctcagtccgctcccacattttccaccaatttgcaggctatcgttaaagaatatttcttctgcaatcagaacattgagcaatttggaaaaacgtgtacagtatatcgaatattctagcttcatttaaaatttatggttatgtggcttgtataatgttaaaagctttaatctaaaatgaattgccatgtggccaataaccccaacataatactcataatgcatataaattctctaatattatcataatttcttaagggtacaaattaattagtacctcttttcctgcccaataactttcctcacaccccttaaaatggaatttgaaatgagataaacagttgctgctgctgaattaaagtttcaaagaaataaaagtgaggtggcttcatatacaaaatctgtagtttttttcacaaattggatgaagcaattgttattgactaagcccatattggtgctgcccttttctctgttgaaaagaaaagcttgtgagtagtctccaagagccatattattaaaaatgatgtttcctccccatgatggctgagatactaatccattgaaatgtggcgataattcttgtgagaaaattctatgagtctataagtttgaagaatttagaagtgtaagaggacaggggttcatttacttacaggccttcttccaagttaggttttattttccttttctcctagtctctggagtctcctctctccagacaccctggaaagccattcatggcctttcatatttaacataagagtatttaatactaacactaacatgtcgaaggaagatgtttaaagcatgtgaattagacttgatcatatatgtttcattggcacctgtttctctactttttggaataaaataaaaacgacaaaaacagctaagaattttggatagtgatgtgggtgggagggattggggcattcatcacaactgagttgtttaatttatagtaagtgggaacttttagagttgagagaagtttaattgtagtttagagtttcattattagacagtagtcttaaacaattcccaagaagctaaaatgtgggattaacattttactttcattgkaattcatatcctaaatataaatgttaatataaattataaagtttctgaatttcctttcataaaactgggttctttgggttcttagttattttggatgaaacaaggggagggctagttggaaatgatggaacatttaaccactgtcaccacagttagtcacaattggtacatgcagaattaataaagcagcttgccttgtttttatttcttgtgaggtcagatgacagtggatgatattgacttgggaagatggccagaagccactatttaccatgtacatatatcagagagccatttattaagtttgaggagattggatcttaagtacttaattagaatgacattaataattttaataaaatgttttgcattgagagaactattcactcagaaatagcaggggtgaacaaaatcatctccaaagaaatcatttaacatgaagttagtctaggattaccaaccaagagcatggcattctcccatgtatctgacttaaaagcaatacttgtctcttgccccatggtgccaggtggtctgccatgcttccctcttcgtggctgccaggattcccrgtatagaggcaaatacaacctgtaaaggctcaaaygcttcatcaaaagccatgactataatccaaagctattaggtttaagcaacttatttggaaattatcaccttcaaataacaygtagggcaacctcagtagagatgaaatggacgaagcaggcatggaaactgcccttcctgccttaaatacagaatgccagatcacagctctgaataaaagttaagaccacattgggccagatcaggactaacactagatacacagctgagatamagttccagtgactttggcagtgtgaaagtcaggaccastaggcacatatactgaaggcaatttaagctgtgtttcctgattaaagccagggactgaaaaatcactacctattcatgatgaaagactagaaaacttctgaagaccagacagagtttsagagtggtatagttactaatctactaaatactgcaaatatatagtatctgcaaatatatatataaggttgaaaactargctcagaaatgagcattaaaarcttttccagatcaagggagtgctgtacccccaagctgaggtttcataggctaccatcatccaggcactcagtcttcccaagcaagttaattcccaccaaaaatgaacacagtcaaagattacaaaacctaagcagaagtccattatcaagaaacagtgtccacaagtgcaataaatataatttatacctgaggaactataaatagtaragcaattgggtaggggctcttaacagacagatattcaaaatgttaaggaaaataaaagaagaagtagacttcgtaaaataggaacagagggctaagaaataagaacaagtagatctgaaaaagaaacgagtaaaaagcctagaaatattagtgccaatttctatgggtcaatgatttcacaagtgaatagctaacagttatttcctgtggccttacttggcagagagaggtgggggaagcaacataggagcagaaacagttcctttctaagtctgacttataaaataggaacaataaagacaacagtttattgaacaggatggtttattgagctgtccagcactataagcaaatggcttacaaacattttcctactctttttgatgcttgagagagatactttgatagaagattattccaaaatataattacttggtcatttagttctctctttattatcataggaaactatggggaatttttttttctttagattgcaaactagttttaaaaagagcttgtaatgaacaatttaattagattggttttggcttgcctaaaarcttaagaaggtattaatattctaatcaaaagtcttgggaaagcattcttagaataaaaaaaggaaagaaaatcttcattcttatgctttaagaaccaggaaagctgtcaaaggatataaggtaactcttacaaaagcaattgtaaaataaacgtggtttggccacaatgagccaacacctatgtttgccacagacttagrttcccacctcactcatggcaaatttattcagctgcttaagattattttttactcatacttcgaaagaacaacagcctggaatttttagacttttaatggcaatggaaggaacttacctatgataaacatttttctttactctcacgctttcttaacccatggctgttctgagtcaatgtttgccttgcattcaaaaaataatagtaaagattcaagtaaaacatattcattaagcactatttgaaagatataccaagtgctttaacattatctcactttattcctacaaagatcatgtgcaataaatatcactgttcatgtttcctacagatgaaaaaaaactgagggtcatgttcagagaaattggatgacttacccagagccacayagatttgtacgtggcaaaggaggattccatttcaagtctttcaaccccaaattcatcttcctttctctaaggggamatggtgctatggaattcatgtaagccacagagyttggataaaaggaatagtaagaccaaaaataggaaaagtaggaagaggtggatcctcctatgtttttaatcagggttctatctacctrtaactcttctgggaaaagaagcaggatgtgactgaaacatagctgctttctagatctcacaaatctggcttttctagtcaatcacatctctctctccttcggcttctcaccaaaccagcatccgttcagcttcaaagaaaaaasagccctactgtttcccactcatttatcatcaatctaaagtaactgccaatcacaaaagtcccatctttatttctttccttagaaacaaatttctctagggaagcttatcagtagcagaagtgcagactgggaaatggcctatgtcaccctcccatctagaaatgcccagtgcacatccagatcccacacccccaagagckttgtgcaatatctgttaatttatgagagctgtttcccatagatgatgctgcaggcattagtaaggagggcaaagttcaagtgatgacaccatctctactccacctggctggtttccaggtgccatctcctgatccctctccccacccccactgccctctcaccatccttcccccaaaccccacactccccaccaatctgggtcagtgataaacacagagtattccacatgcctctgatatgatgtaacattcgacacactaaagataatactgcctttaaggctcctgtccccctggctagacttaaactgtgtagaggaggagaactgtgactttattccccttgcatcctggacacccacacatggtaggtgttcagtgaatatgtgatgagttggtgaatacccactgaatgtgctatttgcattgctacttccttgtgcttccttccactgtttctatcgcctaaaattcttctccctttttcctccaccctcgagtaggaaaaaatttgtttcyttattgggcagggagttctggtcattatacatttatgtaaaatgttcttctaattggcatattccatgctatgtccagattctttcaagcgaattctcattaaggtaataatacctcaccgaagtttccagggatgatcccctagctgttcaaagctaccttttatatattaaataccagtcaatatgaatcaatggtaactgaaaaaaaggctgatagcttgtgaaggagttggagtacaaaactatgcctataaattgatcctcacaaaggcagactttttcccacagaaattgtattatgaatgctagttatagtttgagactagttaataaaattctactcactccaaacataggattaatggaacccacatgagttgtgtgctgtcaaagtcgagtcaagaggagagagaaggagaagaaaatttcctccctgttctcatagctcagggcacccaagggattctagagcgtaaagtgtactcccttctattttttactgcccttattcccaagctgaaccaaatatttacctctgccctcattttcagttatggagttcactcaggcccttttcaaccttcgaggttccttaacctttacattattaattctttttctaagcaaaatccagctgatctctactagatggttaaaaggatagtaaataggtaaattaatccacattaagccacaaatgactgctagccctaaccctttaatgactaattaatttttaataaagaatatgtgtctatataaatgaatttatacttctaagttggcataagttcagaaaaaatagtaagatgaactggaaaatctacaaggtatagggaaatcctctgggtgaggaagaactagtcatacctccctaaaagcctagccctagtttctgttacattatttcttcttttcatcttctgttttctaaaccacaagtttctaaaagcaccaaggaattttctacctgtttatttcgttttgtttttgtttctgtttttttgtccaaggtgaggcccaagttgacactgagtattctctgtgaaactctgcaaggagcaacatgtgatttcacagaaattagtctcgatacactatattcatggctgtaagttctatgctgctcacccattcatttgtccattcagtcactcattcatgagacatttatcatctgcctcctggaacataccagggcctacaccagaaaacaaggaaacaagtaaacactagtaaactttaaacaggctctccccacaagcaactgacagaccagtggagaagacagatatgtcaacagatgattacaataaagtttcaaggccgggtgcggtggctcacgcctgtaattccaacattttgggaggccaaggcgggtggatcacccgaagtcaggagttcaagagcagcctggccaacatggcaaaaccccgtctctactaaaaataaaaaaattagctgggcatgatggtacacactggtagtcccagctactagggaagctgaggcatgagaatcacttgaacctgggaggtagagatcgcagtgagccaagatcgcaccactgcactccagcctgggcaatacagtgacactctgtctcagaaaaaaaaaaaaaaagtgtcaaacctacatccaaaatgtcaaagtgctcaaaaaagttgggaaggcttcaccaaagatgtgacatttagggtagataacacctgtttgtggatactaatgtcctggtgagtcaaagaagaaaaggatgtacattatataagctggatgcaaaaaggaacaataatgaggacatgcaaccaaaaacttacatagggagaacaactttacttactcagggaaggcaaagagaccacttaagaactccttcacatgtgttatgtcttaaaagctgactactggagttgtatcccttgcacagcatccctttgcaccaaagtgaacactactctaagaacatgtgttcagctctcctgaatgccaagcacaaccatgcttggcatggcagtggtgtcttatttctgctcctctttttccccagggcatgccattgcaagagaatgctcakccatgttcatctggggacctgctcctggyagagcaataggatctgtgtgcccagcaccactgcccacctakctgtcctggcctgtgcccaatgctgaccttcacctcakagtgtggctgtaccacattcggtgatgtcactctcactgaaccttyagcctccttcctgggacttcctgatggactgttatccagggcagaatgtgttgattttctaaatcacataaatgaatagcttgactgttgattatgtagaaaatcagagcaaatatttgcatggctttgtgcagcccattcttgagcatctgattctccccagaattctaaaaaacctgctgctttctcaagccctcagtaaagacatgctttcttgataatcctagccaaacctattcatttgacatctttgttacacaaatggttaaccacagagttaacttcagaaatggctggcaggtatgaaggttagaagattcatgcacttttgctagactgaattggaagttaaagagtaagtagttactgactgcagaggcctggaaaaccatggaaaaaatcctattcctcaaagtcgagccctacctcctacgcctcttaaatcaattgccacagtgaccaatttgtcagtcacctaaaggcagctatcctgaccacttaagggagaatacttataatctttatacctaagtaaagattgtgagaggaaagaaatggtttaaagaatatgaatgtgtcacacttctgaggttaatgataaatgaattggtcctgcttacctcaggaaaaactttcaagtctttctgaaaaactaatttaattcagtagtattttctaagatttaggttatgttwttaatcaatttggaaaccaagatttacttatagaaaaaaaggaaaaggacctagataggtttattcacatagaatcccaatttcacttctctggatgataccattttctacaaaagcaattatgttctaaaatttaagtgtgctttcttaggctttatcagttcacagtgtttccttaagaaatatgatccagtattttttcctaagactaaagttgagttactacgtttatgactgagaaatgaatgtttgttagtttgtttgtttacaataagaattttttctttaccattttatttttattttccccaggtgtatttgatatagtgtttgcaacaaattcgacccaggtgatcaaaatgattctcaactcttctactgaagatggtattaaaagaatccaagatgattgtcccaaagctggaaggcataattacatatttgtcatgattcctactttatacagtatcatctttgtggtgggaatatttggaaacagcttggtggtgatagtcatttacttttatatgaagctgaagactgtggccagtgtttttcttttgaatttagcactggctgacttatgctttttactgactttgccactatgggctgtctacacagctatggaataccgctggccctttggcaattacctatgtaagattgcttcagccagcgtcagtttcaacctgtacgctagtgtgtttctactcacgtgtctcagcattgatcgatacctggctattgttcacccaatgaagtcccgccttcgacgcacaatgcttgtagccaaagtcacctgcatcatcatttggctgctggcaggcttggccagtttgccagctataatccatcgaaatgtatttttcattgagaacaccaatattacagtttgtgctttccattatgagtcccaaaattcaaccctyccgatagggctgggcctgaccaaaaatatactgggtttcctgtttccttttctgatcattcttacaagttatactcttatttggaaggccctaaagaaggcttatgaaattcagaagaacaaaccaagaaatgatgatatttttaagataattatggcaattgtgcttttctttttcttttcctggattccccaccaaatattcacttttctggatgtattgattcaactaggcatcatacgtgactgtagaattgcagatattgtggacacggccatgccyatcaccatttgkatagcttattttaacaattgcctgaatcctctkttttatggctttctgggraaaaaatttaaaagatattttctccagcttctraaatatattcccccaaargccaaatcccactcaaacctttcaacaaaaatgagcmcgctttcctaccgcccctcagataatgtaagctcatccaccaagaagcctgcaccrtgttttgaggttgagtgacrtgttcgaaacctgtccataaagtaattttgtgaaagaaggagcaagagaacattcctctgcagcactkcactaccaaatgagcmttagctrcttttcagaattgaaggagaaaatgcattatgtggactgaaycgacttttctaaagctctgaacaaaagcttttctttccttttgcaacaagacaaagcaaagccacattttgcattagacagatgacggctgctcgaagaacaatgtcagaaactcgatgaatgtgttgatttgagaaattttactgacagaaatgcaatctccctagcctgcttttgtcctrttattttttatttccacataaaggtatttagaatatattaaatcgttagaggagcaacaggagatgagagttccagattgttctgtccagtttccaaagggcagtaaagttttcgtgcckgttttcagctattagcaactgtgctacacttgcacctggtactgcacattttgtacaaagatatgctaagcagtagtcgtcaagttgcagatctttttgtgaaattcaacctgtgtcttataggtttmcactgccaaaacaatgcccgtaagatggcttatttgtataatggtgttactaaagtcacatataaaagttaaactacttgtaaaggtgctgcactggtcccaagtagtagtgtcytcctagtatattagtttgatttaatatctgagaagtgtatatagtttgtggtaaaaagattatatatcataaagtatgccttcctgtttaaaaaaagtatatattctacacatatatrtatatgtatatctatatctctaaactgctgttaattgattaaaatctggcaaagttatatttactttaaaataaaataattttattgcaatgtatttatcttcattacttaaaatagatgctaatttattttaaaataagactaccttgaatgagtatgaatatatttttatttaaattttgatacaactgatagtttaatactattggttatagattttttatcctgacattgaaaagttaaagaaaaaacattttgttctactgcatgtcatggaataaacacatcgttttgaatttttcagtttttcacataacaaagaaaaaaattaactcttgctataatgctagaataatacattattttacaagtaatttaataacagaatttttctaattgtatacattatcattgtaggaaagttagaagatatagaataacataaaaataaaagtcatgtttagcttccccggtcaaaaatcattattttaacatttgggaactttattttctacttttttcattcattatacacacatatatgtgtcaatcctgatactgaagtcatgatgtgtatagtactttgtatacagatctttcacttaatgtcatagcatagtagtttcctacccaattaaatatttttctaaaacattttaatatttgtataatactacaaaatatggacatacgctgatatagttaactagtcaccaaattggaaaattgagctttttctgatttttttagtatcataaattacactgagatgagcattcaagtatgtgaatctgagaaatttcccatactcctagaagtggtgcaactgaaatacacgtatgaacattttttaatagtctaactacctgttatcaaatatttcccagaaaacataacaatttacaataccaccaactaggtatgaatatatatcaccataacctcagaatggggtatttactaaattttttttttttcagacagggtctcactctgtcccccaggctggagtgcagtggtgtgatctyggctcactgcaacctcccactgctagattcaggcaatcctcccacctcagcctcctgaatagctgggactacaggcctgctccaccactcttggctaatattttttacttttttacagagatggaggtctcactatactccctaagctggtctcaaaactcctggcctcaagtgttcttcccaccttggcctcctaaaatgctggaattacaggcatgagccaccacacccagcctaaatttaagcagaaaagaaagatttaccgtaaggatccagctgccacatgcaagggccaggatgcaactgtgcctgaaaattgtacttttaacatttctgctcccatcggacagttgcttcattcttctatttaaaggatttcagtgcttctgaagttcatacagggcagaccgaagtgctcattctggtcaaataaactgtggccaaagggttggagttatgcgtaaaataattgatggttgctgtgggcaagggggtgtcatctcagagagaggccttggccactgggcagaatttccacaaagcagactatattaccttcacattcccaaatataaagtttttgtgaacaaatatggttccatatgccttatawtatttatattatttttatattatttttaatttcattaatgtaatgccagccactcaccccaaaggtcttctactattttcacaaaggatcacctcaaaaaaataaattttaccttatcccaagtgatagcataaatatcctatataaaatccctccaggcctccaggtcagctttataactgttttttttttttttcagtagttgaggattttttgtgtgtgtttgtttttgttgttgttttgttctgttctgttctgttctgttttgttttgttttgttttttgagacagagtctcgttctgttgcccagtctggagtgcagtagtgtgatctcagtccactgcaacctccgcctcccaggttcaagcgattttcctgcctcagcctcccaagtaactgggattacaggcacgcatcaccacacctggctaatttttgtatttttagtagagaygggttttcactaggttggccaggctggtcttaaactcctgacttcaggtgatctgcccgcctcagcctcccaaaatgctgggattacaggtgtgagccaccatgccctactcaatagtcattttaatccaagtgattgtaagcattttaaacttgctgaactatttcataggttatagttggcaagatttctgatagataattgtatttagatatcccctatatcatgtatttattaatggtgttaataacatgttccattcatcaaattatattgggattttaccccatctcacttgtgaaatagatgttactaaccttgatgattattctttctttttcagtgagatcaacataatcttggagttgagaccctacttaccaaaatgttaggataggrtgccattatgtattcttcatgaaaatatttacaggttaggtagactccttatttttggtacatttaaaaaatacatacagaaaagaawatttaccatagagatctaggtgcccaacagaatgcaaaagctacatttatattraaatatatatttcaatatacacccatttacacccatttctgaggtgtaaatttcaatatacacaatattaaaatttacctcattctaagcttttggggaaaaaaaggctagtcatttctaatgctggctctttctcattgtggaaattcatctttttggacatcagttacatcatttttcaagtayggtgagttggcttggtgaaagaaggcttttatattttatattttattttattttattttattttattttattttattttattttatttttgagatggagtttcactcttgttgcccaggctggagtgcaatggcatgatctaggctcactgcaacctccacctcctgggttcaagcaattctcctgcttcagcctcccatgtagctgggattacaggtgcctgccaccacacccagctaactttttgtatttttagtagagagggtttcatcatattggccaggctggtctcgaactcctgacctcaggtgatccatctgcctcggcctcccaaagtgccgggattataggcgtgagccaccgcgcccagcgtgaaggcttctatttagttaataattcactcattcatggatttaataagtgttgtattgtttccctactctgtgctgggtaacaagtgctgtgtaacatatagcagcttagcatgtaggataaacttgttgctcagctgctgtgagcagtgtgaaggagagccaagtgagaagcagcttgattgcaaatcacagaaaggctctcagagttttgataccacaggtttttcagtttcataactctgtatactggtgcatttttttccaacaatatgtgccaatctaggaagcccaagaagagaaaatagattgaagcaggtcacaaaagtgtgaatgaagaaaacaagtttcaaggaatttcggatacttggtatgaagagtgagatatctgagggtaaagaaagtaaatcaagagtaagagagatacagagagactgagtggacaggaggctggaagcagtcacacactgcccccaaggccagggttcagacctcacaggagagatacatacagtcagggccccaggaccatgttggatccactggacccagaccaaccagaggaagagggaacccaaatattagrgtgggaagcaagtcataaacagtagacagaatggtatggggcaagcccttaaccatatggattttatatagttcaggctgtatgactgtatattggagctaatcagagagtcaaattttccaaattcaaaatcttgactgagtcagttaacatatgacatctgtaactatatccagtcttgtctacttgtgtagtgaacactcatggaaccatctgaacagtgtccattctcccctcatcgcaggaatagttctgccccactcagggacagcaccacctcagaatgaaccattttcctacctaactccatccccaggccacagttaattggtccaggcttgaagtggaccaatcacagtttttcatgaggatttttcaaacaggcgctgatgaagagctggccccagwgttggcatttctgagacgtaagctcaacaccagccacatctctcaccacgtggaagaagctagtctgcaacagagtgaagtaaacagaaaaggcaagagagccctgaaggtgcttgagtccttgattctacctgcgtcttatgtccagctaaatccctgcccactcctctctaatcaagggaccagaatacagtgatctatagctaagatctgcaagtgtttcttcccgcttatgatcaataagaatttcccttttgtagtgtccagcacatcatccattggccacccagcagaagtgataccgtctacatcccaaaacttattggtccctatcttaataaggggtcacaagtgctaccccacttccatatgtctccttgtgagatggtaacagccaggacattcaatagtgtgtgttaagggggaagaggtgtggagatatagacgtaccaatagtgagagggggctgaggctactacactatctacwattgcaaattattgtaaactgaagtctctccctgagatggcacaggggtaaaatacacttctgttgcatgagcaattataaaaaatatgatttagaccatgaaatcataagcagagagaggaaattagtgctcctcaccacttgagggcccaaatgcatggcttgcatgttgcctgggctctctttacytgacagtgacctgggagttctctgggtatcatagagccagtgagcacagcatccaaacctgccraaatccaatggaaaaggccttcatttaccaagctaacacaacttacatgagaaattatataactgaagttgaaaagatgcatttcarcaatcaggaagagccagaattagaaatcagactgttttttttttccagaagctgagaataagagaagttagctttagtaatatttaattctaaatcattcctatactaggaagctttgtataataatcctttaagagtttaaagaccatgagatttacccttcaagcagtgtaataggaaaatatttatctatatgcacaagagaygtaaatttgatgaaaaaatgatgttaattttaaaactattaaaagccagtttgctattatgattattttgcttcaagtatccaaatgatgatgagccaaatatgcccctgagcccagttcttgattcattccacgtcctataaagattctttagaaaaattgaacaagatgagaaatagggatcctggctcaacctcccagtgagttgggatttatctcatggaactttttcccaagcttgatgaagttctgctgtgccatatggacatgtacagttgctaaatgataattttccaaaaataagcttcaattctscaaaatggcagatagaaagcagctggtgttactcaacagagataagccctcctagagctcaccacagagaggagagcatcatgtctgcagatgccacagcagatctgctgagaatcagccagcrccatgtgacacaagaacccacagatgcrgattcgtcctgactggtggctttcttctggccattgctgttacagagaagtttctaagcagtactcaatgcacacaaaactaagtagaggctatataggcaattcttcaaataagcaatcattattctcagtaattcttgtagtaagtggatggtaggaggaaaaaaaaaatacctttccactgatgatatcacctttatagctatttcttgagtctccctatcttttccaccttcttcaagaaatagtcccctattacaatttgcatgcccactcttgctgcagaatttgtataggggctcaactctcattattgccaactatatgatttggaccatggatgtgagaagacttcagcaaatcaatccatcacattcctctggctgcaatgagttgggcacataacctaaatgaacacaattatggtgaatttcctggttttgccaggagctatcagacaaaaagcttgttctttcccactctatagtggatgtgaggagttgttgtagccatttgtcactccaaaggagaggtggtgtttccagaagttgtcacagtgtgtacttataccataagtatggagccaacatagtgaaagacyggacaaagaatggaaatgaatcaagtccttatgacatcattggagagttgactttttgtgctagaaatttgcactgtcctccagatctccctatcttaagcagttggggatgggttttctgtcaaaattatccacgagaatttaatcttctgcaaaattattatagttatcatttattgagttctgattataggacaggcatagaattctctgcttatatgcattatattatttaatcctcacaacacccagtcatgctatttctgttattatcctatgagacaaaaaaaaaaacacagattttacataatcagtccaatgtaacatgactggtaaatgttggtgttgacatttgaaatcaggcattctgactccagaatctgtgctcttatttgctaagctatgttgctttcctctgctcctcacctctcccctgaccccccaaaaatggcattacaaaatatgagtcatgtaggtactttccaatatattatccaagcctatttatycaaaatcaatacagtaatattttactttgtctgaaaccgatctcactggatttcaagatagaattttaatagtctttgtccttgaaaattgggctcactaatggaaagcactaattgaccttaaaaagcataacactggattttacatttattgtaatgtgattttggatgagcttatattgggtctagcaaataaacaggctacaactgttaactgtcatagtaattagttaaatgctctggtcctttctgcagccrggaatttagatagcacttactaaatgggaggggaaaggaaattcctaaatttattttcatatcaaagttttaacttcttacagcctaacagaatgatgttctttaaaatatatatgttttaaagaaactacattatattctgagaaaaatttccttttaaggtgtgcagtacaggtttggcaacagattttggtgaagaatagaactggaataattaaaagtatgacttatttcaactgtgcacagagacccagaggataaagatgttatgatcataccatgagtcctaaggacagttgtagcagcatcattgaamactacctcaacatggatgctatttaagaccttgagaggtaaggagagagttgcaacagaaaagataaaawatgcttactgcttcaccttttgcttctggctgcagaacaagtagaaaggagcaattacacccaaaacgttaaaaaaaaaaaaaaagcaattaggctaaaggctgaggaaatgatcataacatgatggaagttccagcagccaagatsaatcagaaagtagctatgtagcctatcatgataggaaagctgggcatagacatagatcagtgttttccaaccaagtgtgggccaggagtggtggctcacgcctgtaatcccagctactcatgaggctgaggcaggagaatcacttgaacctgttagatggaggttgcagttagccaagactgtgccactgcactccagcctgggcgacagaccaagactcagtctcaaaaaaaaaaaaaaaaaaaaaaaaaccccaaaaatggaaaaccaaccaagtgtgattggccaaatccccaggggacatttggccatgtctggaatcacttttggttgtcgcaacttgaaagaggagagtgccactggcacttagtaggkagaggccagggatgctgccaaacatcctgcaatgcacagaacagtcccacacaacaaagaactatctggtacaaaatatcaattgtgccaaggctgaggtccctgrggtagatgaggaagggaagagcaccatgtgaatgctgcagtaaattgtgctaaataatgaagtgccagtctcccagttcttataacctctaaagtgtctctccctctctctttttcctgtgctcacactcactttctcagattgcattacatgtgaacttcatccaaatgacctaattcatggggaaattgtgttaaaaaaaattgggggggcaggcagtgtcatttctggggctaagtagacaagtctattaagcttctgcaaaaaaaaaaaaaaaaagtttattcactcattaacgttaggaacaaaggcagctggtagcatgggataaacctaaagggttataacccacttccatgggagacaaaatgaaggtgtgggttccagtgggaaactaatcctcagagaagacactaagtgcagaaataaaacatgtaagcatgtggtgctgctggctgctccaccaggacactctacagtatcttagcatttgctatgagtctgatgaaaatttttattgaacaaaatcaaaggtgtattttatttttactctaaatatttccataggggatttgagtggctttcaatgaaaagcacattaaaacagggtaatataaaagaaaccagacagatgaatcacaaaaaggaagaagcaaaaccattgactgtacagacaaaaaggtgttgtgacagataagaatattgggttcacaacttcttgcagccaggttgaaaaggcatcactaaaactccagttctttttatcaaaacaagtgcagaacaggtccccatatggagcagtcttttcgacattgaattcctaaggaaatttctcacgttggactgtggatagagacatagagtcacagagggatcgtttktaagcatcattttttatttcagcctgattcttagttggttgttctcggaatgttcttcttaaaacccaagagcatgacaccaattcaatgaagcttggtgatgtaagggtatccagcactgtgagataagagtcacccaatggtgtacttgacaggcacagcaatgtccttatgatgtcaatggggacctctgggtccactgaaaccttagataagataggcttagactccctgaaacagtgcaagatctccagaaatttccacagaagcctgaggagcttatgtgttcgtggtctcctttagtttttgccatctgcytttccagttcagtttagagattatgatctcactactccacactgtaagatgccatattattccatggctgtaagatgccgtattccatgtgaaacagctccaattacacacacacacacacacacacacacacacactcaacagcacactaacatgctatgtcattagggattacctttgattcaaaaagtcctttgtcccttggaacatttctcctctggactccatgcagtcccagacttcactccatctcacagatcattcccttccttctctgcatcctttccttttttatcaccaactcccttgaagaagtaaatccactttgtatttcctcacccctagcaccctagccattcgtctcattaactactcccttctgaatgtcacacatcctttctttcctgcaaagtttcctcttctcccacaaacagactttcaggatattttcttagagaaattccaggccacactatgcagataatgaattcttcacctcgtcactatcaatccaatggttctcaaatagtagtacccagtgctaatggtgggaagcaaaaaattcctcaaggaatgaagtgtcttcatattttgatttattaagaatccttgctccatcaaaccccatgttttcctgcctatctgatgcatcacctcctgctgcttctatttgacagggacgacccaatggttcacgtgtggcagggcccctgtgccctgtgtgagcattcaccctgaaggcatgctcatggggctcatccaatggatgtttttaagtccaacaaccttctcaacttttttcttatcaaattcaattaacacatcactggacttagtttttatgttctcatatccacagattttgtaaaatttaaaacaatatcttcattgtaaaatgtaaatcattatgtgcttaatacatataattacacattctaaataaccactttctctatttacacatacaggcgtaaaaattgtcaatgttattcatataaccacgcattttttaaaactactgggggtaggtgactaattttacagatattaaaaattaacttttgttcctttgaactatatgttatgtataaaatttcggtgccaccaaagaaatagcacttgaatataaaattttctttttaattctcagcaaggcaagttacttctatagaagggtgagcccttacagatggagcaatggtgagcgcacatctggacaagggaggaaaagggattcttatccctgacgcacatggcccctgctgctgtgttgttcccctgttggctagggttagactgcacaggctaaactaattccgattagctaatttaaagagagtgatggggtgagtgctttggcaggaaaaaaatggttatgcagggtggagaataatgagtcagggtggagcaggtgattggaatgagtctgggtggagcaggtgattggaatgagtcagggtggagtaggtaatcggaatgaatcagggtggagtaggtaatagaaaaaggttactttacgaggaagttaagtttaaaagtagaaggcaaagaattgaacatactgacatattaattmtttgaagagaaattcagaattcatatttaacgtatatgttatttttataacttctaatagtaacagccatatccagatgttgttagaagcaataatgtaaaggatgcaatccacaccctgtgcttatctagatttttttttacttaagaatatcaaaaacttgcatcaaaaagtatatttttctgatgagagcccagaacccgctctttagatgagagaacccagtattgctcccccttattttccctctccgtattcaatgccttccagaaaagttatgactccaaattaaatttgaaattattctctgaatcctttttccaaaaagtccttgttattttcttattcaagatataaacccaaggtgttctacttcaagaaaagagatctgtaattttttttttttttttttacctgaacccagcaccatgatctggtgactatattgggaaggattctggaatattgctstaagcaaattcaggagtaagtataggatatactacctacacgcatttggggctcattccaaaggttgcctggagaaaaacaccaggttagaattatgtaaataactaacacctggagtcttctgccactctcattagatccaggtaaaactgctgtgactccacctcatcaaccctaaaatccataaaggtctggccgggcgcggtggctcacacctgtaattcccagcactttgggaggccgaggcgggtggatcatgaggtcaggagatcgagaccatcctggctaacacggtgaaaccccgtatctactaaagaaatacaaaaaaattagccgggcgtggtagcaggcgcctgtagtcccagctactcgggaggctgaggcaggagaatggcgtgaacccaggaggcggagcttgcagtaagccgagatcgcaccactgcactccagcctgggcgacagagtgagactccgtctcaaaaaaaaaaaaaagtctgggtcttttcccctagatctctgcaaatcctgaggggacctccaggtttcacagatggagttccccttgatgctcccaggatcaacatctgggggagaataaaggaaacgggactgggaagaggatgactttggcctgcgaggagatgatctcaacgcaggtctgagacaatcccacagggagttctggggcggaatggccgtgcacagttacaccaggttggggtgtaaccactatacctttataatagagctgatctttctacccccacattgaccagtctgtggatgtggtctgccctcaggaacgcattccaccaagatagctctctccagcagaggacaactgtcctgataaggaaactgggctctcagctgtgggccacaaatcctcccagcccctgagggatgagtgtctcagcactgaaaaaaggatctgggcagagccctgtggtgtccaccccacagcctggaggagcgcttagctcctccrccacctcctctttttccccttctcctttcttctcctgctcccccatgggctcctcctttagcacaaactgcttccattctacaccacatcgccctggggcaaaacacagctctttcttcactgtgcctaagaaacccactcacatcaagtgcttttgtgtttcattcaatctcctcaaaaggggaggaaggtgtgccgcatcctggagtgtggagccctctctcgtttccctagcatcatactcttcccctcctcctttctattcctcctctccattctggatgctggaagaatctccaaatttcttcttaagcaaggtgaaaaaatgagttggctttccccagattttttttccaaatcctgaaaacctacatagcccacaagaaaaagaacacaagactttcctataaaagaattcacctttcatagaaaacacttgaaatttaaagtgctggagtgatattcctgtttcctatagattgaaaaaagagacagggggcttcaaataatcataatccaaatattttttgaggccccaagcaattcttttttcctattgtgaaaaattgtcaagtcatgaaaacataagcacacaatcagtattgtttcatgaccaaacttgtcatgaagttatcctgacctaaatacatactcagatcattcattttaactttctatgtacaaayctgaacaaaaggaagatccatctatctgtcttctgtattgacacaactggctctcttaaaactctctcctccctagccttcatggatactacactattccggatttctgccaacattcagcccactcacatctccccttgttttgtacctcttctgtctcctgtttacctgatgtaggtgagtaccaacactaaggaaggaagaaaaggtatgtagcttaaaccctccctgactaaacagcctggtgaagacactcctgccatcaatggttgactcaagtgccacccagactgttggcactcracactgagttcttccctcatcccctgccctcactgacactgctggaccragagacctgagggtaggtttatggtgacagccccagaattttccccaaaacctgctggcttttttgcagcaccaattccatgttcagctgctgggcaaccaaaaaataacaaacgagctctccaaaacacatttgttaccaagaaggaaaggacaagttaaaaaatgataatgatgagagtgcattctggacacaatgggaaagtcatgacagttgctgttggtgtcagcctactgcctgcctctgcattgggctcctggccttccttcctgtggcctctttccccacatctcttcactaaccaaagaggtaactcttggctaatctcttacttaccacaaaacttaatttcataaatcytcccccccgtctcttacttaccataaaacttaatttcataaatcttccccccgtctcttatcaagtcagatttcagttacgtcaaaaggctcaaataaaccttcatatgttataaattttaggaaaagaaaagtcctgggtaaggtcttctccaacccccttattttacagatgaagtaaaataagtccaataagacaccaagtccccagtaggtgagcccaggcatagaggaaggttttctgctttaacacaggacaacgctttaagagcaacagacctttagaaatagaatcccaactcttaaatatcagacagagaggagagaactttggagcagaagatatttctagggctcttaaaatcacaccttaggccagccctgagaatagaaaaaggcaattaaaaaaaatgacaaatcacccccacccaggggatctgaaaaaggggaaaaggggaaggtagatttgcaagtaattaggaaggagaggcttaaaggttcatgcagaagccgctgtaataagccatcccagctcaatagcagcttgtcctatttaattcttcacagtgacaatgcctacttgcccccaggggttacaccttccagctagagagacactgagcaaagcaaagggcctgtggcagcgaggaatccagtctgcttctaccgcagtgcttcccaaactctaaaagcattcaatacacttcacctgggaatcttgtgaggctgctgattccgctagtaggtctaggacagagcctaagagtgtgtatttcttacaagctgccaggagattctcttgttgctgattcgtgggccacacttaaagtagtgaggatccagtacatgaggtcagagttcagccagagtttaaactcaaatctcccactcctaggcatgtaaaccacgtgctctcacctcagaagtatttcctatatgtgagagttataccagaataaaacttggggagattttgctcaaaacatgacttttattattttggtatggtgattatttttgaaatatcatttagactgcttgagaaaaataacagaaattcaaaacactaaaagtgttcaagcaagaaagcacttccaaaccacaaaccaagctactatgcctatttcaacactggtgctagggtttctgtaagatcrctctgagtcatcaaacatctccaaagcatctttagctctgtccttgccatttaacttgatattgctttgaggaacaaggtgcaatttcttgtctgtaaatgagaatgctcggacttttgtgcagattcaaagactcagtccgcgcagcaacccacaatctcaggcagactgtcaatttaaagatggagggacagagccattatatctctttcagacttttatcttctctcaaatgcatatggatgcacagcaagcaaaccgcaatgccacacttgcctggtcattgaatatcctgcagtgtacttcttaattaaaaccagcatcacaaatacgactgcttaagtgccaaaaacctggcccgcttaatgaccaatcagagaactacatgatcgttcaatctattcagaacctttttttttyccctgaggtaaatatagttaagctgtaaatattcttactgttttccatcaagtgtgctttttcttaaaatactgcttccttttcagcatcaaaaattcaatttcacttttgtcatcagaaatcaacgtatgttataataatttattacattttaaaatctggaatttgtagcaatgctggggattaaggaataatttgagtgaacgacacatacagtgttgcctagtaacacaggctgatctgtacaaagccataaattgcaaaatttcatagcagcataaaaacttttgctggcacttaagcgtatttttccctgattgaagcagaattcatgcaacaattacaaccacatgacaaaagctggtaatgattagccttcaagagccgctgttgtttctgacagttccaaagctgtttttgtttgtttcaggaaagaaagtatcaaatccttcacttactagtctcactgaaaagacagggttgagcctgttaattagccagtgccagcattgtaactgcagctcccagtgaagaatggaagagttatgtaataatttccaattcctattaatttgtgtcaaccaaaaccagctccatatgtacctatacacactttacagggaagctctcttattatgtaaaataaaggtagaaacacataagaaatacaaatgtgtctgcaactatcattgagaaaagaacttcatgaagaygaaagctgagagccaggaaggttgttttcatttgttataayaaatatcttaaggagctgtcttaagatatcttcaatagttacagttcttgaagtaaaattacaaaatatagttgctaaagagcccaaaggaaaattatatccacattgaattcaaaatagcttgctgaataatatcctatagccagcccaaagaaaatatgagtttgtggaaataatactttatcacactctgatatacactacacacagagagagataaaataaatgagtgtttcactgatgggatactgggygattttctctgacaaacacrtaagtttctatgaatagattcaccaatgtgaagggattcacactatagctcaagaaaattgagaaataaatgctttgatcctttcataaacttttcattcttctagctatagcgtgaataaaaaacacataaaaatttaataggtaatgtgggcacaaaagaatatattgtgaaacacaaaggaagacttctatattcaggtttagtctttcaatcaattttgtggctgagcttcctggtgtacatttcgataaatcctaatttactttcggtcaagcctcataatgtcaaacttctggtttgatttctcagaatccctcacccctaacacagctacagcaagatacttggaaagatccagatgycaccagaggaaatggaacaagattacacagaaagcagaagtggatgtctaaaaatagaataaaaacggataagggaatccacctaatccccaaatcccacgtccaagaagcaccatctgcacatcacacaacacttagaatgcctggaaatggtcccaaaatatcatgagcccacaatttagtgatggtcaggccatgaaaaagttgattagcctccctgagtctsagtttcytcctccatacaattgggagattggatttgatgagttctaaaatttctaacagctccaaggtgttataactaaatccttccactgctctataagaaagtcttcatggctttccactctgtcattttacttataagcaacggaaaggaaaccagcagtcaggctgagaaattaaaattggttgaggtatgacacgctttaccgatattgaatgtcacatcacaaaatgagtcctacataattacttagcacagtgcttgacatatagtggacactcaccaaaaaccacctcccactgctgcccctcctccacacacacataacctccatacatgtttcactgtttgccctcccttgtggagtacgcttctatgattatgagtgccaattatgaacgctgaaagtaacaagtctgaaaaacctgttcggaatatggcagtacattgcctggattatgtgcacacttagagtgacaatttacccactaatttctgattacattttaaggctgatcaacttagatattttgaaaagaagttgacatttgtcaaataagtcctaatgagaagtgaagcatgtttttgtatactgtgttagaaagcaatagaaacactaaattcttgaatgatcattaaattaattagatggatkatgagtactttatgttttgttcaaactaattcattctataaaaaggctacaaaacatggattcaataccctactgaaaagaagagaagcttgagagtaatggaagctctgagcacctttctacaaatagcccaagaaaaaaataaatagatttatcaaattgctgcttatttgtggataatgagaattttttaaaaatacagattctaaaataccttggaatccaacttacaagggatgtgaaggacctcttcaaagagaactacaaaccactactcaaggaaataagagaggacactaacaaagggaaaaacatgtgatcctcatggataggaagaatcaatattgtgaaaatggccatactgcccaaagtaatttatggattcaatgctattcacatcaagctatcattgacttgtcttcacagaattggaaaaaaaactactttaaatttcatatggaaccaaaaaagagcccacatagacaagacaatcctaagcaaaaagaacaaagctggaggcatcatattacctgacttcaaactacactacaaggctacagtaacaaaaacagcatggtactggtaccaaaacagatatatagaccaatggaacagaacaggggcctcagaaataacaccacacatctacaaccatctgatctttgacaaacctgacaaaaacaagaaatggggaaaggaktccctatttaataaatggtgttgggaaaactgtctagccataggcagaaagctgaaactggatcccttccttacaccttatataaaagttaactcaagatggattaaagacttaaatgtaaaacctaaaaccataaaaaccctagaagaaaacctacacaataccattcaggacataggcatgggcaaggacttcatgactaaaacaccaaaagcaatggcaacaaaagccaaaatagataagtgggatctaattaaactacagagcttctgcacagctaaagaaactgtcatcagagtgaacaggcaacctacagaatgggagaaaattttgcaatctatccatctgaaaaagggctaatatccagaatctacaaagaacttaaacaaatttacaagaaaaaacagacaaccccatcaaaaagtaggtgaaggatatgaacagacacttctcaaaagaagacatctatgcagccaacaaacacatgaaaaaatgctcatcatcactggtcattagagaaatgcaaatcaaaaccacaatgagataccatctcacaccagttagaatggygatcattaaaaagtcaggaaacaacagatgctgggaaggatgtggagaaataggaatgtttttacactgttggtgggagtgtaaattagttcaaccattgtggaagacagtgtggttatttttcaaggatctagaactagaaataccatttgacccagcaatcccattaccaggtatatacccaaaggattataaatcattctactgtaaagatacatgcacacatatgtttattgcagcactattcacaatagcaaagagttggaaccaacccaaatgcccatcaataatagactggataaaaaaatgtgacatatatatgccatggaatactatgcagttataaaaaaagatgagttcatgtcctttgcagggacatggatgaagctggaaaccatcattctcagcaaactaacaaaagaacagaaaatcaagcaccacaagttctcactcataagtgggagstgaacaatgagaacacatgaacacagggaggagaacatcccacactggggcctgtcagagggtagggggagggatagcattaggagaaatacctaatgtagatgatgggttgatgggtgcagcaaaccaccatggcatgtgtatacctatgtaacaaacctgcactttctgtacatgtaccccagaacttaaagtataattaaaaaatatagattctctgaagtaattttctaaaatgtattacttgaaatttccaaaaacttcttaaagatgaatattgtataaccatcaataacaaaactaggaattctaaactatatggttatcagacttatatgtaaattatgttatctcctaaacaaaccaacattactgaagtgctttaggcatgtcattacaaaatgtaatgcacttttattaaaagtccctggacttaattgaaaggtgaaaaatgtggtaaatctgtctttaaaaaaaaaaagtattcgattcttcaacctcataacttaggagtaagttctgggtatccaaaattgggggagtttggtttcttaatcaaaaaagggtaagttctgaattaatttttgtcttatctacaatgttatttcatttccaaaggaataaataatatttttattatacttaaaacagctttattttaactatctttagcatttcggagggggcgaggctctccccatttatatgaataatgttagatatataaattgcctgatgtaaaagtttgaagaggaccagctttctaaaatgtacttgaaagcagcaaatgttcaaataatgtacttttctaagaggaatgcattagaagtgctctaccttttaaacaagatgcaacagacagtatcattatcacctgttagtctagattttgtaatggaagaactaataaaaggtaacttagtgaagagggaggaaaaatcaagcatgagtttgtttttttcttctactagaaataatgactttctacaatctcatggaacactggaaagtggttttcaacttggagacatagaaagtaaaataggtcaacatccactgcatctattttcaattactgagacatatagtccttaagcagccagagtcagccagaattgtctaagatctgggctccataatgaaaatatcttatagtaaaatgtattccccataggttaaaatgcaaaatgagaacccaactttttattactcgttaaatgaaatgtgcagtctttttccccttttaaggtcaagtatacagtattttggaaaacaaaccataaaaacatrattagagagaacagaggaagtcattattttctccagtcataaagaatgtagcatcattctatcaatctaatgtatctttgtaacggcagtggcagcatgtggcagtgcttaaattgcaaatacagtatttaagaaaaagaacggattaaaagagcactcacatgagctggaaaatagccacatggattataatatttttataaattccatttcyttttcaaagcaccacttaacattatatattgctatattatctacctacacagaaataatatactcatcaggccaaaattcataaagtaaatccaagtgtacataattaatggccaatgcagatagaccccatattgtgatatatggtgaatgtaaaatcagtgcagaaatattgaacctgaatctatacatgtatataaataacatccctagatttggtttgcctttttggaaacatttataacacaaaatttgaagatagtaagatgcatcttctcaatgttaacatcaggacagaattcacgcaaaagcttatcacaaaggcaaatatttcagagcatgtggcttttacaaagcacaactttattgctgagacaattccaacccagtgtcagtttttcagcaacagttgctatctatctgtcatatttagggcagttatactttcaatatgctccactagaggcagctggataaacttgaaagcatttttaaaaacatgtttaggaaagtaaaggaaatgacctgtaacatggtaaacacaccatattgtacatgagattctcactactctagctttatcaagtcaggatatctaggatggaatgcatgtttaagccaacactcatgctcaggatttcatgtttcaggacttagtgatggcttccatttccagtcggtcttcttttaaatgctgtttggcattttatgtgggctttggttgtcaataaaataaaataaataagaaggtaaattctactaacagcttaattgtctgcaaggtaagatgagcaaaatctaagcagacattctgactgagagagggcataagacaacttggagattctgccaaatccataggagaggacyttttgtttggttagttggtgggctgattttcagctttttaatttttttcatagagtggagatgttgtaaccctgtcttataarctaatagaattaggaaagctgcctccatccacagcagtttgtttttcatcccaatggtttgtcaacataatgaactagataaacaatctgcacaagaaataaaactgtccttatagataggctagggaaatgtcaggcctcacttgttactgaaaactcagcagaaacttacaaagacacaagaacaattgggaggatgccaaacacacaagccaaataaactgaagattctycttcaggcttcagtttctttgcttttcctacatacatctcacccagcatttggctaggcactcctaactaagaatgttgaggttatcagaaaaattggcctaaaagaaatcaagatttatgatttttaaaagcagtcctttttttaacacctttaaagtgatgttcaccacactcaaagctggttgtcagactgaaaaccagaatattttacgtcttcagcttttttaaaaaaaacaaaatgctccatttcatttggcattttagaattatttttaaaaagaataaatcctacctcaaagcaaattgggaagatgatagtgccaactcttcctttgagcccttcttggttcatgcatgagccattcattttcaaagggagatgctaatgagcagacagacaccaactaaggtgtcctggtccatacaaatgcatgtgtgcaaatgctaagaaggactctacactgcccaccccacatctcccgcaccagcttgaagtgaagtagtcaagggggtaaaatattcacataaatgagccagtcttggtaataacattacgtactaagtgaatcagtgctttcattttgcatgagatcgtattccaacatacaaaatcttgataggttcagtacacagttattatgttagacattttgttgacctaaatgataataataattattattctcatgtgttctctgcactgctggattctgatttttcatgttaatttgatatcgcagttaaatgaaatgtaccttcaagaggtcagatgtgctggttgaatgtgctgggtgaccgatgtacacaaggctaaaagctgatgaaaagaagagtccaacagacatgcacttaatcattcattcaacaaatatttttgagcacttggcactgttaaaattgttacgtatatacagcacttaggaaatattaaaaaacaaaaaacaaaaaactttgccatcgtggaaattacattctagaaggaagaaaaagaaaatgaacaggatggataagtaaaataagtagaatataagtaaacatataaaatacatagaataaaatctctcagcatttgcttgtctataaaggattttatttctccttcacttatgaagcttagtttggctggatatgaaattctgggttgaaaattcttgtctttaagaatgttgaatattggcccccactctcttctggcttgtagagtttctgctgagagatccactgttagtctgaygggcgtccctttgtgggtaacccaacctttctctctggctgcccttaacattttttccttcatttcaactttggtgaatctgacaattatgtgtcttgtggttgcccttctcgaggagtatctttgtggcattctctgtatttcttgaatttgaatgttggcctgtcttcctagattggggaagttctcctagataatatcctgcagagtgttttccaacttggttccattctccccatcactttcaggtacaccaatcagacgtagatttggtcttttcacatagctccatatttcttggaggctttgtttgtttctttttactcttttttctctaaacttctcttctcgcttcatttcattcatttgatcttcaatcactgataccctttcttccagttgatcaaattggctcctgaagcttatgcatgtgtcaggtagttctcgtgccatggttttcagctccwtcaggtcatttaaggacttctctacactggttattctaatataagtgataagtgctagggaaaaaataaaacagaaaaaatagatagtaattgccatgtttaggggaggggacaaatgaggtggtatcaggaaagacctctttgagatagtgaccttgagaaaaggtttgaagacaatgagagagtgagccatgcagtgtctgggagaagagcattccaggcagggaaaatggcaaacacaaagagggaaaggtgtatgaattgtacaggcatttgggggtattccaaaacttttattctaagtaatatcattgtagataactttatggattcattcagagaagagatttactctactacacaaatatttaaaattctaagtatagcacataagttttcatgtctgttatctttgtaaaatgttagggatagtgagaagtttgggatagctcaccaaagtctctgatttcggcagcccaagaaagagaggccaagaagggttagatggtttcacaargccacacccttatctggtggcagatcctgagctagaattcagagctctagagtcttattcccatgctcttcctgtgccttacaggaagatttttctttttgcttgaattattcatggcaaacactctggattcattctaaattatgatgggaaatcattggagcattttagggagaaggggtttctgatttttttaacctgtataaaggctctcttggctatcgtaagaagaacagaccttagggaaggcacaggtggacacagacagatgaattaggaagccattatgatgtcctctatacctagaaaaatgtctattgaagggatgagggaatgaatgaatgaaggaatgaatgaatacagatacaagcctcacaagagatcatatattttcttgcaaaacttatatgcttggcaccttgcataagaacttggcacagtaggagataccaaaaataccaaaggagataccaaaaagtccctaaaaggattgaatagagatactttttcctattcctctcactaagtacaactaaaatcctgaacattatatatcaaataaagacaagaaaactgaaagatgaagagaagaaggaaaactagctacagatctcaggacccttggaaacacatggtgatgagttcgtgagttttctttctgcctcrtatataccagacttggagtcaaataatatgaccacccagaaacaccaatggacacagacaaaaataagcccaatacaaacctcttctgtccagccaaaggaccaggaaaagaacagtctagaaaaacagaacactttggataataactgttctactctgaacaaataccacagaaaaccctgtggccttaccctcattcacaccaataaaggccaagtgcagaagcttctaccctcatgaagctgtaatgaagtacccaaacacccttgccagtgtcaagttagagccaagtatcaagctggaaccttcatctccactggctgggaataaggtcctatgactgtgtagtggggaccactggggagcctggaattcctctccctttcagaaataatgaggcacctcttctctgcactgggacagtatcagggaggccttgtagaaagtcaagaatttcactatagcccaatggagtatcaaggccaccctccactgtggtatcattggagactacatgacaagccagaactccaacccctgtctagaagcaaggaagagctttcccacccaggtgtcaaaagaagctgagtggaaaacatgggcttctaactccatctggcagcaatggggcggcactctctctttccctgacacagaaaaagtcagataaaacagaaggcttaaataagtgtcagagtctcataatatgagattcataatatgactttcaaagtgttcagtttgcaattaaaaagcactcatcataccaagragcaggaaatgtaaacttgaataaaaaaagaatcaatcatcaatagatgccaacactgagacaacaaagatgttagaattatctgataatgattttaaagcaaccttaatagaaatgttttactgagcaattatgaacacacttgaaataaactgaatgtttatctctccttaaaatacatacaatgaaatcctaatccccaaggtgatggaattaggaggtgggacctttgggaaatggttagctcataagcaaagagtcttcatgagtgggattagtgcccttatcaaagaggccccagagagacccctgcccctccaccatgtgaggatactactagaagccatcatctatgaactctaaagtaggctctcaccagataacaaatttgtctgtaccttgatcttcaatgtccatctccagaactgtgagaaataaatttctgttatttaaaagctacccagtgtaaagtattttgttatagcagcccaaatggactaagacaacacttaaaaacataaaaagcctcagcaaataaatagcatttcagcaaagaaacagaagatataaagaagaaccaaataaaaatattagaactaaaagatacaataaccaaataaaaatttcaatagatgtgttcaacagcagaatggaggcaacagggtaaagaaacagagaaatggaagatggaaaacagaacctacctaataataaaaacagtgataagataggctgaaaagaaaaaataaacagagtcttagttacctgtgggagtataataaaaaatctaacatttgtgttacccaatccttagaaagagaggaggatgatagagctgaaaaagtagtggaataaataatggcttcaaactttccatatttagcaagagatgtaaacctaaagattcaagatagttaacgaatcttaaattggataaaactaaagaaatctatatcaaaatatattattgatcttctggaaactaaagacaaaaaaagaaatcttgaaagtagtcagagaaaaactacaccttacctataggaaaaactatttgaatgacagatttctcatcagaaaccatggaagccaacatcctgcccatatatccttgaacttaaaataaaagtggaagaagaaaaaaaaaagagaaatcatagagggcagaggtaagtggcaaaatattttgaaattgctggaaaaaaaaaaaaaccatcaacccataatcttatgcccagtgaaaatatcctttagaaaggaaggggaaattaaggcattctttgatgaaggaaaagagaawtttttacctgcagacctactygaaaagaatggctacaggaagctctctaaaaaggaaggcaaaggcaaatagaatccttctcacatcacatcaccctggcctcctcctctgcccttgctttcccattttaaggacacttgtgattacactatgcctactgagataatctaggtatccccatctgatgattacctaattaacaacttcagttcyatatgctaccttaatttctgtttgctgtattaggtaacatattcataggttctggggattaggaggcagggatctttgaggggccattatactgtctaccacaaatgtaaacagtctaaatacaccaattaaaaaacagagaatggcaaggtgattttgagaaacatgatttaactatagctatttacaagaaactcacttcaagtataattatataggcatgttgaaagtaaaaggatacaaaaaagactatatcatgcaaacattaattttttaaagaaggaagagtggctaaattaatatcaaataatgtagattttgcagcataaaaaattgctagacacagtgagtgacattagatgatgagaaaagggtcaatccaccaagaagatatagtaattctgaatgtatatgcaccaaacaacagagctgcaaaatttatgaagcataaactgacagaactaaaagagaaaaataggcaaatctacagtaataatgacagactacaacacctctctctcaacaattgatagaacaaataggcagaaaagcakcaaggatatagaagaactcaatactcaagaatatatgtattctgtttttgttgggtgggtgatttgttgggttgggtgattctataaatatcaaactaaagtaatcaactgaaagaatttgatattcatagaatacccctcccaacaatgacrgaatatccatattcttttcagatgcctgtggaacatawagtaagatagagcatattcctgggccataaaataaatctcaacaattttaaaagaattgaaatcataaacattgtgtattatggacttaattatgtccccccycccccgtgccaaaattcatatgttgaagccctaaccccttagtgtgattttttgaagacggagcctataaaaaggtaattacggttaaatgargtgaatatggtgaggtgaataaggttacatgaggtgaatatggtggagccctaattcaaaatggcttatgtcttgatgagaagagtaagagacaccagggatatacactcacagagcaaaggccatgtgagggcatagtgagaagatctgccagcaccttgatcttggacgtgtggcctccaaaactgtgaaaaaaaaaataatttctgtggtttaagtcaactagcctatggtactttgttgcggccatgctagaaatcaataatagaaagaaacaggaaaatctccaaacacttgttaactaaacaacacagagttagctctctatatctatgggttctgcatccatggattcaaccaaccacagatagatcataaatcttcaaaaaaaaaaaaaaaggatggttgcatctgttctgaatatgtacagacttctttttcttattattccctaaacaatacagcataacagctatttacatagcatttgtaatgtattctatattattagtaatctagaaatgatgatttaaagcatccagraggatgtgcataagttatataaaaataactacagcattttataaagggagttaagcaccagtggattttggaatctgcaaggatccstagaacaaatcacccaccagatactgagggatgcctctacttctaaataatccatgagtcaaagaggaagkctcaaggaaaagcaaaaatatatattgaactgcatgataacagaaatacaatatatcaaaatctatgggactcaactagagcagtgttgagatgaaaatttatagcacattttagtgcctacattagtaaaaaggaaacagaaaaatatcatatcaataatctaagttaccacaatctaagaaactagaaaaagaaggatgcagcaaacccaaagaaggaaggaaataatgaagaaaataataaagagcagaaataaaaaaagatagctcctactttctagaagtttgtagcttatttagagagataatattaatacacaatacaaaacgatgtagaagcacagcctaaaagatgaagaggggttcgggcaacttccattttggctcccaatatactaaaaaatgaagaaatgacaaaacaggattgttgttattgtgagattaatatattttaaagttttacattagtatatagacccttatatgaataaaaatgaagkaactatattattcacaagataacataatttataaacatatacagttaacgagtacatcaaagagcccagtgatggggcataaggcaaacctgtataatgaacgtattcttcatcgagcctgtcttggtacatgtgattatatctttagtctcayctagaaataatgtcacaaatctgcactcaagaatctgtagatcataaaacataaaatgaacygtgggtttattctattttartatttctgtagaagacatctcaactaataaagccatgtcacatttttttcctttgctgctaatggagtatttgcaaaactctgcacactgcygaaaaaacaatgccatttgtggtattaycataaagccatattctgaaattgcaccagtcttgagtatgacagtcacrtctgatatacatgaaaatgtcagtatgcccctgttatgcaaattgaacaaagaagcactcaattactcaatacacactcacaaaatgcagattttacatgtgaaaatagtagtaaaagtgcactgtgatagaatctgacataatattcttgaaggggaacccaaggcttctcattgtgtaaaccagaaatgtatattctctacttccactctcccatcggccatcgattactttggaggcatgcagctctcatagagaccacctttgacattggtttggtctattscagaatggcatggccacaggtcaaatggatcacagtaaaaagtgctattggatcaggggtctgcctctgcaaatctgctgtcttagctaaatgccctcttgcctggcaaggcatctgcttgtcctgtcacagattccaagcttagcaggcaaatttccctatcaagctaacatcaatgccaagagctctgtttttctattctggcatgctcaaatgatggacacagacctctgtaggtgtaatgggaggttcatgtttggttcacagggagaaatcagagtgcagtagattgagctgtttaagtctttgctcagttgctcatgagtcatatgaccttgatcaagtcacttaacctctttgagcctcagtttactcatctataaatagggtcctattcaacctcaggcttataagaaggatagagtaaattaatgtatggcaaagtgattgayagatatcagacccttagcaaatattagtgatattgatgatagctctgtgtttcaaaaaagaaagccagaggggaaaatcaaaaggggttttcttcctggttccttagcttgaaaaaataggggataaaatgttcacacttgggtggttttagagtgcttaaagacatatgttagattacaaacagactactaacagtcattatgagttcttaattgagttactattcccactgcactttttcaataccaagaaaatggaattactgcctagtaaatttctcaccactgtgataaaaagtcaagaggcttcttacctcacaatcaaccctcataaggggtaaataataatattgccatttaacagacaggaaaccgaaactttgaaagtctggaaaacagcaaaagcttttacttcactctatcttatgccaaaactcatgttcccttcttagtaccacactgctttgcatttcagttctagctctaataattcctctgaaagtggctcaaatgttactaatatctaatatttgctcagtatttacaatgtgtcagccacatttatatattaaattatatactttttataacaaacctagaggataattgctattgttatcctcaagacaaatatggagactgagactggagaagtgaaaccacttgctcaaggtcaaatggctggtgagtgtcagggctctgattcaaatccagacagcaagacgtatcactgttcttctcaaccattacatgagatggatgcaccacgtaaatccatgattctcaacatgtattgatctcacaacattctttccagcaaagagtagccaagaattacaaactccatcaggatagcaaagtgattagtccaagatcacacagcagcaagaccagaacttaaaccagggctttgttgatactagtcataacagatactatttataaggagcctactaggtgccaggcactgatgtaggtagctgatatttcaaaacaacaacaaagtaagtgccattgtcttcttttcatatataataaaattgaaatcaattcttaagtcaattatttgaggcaatatagccagtaaastgccacttcaggatttgagcctatatatttctatcttcaaagtccatactttttccaaacaccccagattaytcccttgagtctcagtctattgtccacttaactattatataagttcttgatttgctcttcaaaatttgttttccacgatgttatttcacaactggagtttgcatatgtattttcaagatgaaacaaagtcattccaagraacaaagaccttctctatgactttttccctttatcaaatcaaatctattattgtttcttataaactattatattttccttcagagaaaaatgcccccatagatctaggaatttacaaaatgcttatgaagagacaaaaacttcaattagtcattttctagtttggagtgggattatctcacagaaatgcaaatttggtaagtattttgattaggacacaaggagctagagaaattaccctcaatttgaaagaagagataaaagaattttgaatatctggtaatttttaatgttctcactataaaataatagactattcctggttcaaagttacatttgagatcatatatccccactctcatttyatttatttaggtttatttcatcagaaaaaagatttgaggaaacgtaataaaattacaaatgaactgatacatttaaagacaaaaagataagtaagagccatataagaaggaaggcgatcatttcattagaaaactaatgggaggttatgactgtacttgaagatctgttccatttgttacatcttggcagcaagggcaaaaatggaaaatgttatttgtagataatgtaacttatattatgtaatgatgctaatagttaatatctatacgaaaggttgaggtagtgcctagaacaaagtaagttgctcaataagtgtctcttcctgcttctccttaaagagcctttttttttttttttttacgcaaattccagcttaggggtaatatcmctttctaaagcagaaattattttctgctgggagttgttcctagacacaatttgctccttattgaataaataaataattcctattttgtaaagtaaaattcacaaaatgagcgataaattctttataaccataaatttctcaaaagattagacaaaaagtgaggaaggaaaagaaacgaggaaaggggaggagaaatgaaatttcatcatataaaaatagcatttaggccgggcacagtggatcatgcctgtaatcccagcactttaggaggccaaggcaagcggatcacgaaatcaagagatcgagaccatcctggccaacatggtgaaactccatctctactaaaaatacaaaaattagctgggcgtggtggcacgtgcttatagtcccagctacttgagaggctgatgcaggagaatctcttgaacccaggaagtggaggttgcagtgagccgagattgcaccactgcactccagcctggccacagagcgagactccatctcaaaaaaaaaaaaaaaaaaaaaaaaagcatttaattcatgtgcatatttgtaaacatttaagtagatttcctcaagacctcaagatgtggctgtcagtatatttcccttaatcactcagagtaattgctctggtttgaatgcttgcatcgccaccaaaattcatgttgaaacttaatcctcaatgaaacaatattaagaagaggggccttttgggaggtgattaagtcatgagagctttgtcctcatgaatgaaattagtacccttataaaagggtttgagagacctgtagctagacacttttttgtccttctgccttctaccatgtaaggaaaatgcagcaacaagaagccatcttggaagcagagaccaggctctcaccagacaccaaacctgctggcaacttgatcttgtacttcccagccaccaaaattgtgataagtaaaattctatttttgtaaattacccagtctcaggtattttgttatagcagcatgaacaaattaagatagaaattgtatagttttagaagatgtgtatggctgagaagttgataaagtgtggacttatgttggttaatttttggtgtcaacttgactagattgagggatactcagaaagctggtaaagcattattcctacgtaagactgtagggtgtcttgaaaagagattggcatttgaatcagtggactaagtaaggaagatcttccttcactcaatatgggcagacatcatgcagtcagcaaagggccagcatagaacaaaaaagtatgagataggcaaatttcctctctctctgattctctttctctctgattctctctctctctctctctctctctctctctctctywcwctctctctgtttctcttttctggagctgagatacgcatcttctcctgtccttggacatcagaactccaagtcctctggcctttggacttcaggacttgcaccagcagtgccctagtttctcaggccttcggactcagactgagaattccaacatcacttcccctggttctcaggccttcagacttggactgagacatcctaccagcttacccgcttctccaagatcgtagacagtctatagtaggacttctcagcctccataattgtgtgagccaattcctctataaatataccattggttctgcttctctggagaaccctgactaatatagcaactcacaaacaagcatccagttatcccagaaaagccatgctcattcatttataaacattgatgaagacaaatgtcacgtaggggataaccatttttaaaagctagatgcatttgagggtttgattacttaaacaattttataaaatgtaagcattgattcacttaaccaagaatttttaaagcattaataaggacaaagatggctgaggcctatggtaactttgagaccccatagacaaaatcctcatgaaatagagacaaggtgtaataacccaaagcttcccaatgtgcatgctgttgtataggtgtgtcaacaggagacaggtgatctgagatagtgtctccgcagccttggggctactggagcaagcaacctggcctgtttatccacgtataaaaatagtgccattttctatgtgtaaaaaaaagataggaaagcactaaaagaggctataaaataatattagtaaagatggacaaagaacrttattgatttcaaacagataagtggaaaagtcttgaaaaaccatttcaaattattatggagatgtagtcaattcaaaataacataatattaaaaatatgagttatagttgtgtgcatttctggacaagataatggagttaagagttaaatagtgaaataaatacattaaatgctctagtgatggtaaagtgtcagaaatactattttattataaaatatgcttctgggatacatgcacagaaaaataactaaatgctctgttttcattttgttttcttttgtctgattttcttaaagctgtacaactcaaaattgcactctcttcagtgtagtctaagattttatcattaactagacatagttattcagctttcaattacacagccagattttaaaaggcattatttcttattggttaactataagaatttgcttaaatgcaaatatatatgtttttccaggtactgataattagtagtatttcttctttcaggaggtataaaatttgaaatttagtccttagggcacaaaggaaaataagtgattgtcaaagttacagagaattttatttaaacttaattcagataattatgtgaaggttgcttggtattaatactcaaagtgataaaaatccttttgagaatgctcataatggcttgaaatcaaagtacctttttcattttcaggaaattttattcaatctcaaatatagggaaaaaaaagttacaatttaatctcctagaaactgcttttacttttaaggcccagtcaatcaagaggtaaagtcttcacagttcttgaacactctatgcatttccttcattgtttgttttaaaacaacatcaaaactgaaagaatgagttagttctcaaatcacaattttaaatgcttagttttccctaatacccaactttcaagtattttatttcaaccaatatccagataattagctaatattagacttacaaaccaccactgggattgttattgttattatttggggaacgctatgatttataaatgtttgttaaagttatttttcttttatctctaccaataatgaaattaactcaataataatcccataacccaaagagagctactcttaatattatagtatattcttatagacacttttctatatacatgctattttcattttyttacataattaacattctataattttgtatcatgctttctaacctaatatgtcacaagcatataytatctactttattatatttcaactacatttttataataattacatattatttcaccctacaactacgttataatttatttcagcagtcaactattgttaaacattttaattacttgcagtgtttcattactagaaacaatatacttctctggtcaaaacattaaaatgtgctctgaagtacaactaaaaaatcaaaatttaaaaagaaaactgttttaatacatagtccagtgcaaaacacattagggaagtttctaggtgccagaacaaagagaaaatgaaaagtcttaagtagaagtagaagatgaaacctttcaccaggggtgttaaagtcaaatatatgctgtaagggctggaggctgagaataacagaagttggaagatggagaagtcatgcctatgagtcagaactaaactgcacaaaacaaggagacacaaaagggtctgcattctaatctgcaggctctgcttgctatcctggaaaagctgcaaggaaactagccacgcgcgtacagaaggtgaaaacaagtcacctgtaaagcagaatgctaagcctgtgccactcgtccttctaagggtcatattccctgggtgtggacatctcaacatgagaagctaacagaatagctttccaaatcagtaaaactcacaaatacttggctgaggcaaatacaaaattattctataggagtgactccacagggaccagtctacaacccaasacactgggatttctctggtaaacaatccctcttgaaaaattacccacagtaaaaaaattataagccctacatagaaatgagccacgttgaagcacagtgagtggatgcaactaatgggatcttttgaaccccaagaactgaagatggtagagcggtctaaaaaaatacttgcaaatataagagtttaaattgattaaagaaatgggaaaagagtagaaactgtgtcaagaacagaaaattaaattaaaatgtgtttttgttaaaagagaaagaaatttttgaaataaatatatgatcaatgtaatttttaaaaactcgaatgtttcagttcaaaagtcattaggtagagttgagcaaggtgattgtctggtcaaggtcagggaagaggaagtatagctacaatgagaaatggggtacatccaggtgggactaatgcaataaataaatatactgaggataatgagagccagtttccccactgtttgagaaaacagtggcaaatatgaaaagagaaaaaataaaatagattagaactgtggaactcatggtagtcaatatagacaaatctggaagtaaatataaaaatatatatgtatatatttatgtatatgtagatagatgatagatacatgccttggtgcaatagtaatgattacattcaacacccagatcttaatttctaaataacccctcaccactaaaaggaaccagtgttccttggtgaaatggctgcttccagggctggggcaggaaaagcataaggtgaccctagaacatctttgggacagaaagtaagaaaatactcaaagaattgtgggaatgtgtcaaagacactattgtaaagaaacttctagccaaattttggacaatttgagcatcaaaataattatagcaacaaattataatctgttgaataaaaatgtgtaagtctataatgatataaataaattattatctaaatctagaaaaaggaaagctttttcttacagttaactgccaaatgataaatgtaaacagaataaagcagttagaaaatcacaatatgacaaccatctgagtagtaattaattcagccaccaaacatgaagggatactaaagctacttaggaaaggtttaatgaagaatgttgatatttacatagtttcttttttattattattattatactttaagttctagggtacatgtgcacaactgtgcaggtttgttacatatgtatacatgtgtcwtgttggtgtgctgcacacattaactcgtcattcacattaggtatatctcctaatgctatcgctccccactcccccaaccccatgacaggcccctgtgtgtgatgttccccttcctgtgtccaagtgttctcattgttcaattcccacctgtgagtgagaacatgcggtgtttggttttctgtccttgtgatagttggctgagaatgatggtttccagcttcatccatgtccctacaaaggacatgaactcatcattttttatggctgcatagtattccatggtgttatatgtgccacattttcttaatccagtctattattgatggatgtttgggttgattccaagtctttgctattgtgaatagtgccacaataaacatatgtgtgcatgtgtctttatagcagcatgatttataatcctttgggtatatacctagtgatgggatggctgggtcaaatgatatttccagttctagatccttgaggaatcgccacactgtcttccacaatggttgaactagtttacagtcccaccaacagtgtaaaagtgttcctatttctccacatcctctccagcacctgttgtttcctgactttttaatgatcaccattctaactggtgtgagatggtatctcattgtggtttttatttgcatttctctgatggccagagatgatgagcgttttctcatgtgtctgttggccgcataaatgtcttcttttgagaagtgtctgttcacatcatttgcccattttttgatggggtcgtttgatttttgttgtaaatttgtttgagttctttgtagattctagatattagccctgtgtcagatgggtagattgtaaacattttctcccattctgtaggttgcctgttcactctgatgacagtttcttttgctgtgctctttagtttaattagatcccatttgtcaattttggcttttgttgccattgcttttggtgttttagtcatgaagtccttgcccatgcctatgtcctgagtggtattgcctaggttttcttctagrgtttttatggttttaggtcttacatttaagtctttaatccatcttgaattaatttttgtataaggtgtaaggaagggatccagtttcagctttatacatatggctagccagttttcccggcaccatttattaaatagggaatcctttycccatttcttgtctttgtcaggtttgtcaaagatcagatggctgtagatgtgtggtattatttctgagggctctgttctattccattggtctacttctctgttttggtaccagtactatgctgttttggttactatagccttgtagtatagattgaagtcaggtagcatgatgcctccagctttgttcttttggcttagggttgtcttggcaatgcagcctcttttttggttccatatgaactttaaagtagttttttccaattctgtgaagaaagtcattggtagcttcatggggatggcattgaatctataaattaccttgggcagtatggccattttcacgatattgattcttcctatccatgagcatggaaagttcttccatttgtttgtgtcttcttttattttgttaagcagtggtttgtagttctccttgaagaggtccttcacatcctttgtaagttggattcctaggtattttattctctttgaagcaatgtgaatgggagttcactcatgatttggctctctgtttgtctgttatttgtgtataggaatgcttgtgatttttgcacattgattttgtatcctgagactttgctgaagttgtttatcagcttaaggagattttgggctgagacaatggggtttcctaaatacacaatcatgtcatctgcaaacagggacaatttgacttccccttttcctaattgaatactttatttctttctcctgcctgattgtcctggccagaacttccaacactatgttgaataggactggtgagagagggcatccctgtcttgtgccagttttcaaagggaatgcttccagtttttgcccattcagtatgatattggctgtaggtttgtcataaatagctcttattattttgagacacrtaccatcagtacctagtttattgagagtttttagcatgaagggctgttgcattttgtcaaaggccttttctgcatctattgagataatcatgtgatttttgtctttggttctgtttatatgatggattatgtttattgatttgcatatattgaaccagtcttgcaccccagggatgaagccaacttgatcgtggtggataagctttttgatgtgctgctggattcggtttgccagtattttaytgaggatttttgtgtcsatgttcatcagggatattagtctaaaattctcttttattgttgtgtctctgccaggctttggtatcaggatgatgctggcctcataaaatgagttagggaggattccctctttttctgttgattggaatagtttcagaaggaatgctaccagctcctcgttgtacctctggtagaattcagctgtgaatctatctggtcctggactttttttggttggtaggctattaattattgcctcaatttcagaacctgttattggtctatccagcgattcaacttcttcctggtttagtcttgggagggtgtatgtgtcgaggaatttatccatttcttccagattttctagtttatttgcatagaggtgtttatagtattctctgatggtaattagtatttctgtgggatcggtggtgatatccccattatcattttttatggaatctatttgattcttctstcttttcttctttattagtcttgctagtggtctatcaattttgttgatcttttcaaaaaccacctccaggattcattgattttttgaagggatttttgtgtctctgtctccttcagttctgctctgattttagttatttcttgccttctgctagcttttgaatgtgtttgctcttgcttctctagttcttttaattgtgatgttaggacatcaattttagatctttcctgctttctcttgtgggcattcagtgctataaatttccctctacacactgctttaaatgtgtcccagagattmtgttatgttgtgtctttgttctcattggtttcaaagaacatctttatttctgccttcatttcattatgtgcccagtagtcattcagaagcaggttgttcagtttccatgtagttgagcggttttgagtgagtttcttaatcctgagttctagtttgattgcactgtggtctgagagacagtttgttgtaatttctgttcttttacatttgctgaggagtgctttacttccaactatgtggtcaattttggaataagagtgatgtggtgctgagaagaatgcatattctgttgatttggggtggagagttctgtagatgtctattaggtccacctggtgcagagctgagttcaattcctggatatccttgttaacattctatctcactgatctgtctaatgttgacagtggggtgttaaagtctcccattattatggtgtgggagtctaagtcttttgtaggtctctaaggacttgctttatgaatctgggtgctcctgtattgggtgcatatatatttaggatagttagctcttcttgttgaattgatccctttaccattatgtaatcgccttcttagtctcctttgatctttgttggttkaaagtctgttttatcagagagtaggattgcaacccctgcttttttttgttttccatttgcttggtagatcttcctccatccctttattttgagcctatgtgtgtctctgcacatgagatgcgtctcctgaatacagcacrctgatgggtcttcactctttatccaatttgccagtctgtgtcttttaattggaacattaggcccatttacatttaaggttaatattgttatgtgtgaatttgatcctgtcattatgcttttagctagttattttgctcattagttgatgcagtttcttcctagcatcaatggtctttacaatttggcatgtttttgcagtggctggtaccagttgttcctttccatgttttagtgcctccttcaggagctcttgtaaggcaggcctggtggtgacaaaatctctcagcatttgcttgtctgtaaaggattttatttctccttcacttatgaagcttagtttggctggatatgaaattctgggttgaaaattcttgtctttaaaaatgttgaatattggccccctctctcttctggcttgtagaatttctgccaagagatcagctgttagtctaatgggcttccctttgtgggtaaccgacctttgtctctggctgcccttaacattttttccttcatttcractttggtgaatctgacaattatgtatcttggagttgctcttctcaaggagtatctttgtggctttctctgtatttcctgaatttcaatgttggcctgccttgctaagttggggaagttctcctagataatacccttgaagagtgttttgcaacttggtttcattctccccgtcactttcagttacgccaatcagacgtagatttggtcttttcacatagttccatatttcttggaggctttgttygtttctttttactcttttttctccaaatttctcttctcgcttcatttcattcatttgatcttcaatcactaataccctttcttccacttgattgaattggctactgaagcttgtgcatgtgtcacgtagttcttgtgccatggttttcagctccatcaggtcatttaaggtcttctctatgccgtttattctagttagccattcrtctaatcttttttcaaggtttttagcttctttgcaatgggttcaaacatcctcctttagcttggagaagtttgykattaccaatcgtctgaagccttcttctctcaactcgtcaaagtcattctctgtccagctttgttccgttgctggcaaggagctgctttcctttggaggagaagaggcactctgatttttagaattttcagcttttctgctctggtttctccccatctttgtggttttatctacctttggtctttgatgattgtgacgtacagaggggkttttgatgtggatgtcctttctgtttgttagttttccttctaacagtcaggaccctcagctgcaggtctgttggagtttgctggaggtccactccagacgctgtttgcctgggtattaccagcagaggctgcagaacagcaaatattgcagaacagcaaatgctgctgcctgatccttcctctggaagcttcgtctcagaggggcacccggctgtatgaggtgtcagtcggcscctactgggaggtgtctcccacttaggctactcgggggtcagggacccacttgaggaggcagtctgtccatactcagatctcaatctctgtgctgagagaaccactactctcttcaaagctgtcagagagrgaygtttaagtctacagaagtttctgctgccttttgttcagctatgccctgcccccagaggtggagtctacagaggcaggcaggcctccttgagctatggtgggctccattcagttcgagcttcccagctgctttgtttacctactcaagcctcagcaattgcgggcacccctcccccagcctcgctgccaccttgcagttcgatctcagactgctatgctagcaatgagcaaggctccatgggcgtgggaccctcygagccatgcacgggatataatctcctggtgtgccatttgctaagactgttggaaaagcrcagtattagggtgagagtgtcccgattttccaggtaccatctgtcatggcttcccttggctaggaaagggaattccctgaccccttgcattcccaggtgaggcaatgccctgccctgctttggctcacactccatgggctgcacccactgtccgacaagccccagtgggatgaacctggtacctcagttggaaatgcagaaattatccatcttctgcatcgctcatgctgggggatatagactggagctgttcctattcagccatcctggaacttccccccaccaaatatttatataatttcaatacataaggattttayccctacaaaatccttattaattacaaagggataaagagaatcttcacagtggaaaaacctgactgtaccactttaataatggtcatgattaccagtagtgggacaaatcaacactgagtcccacctgataggattcaatgagaatacggtatcacttctataatactcctatcaaaatgcataayctgaatcaaaccataagaaaatatcaaagatacaaaaagtaaggaacattcaagaaaataactggtctgtcatctttaaaagtcgcaacatgaaagtcaaggaagactgaggaacattccaagctgagggagacggcagagacatgacagctacaggtgatgtatgatcctttgctagatccttttctctaaaggacatgattgagacaattggccaaactgaaattgagcctgatgagatgatagtaatttatcagtgttgacttcctagtttagatgttggagaatttccttgtctgtaagaattacacactgaaatagttggaagtgacagggatttacatcagctacttaytcttaagtgtgtcaagggaaaaaaaaagytttttatgctactctgcagtctttctcctggtttgaaattatttcatattaaaaaataaaactcatgtaccaaacagtagtgcagacacagttgagtgaattatttggaacctagaacagaaactgttttaaaacaaatggagttaaaatattggacaaagacaaagaaagtgagtggaggacttcggagttaaggattccaaagggccttacaytgtttcagagcaagatagatgtgatatttaacttcacaatttaagaagtcacataaaaatttaaaggtaatatagagcagaaaaagaatgaaaaactttcaggctcatagaggagaaaatgagtaataacaaaaatatgatccatgttctagaaagctgcatggaagaagaaagccacagaaactgaataagtatgtaagtgtgattaaaaaaataaaagttggcaacactataataaacatccttggatataaacctctctctctctctgtctctctgtctctctctccttctctctctctctctatatatatatatatttaatgtacttaaaattatataatatttgatattaatatagtttcaaagtactttcctaaaaaatctgtattaattacaaagggataaagagtatctttacagtggaaaaacctgacagtgccattttaactgatcaccaaaaatgggacaagttaacaacaagtgctacctgataggatattatataaatgtccttagacattatatgacatgagtgttctatgttttacaaaatgtcctcagaatccctggaaatagaattgctatgttaaaactacagacacattaatgtctcaattcattaacaagtaaacaaaggttttacttaacaaactataacttttctattcaaaaaaatgtaactacatttactgtgctccaccctatcaatgaggctccaccacrctatccatctacctactctcacaacaggccaacctttttcttgccctagggcctttgtaaatgctgttccttgtgcctggattggtctcccattttcccccatccttccttcataaactcactccttttcatcttcccataattgccacctccgcggtgaagtcctcgctgacattcctgggagatcacctcctatgcaccccatagccacactttgtgcaaaaaaacgttcaacaattctctcctaaaattgaggagtttagtgtcaccttcttatgttaatttttatagagcagtctttctcctgtgacacactatattcaatttttttctttcataagtcaagctgctaagtgctaataaaacacgtaataaaaaggtaaatggcctctgtattaatcttaagtactgctgcctgtaatatgatttttaaagctatattctcaaattacataaaccccatgggactgattgtcaatgtctttcatatataagaaagcctcactgtggctgtcatataacttatgccaaatctgttttcttctccttaaaaaaatatgttttcaaaaactttttctaaatattttcatgaagttagtgctggtcaayggagccacactaaagcactcataacctcagcttaaccacgggaaaagcactttgttatagcattgatcgacctcacatttatttcagaaaatccacagttttcttataaacaagcatctaatgctggtgaaaattgttgccatttccagcaggaagtgacctaggactcctagaaagcaactgmttttaagggtctggtgatgaccactgggcatgagctggtgagtgattaacattgttagatttgtccgtagtatttaagatgttcagagygttttacaatcccttttcttagtcacaactcataggcttgtgaaggaggcagctcctgtcattattgctttgctatttggatgctgatccacagaaaggttaaataccgtttccaaggtcacggagmgttttcctgacagagcctacttaagcattcattgccgctgacacagggctctagggaaaaggaaacagaggaggcgaggaaaagccctaggctacaatgagaacacaacatcataagcacatcactggggatagtctttctcatgtgctactaaagaccactatgtcagcaaacatccaattatgtctgattcttgctaatattaaataacattctcaggattcctgggaaacagcaaaactatacactgacatagaatgggagggggatgaaattacattgactttttcatacctacccagatgtactgtttattttctatttatagtatgctaatactaacacatgtaagcttatattttaaaatgctaatggaatcctatcatatgtgctgaaaacagtaggcatcgtttagtttttctatctaagggtcacaagtaggcttttattatcaaaggaagactctcacttttcagagtacaagttgaatatcccttctttgaaattcttgggaccagaactttttcaggtttcaatttttttttaaattttggaatacttgcatatacatagtgagatatcttggggtgtctaaagtcaaaacacaaaattcatttatgtatcatatacaccttatatacatatcctgaaggtaattttacacagtatttttrataattttatgcatgaaacaaagttttgactgcattttggctgatatccgtcacatgaggtcaggtgtggaaatttccacttgtgacatcatgtcaatgctcaaagtttcagattttggagcatttcacatttcagattttttgatgagagatgctcaacctttagcacactatgttcagaaaggttaacatcacacagttactcagtgcacctttccaccagctcagcactcctctgtcccaagtggtgtgtctccctgtggccatcccctgctgggcagtactgatacrtgtacatatatgaaaaacaacatccataaggaaaggttaatttggagaaaagcctaagtggaggaatcgatcagcaacaagagttaataatcaattgcaggtgatttgggtaaatgtgaaaataccctgagatcacatagtctttatcacatcacctttaaggagaggaactcatcattgctcagtagtcaccaatctcagtttacttcttatcctaaaaacatggacaaaggggagatkggaaacccagattggccctggaggccggccagctgtgaatcccattctaggctcttagtccttataatcatttgtttaatcagactgccttctgcacatggaagggggagtaatggctatttctcacttagaaagcaaagtaatagtgtacagatcagatctctagtctttgttccagatactgacttattttcagtacattgtggttcaagaacacatcgatcataaaaacgtggcagctttaatgagctaatgttgtctaaactggagaagaaagaatgccaagacagagcctagggcttctgagtagatttggaccttcaataaatttctttcagtcaccccatactctagacagaggccaagaatgaccctttgattcctgtcttcagcagcaaaccaaagactttttcactgtggggttttggggtttggtttgttttccctaaaccctgtgaccatgactttcctagcatgtgatagagctcattgtctttctgctgagctctccaattcgtccccacagaacacatttggcacccacagcaacacaggcagaccacaaagtctccagaatgaggaaatgttggaagcaaataatatattcagctgagcattcttcctggcagtgggagcaggagcctgatttggaccttaaaagcttagtggcaacaacaaataagcattggcctggaaaatccacatcccaacaggctaaacaaggcaggtaatatgaaaataagtttgatgtatttacaaaatctctctaaattttctttttactggtcacactctcaggccactttcatggaatcattcagttctgcatcccttgtgtgggatccagagctctttgtatctttgactgcctcccagcacctgagggtcaagtatcccactgagagcttggaaagagaagccaagaagatttggagctggtgcgggtgactgtcaagcgcagatggccagttaccgacgtaatctgtgtatctgggaggcatgtgctataagaaggcagctgytaaamcaaatgaatcaagccacagtttttaagaaggaaaagtgtagattggaaaaggataaaagttttgaatgcatgcagctgtgcagggctatgatcaatgctttaaaaattaggattatatgcactgatggagggttttcccaaagtgcaaccctatgtgaggtcagagcgataatccatttcatttcactggcagagttgggagagggcatttaacaaggtcagctttaacactgttttcctgggatgctgaatgtggtttgtwactgttgatgctctgtgttttggaataaggttgtaagactaggtttaaaagaaggtattgacctgtcattttcctataaaagtggagcagagatggcttttattccatttattgatcacttagatgtgtgacttaatctgtatggctggataaattctggattttctgtctatccatggtttaacccataatgttactggaaaatgagccaayattactttgttctggctgtgtgcacagcagtgaattctaattgtgtttctcaatctaagccccagaatgaaaactgccargatcaattcattttgataaattaactgtttctgatggctatctacactgaactgcagctgctgtgtttttttcttccttaacaaaatgattatgaagtaaatgtgctccaactattgctcacattgttttattgaactaatgaattgctctgggaagctctatgaagacttttgatcaattattgtgcgcaaattgtttaaaaggaaatacatcataattaggctaacaaatctgctgtgatgctgcctctcctgatgaataaattttgtgtagatagaggggtagayacataggggtactttgcatttttctcttcattgattttcatacatcataatacgatggattaaccaacattggctcacaattgctctttgtccgaagtttaatggaggaaaaaataccttttaatcccttttaaaaatctcctataagtgtgagacagataagcatatggtcatcaagcaatactactgagaacattcacctagatcaaaatgaggaaatgtatttcagctgtcactgccatgtcattatagcccccccttaactgcatttatgttgccaagaggaatcctcaccagatcaaactgaytggaatgaggcccaagacagctgtggcccagataaagaaaaccaaatgattttcagtctcctgaataccaagaaacaggatatgtcattgatgtccagttagtgatcttgttctacactcagtactgctcatctgagtgtgacactttctgtatcgtcattggactactgtcactcattacagtttaaagagaaaattattccattttctttaaagacttctactgcaaagtttgggactcagacaccaagtaatacagtcagagaagacttcaggagtctatacaaagcatccttaattcaatcaatgacaatgcccattgttctaataatttcattgttcaaaaactaaagataaattggcatggaaacacataccagactagagactaccaaataatatagagagtatgtatggatggatatatatatakagagagagagagacagagagtatggatttattaaaatttgaccttatataagagggggaaaatgactacatgaagataaaggttttagtcaagcctctcacaggaagttttgggcattgataagaaattagccctttttagctacctatctttaaaaacactgttagtgttatgctctatgagatgaaacttcatgaattaaaaaatatgtggtgccagccacagtggctcacacctgtaatcccaaaactttgggatggtgaggcaggcgtatcacttgaggccaggagttccagaccagcctggccaacatggtgaaatcccatctctactaaaatatatatatatacatacatatatatgtatgtatgtgtatatacatatacacatacacaaaaattagccagagttgggggtgcatgcctgtaatcccagctactcaggaggctgaggcacaaaactgcttgaacctgggaggcgaaagttgcaatgagccaagatcacaccactgcactccagcttgggcgacagagcaagactctgtctccaaaaaaaacaaacaaaaacaaacaaacaaacaatgtggctttgatgaatgttggcatgatcaaagtcattgggactctatgtccaaacaaataaaagggagtctctgagacctggggatagtatgtttcttaggaaaaatctgtgtaacatcatctcctgtccccccccaaaaaaaagggggggtgctgggcacggtggttcacacctgtaatcccaacattttaggcggccaagatggaaggattgcttgaggccaggagttcaagagcagcctgggcaacataatgagactccatctctataaaaatatatattttttaaattagccagacgtggtggtgcacaactgtagtcccagctacttgggaggctgaggtgggaggatcacttgagccctggagatttatgctacagtgagttataatcacaccactgctctccagcctgggtgacagagggagatcctgtctcaaacaaaaaaagccaaaaagagttcctttaagtgaacttcattttccctggccagtgagtgatcttgttcttttcaaaggggctttccctaaggaactctcaagcctcctagagtttcctattcctctaagttcttgtccttctctgtaataaagcttctctctccctaaaagataataacatcatatatgcaataatttttttaatgtggtgtctttagaagagcaatattttaaaagtcaaaccactagtaacctaacagtttgcctaaacttcctttgtcatagaacacatgaagtttatgtttrcacagacaagtcggctagaggtcagggcctcagggcctccccmactgaggaccgagagcataaatacctcagasacactgtaagccattcatgtgggaarggttgctgtccagtagaggttgctaacttttttgtcatgctatctgttgacatctattaaccccttctcagaatatttttaaatgcatgaaataaaatttataggattggaaaggaaactgattatattgaaatacagttagcaaatactttaaaacaaatgtatgatataataatataggtacttctttttgaagtatcaattaagatcagtggcaacttcaaagtaattgtaagtataagtaattttcaaggtatttgcaaccattacattgtaataygaaaatattttttgtttctattagagacctagtcatggatgttgctaataatacagaagtttgtagcctatatttatagttgagggagatgacaaattttgagagaaagtaaggatgcaattttttcaaatgccaactcatggacccctaagatttttttcccctaagaaaaccctgctttagaagasgaaagctacaggaaaatgtttctattgcactctcttcttccctgtccccagacttttcctgaatcactcataatccctttacctatattcttttttccttcagttttatctatatttgttctctttgaattagtcttttttcattattatcttgcaaattctttcccttcttttccttcacttcatttcctttcctccctttccataattcatttctcaatacacttagcacatgagcagctccatcagggcaagcccttgaatgagtctgtccatagcacacagtagaagtttgagcaaagagggaaatgcaccaagaaatgcagccaaggtataggagggattcaccttgctccaagccaggccctttgtcattagaagcagtttttacagctcaggataaaagtgggcaattgtctgtttaccttagtcaatataatacagtcagtaaaattacctaatcatcaaagtagaatatttgcagtcatttttatcacataaatatcaagttcttcctgtagattaaggttccattagttaatctcgtatcttaatagaagtgattatcattaacgaaaccctaaaaatatttatagacagtcaagattatatgaaattgcaagcatttaaaattgttctccacatacctcaaatacacaaccatacattggcattgaaaaatgtcataacaccacactcatttaccaccctcctgctcaaataatattctagataaaacttgtatgattaggcagggcagggtggctcatgcctgtaaatcccagcactttgggaggccgaggtgggtggatcacgaggtcaggagttcgagaccagcctggccaagatggtgaaaccccgtttctattaaaaattttaaaaaattagccaggtgtggtggcaggtgcctgtaatcccagttactcaggaggctgaggcaggagaatcacttgaacctgggaggcggaggttgcagtgagccaagatcgtgccactgcactccagcctgggcgaaagagtgagactccgtctcaaaaaacaaacaaacaaacaaacaaacaaacaaaaaaacttgtatgattatgctcttagargccatgaattatctgcttgatctcttggggctgccactgagtaatccagaagaccattaaattccccagtaagggccaggcacagtggctcacacctgtaatcccagcactttgggaggccraggcrggcggattgcctgaggtcrggagttcaagaccagtctggccaacatggtgaaaccccgccactactaaaaatacaaaaaaaattagccaggcatggtggcgtgcacctgtaatcccagctactggggaggctgaggcaggggaattgcttaaaccaggcaggcggagtttgcagtgagccaagatcatgccactgcactccagcctgggtgacagagcaagactccgtctcaaaaacataaaaataaaaataaatttcccagtaagtagatgaagaaaaacactraataaatatggaaacaataggaaaacaagagactcataaatgaaatttatttttaaattgtgctggattaggcttaccaataaggaaagggaattcattaaatgttaagtctttcatttcagtaaagcacatgtaacaacatctaatataattgtgtgtacgaccatgtgagctaattttgccacaaaaaaacagccacctgggtaataaactgtctgaaaaaataatgataatttataaamatgccaattggggaaaagcacttaatattatgctgtctagccaaagaaaatgagatccactccaattatttcaatactctgacatgaagcattttgtgttactttgatagtcataatttatcgtgaggaagggctgatcaggaagtggacagaagcatctgtatggaagccacacctcagtccacaggctttttcaggtgactcacctatttccaagctacctagctctccctgctgattgtttcaagtgcaaataaacatgctgtatgatgcaaatcttggctttgctaaccaaatgtgtgaccataagcagtcattatatttttctctaagcctcagtttcttcaaatgtaatatggggtaattcatagagcaatcatgaaaaccaagttagacaacacatgttaagttgctagtacygagcctgacacagagtaagttctcaatcaataatatggtgatgtcctttagctgatccaagcaactggccagataatacttagaactctaagaagaaaatatggttgaattttatatgatgtgtaatgccttttacctgtttagaaatctattttattattcttctatttggtgcaatacataccaatggtgatctaatgctgtggtatttttcacacaccatagtggaagtattactttaatgtcaagtgtaagcagctcatattatgcttaagaccatgatatctgccttgaaatagcataaagaaaaatcacatccacctggagaacatgaagatagctataacattgtttctatagggggaataaattaaaattttgtgatttctttacattaaaatttgaagtacattgacttagcctggggatttccaaaataactttttaagaagtaatagggatctttaaaataaaatgattaaaaatccatctattttatttggctcattcaaatataatatctataaaagctttgtgttgtggtaataatcccttactatttcctctctctccttggtcttttcatttattcatttcccattaatcgtaaaactgaaataaaaagagaatgaattttttaaagtcactttccattctaaagctttgttaatttcttctaagtgcactttagtgctgtttaatttgtatctaggggtagcgcattgttgctgcactatttgcttattcctccagatagaagcaattcactgggctagccaaatcctccacctggccaccatcagcatatgcacatcaccaggaggaaacaggcagctgagtgtacctttgggcctgtttcctttggtattcaaattctccactttctccagtgggcccacagtagtgggggcatatttatggaactcagatcatctctgatcctaatcctggcagacaatgaacatagctgtgtttccattctgatattttagtactaaacaaagctctatctatttaaaagctattgcgctgacaaataaggagtctccaatgtgcacttccgaatttaacattagttgttactggaactcactgttttgttaatgttatataagaaaagtctagaaagaaacaggagtgatcttgttgtagctcaaccaggattatggatgtccacactttggaaaatgtatagatgttagactgtggtgatatgttttttagggtcactgggcaactccataccccttagagctagaatttggtatgttaagtgtaacttggtaatacatatgttaaaaatggcttttatcttggatgataacatcactagtttctaggcatagcattttttctaatgtgtaagaagttttactccatggatgtcacctgatgattgatcattttgatgtagacgagtttgaatttaaacatcaaatcatgctttatctgagactctgttatccaagagagcagatatttttaactaaggatgtatcatgccacattgaactgaaacaaacactaagcatgttgaacaagatcagtagtggcagtaaatgtgcacgattgactaggacacagcacagtatttttattccaaatgaagtacttgtaattagctttgtattttttgaactatatttatatagatttctttatgttaaatttcaacaaaacatgtaggatccagaagacctcatcttggaggtcttgggattttcaccttacagaatgattcttcttgtccttggtcatatttttcttggtcttagaacctgctaaataccaaaccttcagaaaaaaaaaaaaaaaagaaaagaaatgccaaccaagctattctaccaaagagctgaagaaaagccctaatgatctttaaatccagtaaccaaaagttgccagctatttcttctaaaacaaattaaattttttttttaattagttgggaaaaccatctgctacatagcttctttctttgctgtgtacaacttgaactgctgttcacatccataatctacatgcctagcttagtgcctggcacatgaaaggtatcacataaatatatttagaattcataagaatctagttcagtgaattgaatgaatgaatgaagaccatattctaagtcttaatccttatcactactaatttagcagaaatgtcctgagaagtgctgattttcacattcctcctcatcacatttttcctattgatactgttaaaagtggcaaatgtagaactccactccagatttctccagtgtaggaaaccagggagcaaatcaaagcaagggaagtctttcaatcttttagcatctctggtaaattagtaaggtatcctcctgcacgttgctctgggtttgaaaagrttttaaaacaaattacttttttctcttggcctgtctcaggagcaacctaaattctacttttcaaatgctgaaatgcccttaaaagggaggggttgaaatgatatattcaaagaatcagttttaaagaattagattgctagctctcctcacagcagatagtctggaaatgacaattgctaggctttttggtggtattagcagagtagtaaatataatgtatatgtcatttttattccagatggaaagaccagtagttactagtgaatgacagtaaattgtaccagataccaagtaaattttaacaattttatagatgcttttctcatattcatatattcattagtatttcaatgtttaggtacataactcaaggtttcaatattacaccatgtaaaaagaaaattacaaaagtgtctacagaacaacattccactcttgagacaaaaatccatagtttggtcaagaaattattctatatcaacccaaaagaaatgaaaatatatatcccacaaatatctatatgtgaatgctcataacagcggtattcataataaccaaaatgtaaaaattatccagaggcatgtgaactggtaaatgggttaaaaaaatgtggttgctccacacaatggaatattattaagcaataaaaaggaatgaactactcataaatgctacaatatggaagaacctcaaaaacattgtgctaaatgaaataagccacgtgcaaaagatcacacattatattattccacatatatgaaatgtccagaaaataaaaatctatagaaataaaaagcaggtctggagctcagaatgggagcaggaattgtctgcaaagaagcatgaggaatattttcagggtgagaggaagagtctaaaattggattttggtgacagttacacatcttgtaaatttacttaaaaactaataaactgtatacttaaagtgagtaaattttatgatatataaacaataaagctgttaataaaaatgagaccaaacacttttgttacagatgaaaagcttgattaaaatgcttacctgtacaaaaaaaatcacctgtgaaatataaaatacttttactaatatgtaaagcaattgtcaatgagaagtggtttttttctctaaacaatatgatagaaatatgagaacagacattccctaaattgccctaccttccaatatgttctctcaacaatgtcactgagtagatacttactgggcgcctcctgtgtgtcaagtatcatgttaagttcttaaaaagtgaaaagattgagacaactttaatcaaggcctcctttttttaaatttatttatttatttatttatttttggctttccagtcatagaccttctttaccctcactgatctagagactgtctcaaaaggcatagacaagcacacttgtagatttatcgttccgaatccaacatcggctgagccatctatgtgaatcagtgtatgccctaaccccttccccagatttcgctttcctcacaytcccttccagccacatcgctccattgtctgcaaataaccttgccttttacttcaaagagaaaattgaagccaccctgcagaaaatgcctctttccactcacccactgacaattcctcacacctaccaacccttcagcccctcctattccctcaggggtcaatattcaactctctctagtatatttaacctcttcttaattggtacttttaccttaagttacaaacgtgttcaagatctttcactattttaaaagtattcttaaaacttacaaactcctctagcaactttcctctttccctctatcccttcatttccttgaaagatctggctaaatttcctgcttcctcttcttgagccctgtctaagatcagcaatgatgcgccagttgctatatcactgtttcctcatcaatatttagttgacttgctgtttcggtagtatgcttttgggccttagagttgattctggaaaggatcgagactttggagaatgctrgaacagagtgaatatattttataccttcacctctccaaagacccagatcatcatttccaactgcttattgtacatttccacttggataacacattgactgtgcagattcatatactgtatttcatcagatctaaattttcatcaattataacataacccattattttatataccgctaagaaaaaaatgccactaatttgttgatgctatgctattcattgtgagaatcatagcaaattgagagatgttaaaaattgggatctaattaaactaaagagcttctgcacagcaaaaaaaaaaaactaccatcagagtgaacaggcaacctacagaatgggaaaaaatttttgcaatctactcatctgacaaagggctaatagaatctacaaagaactcaaacaaatttacaagaaaaaaacaaccccatcaaaaagtgagtgaaggatatggacacttctcaaaagaagacatttatgcagccaacagacacgtgaaaaaatgctcatcatctctggccatcagagaaatgcaaataaaaaccacaatgagataccatctcacaccagttagaatggtgatcattaaaaagtcaggaaacaacaggtgctggagaggatgtggagaaataggaacacttttacactgttggtgggactgtaaactagttcaaccattgtggaagacagtgtggcgattcctcaaggatctagaactagaaataccatttgacccagccatcccattactgggtacatacccaaaggattataaatcatgctgctataaagacacatgcacacatatgtttattgtggcactattcacaatagcaaagacttggaaccaacccaaatgtccaccagtgatagactggattaagaaaatgtggcattatatacatcayggaatactatgcagccataaaaaagaatgagttcacgtcctttgtgaggacatggatgaaactggaaaccatcaatctcagcaaactatcgcaaggacaaaaaacaaaacaccgcatgttctcactcacaggtgggaattgaacaatgagaacacttggacacaggaaggggaacatcacgcacgggggcctgtcgtggggtgggggtagaggggagggatagcattaggagatatacctaatgtaaatgacgagttaatgtgtgcagcacaccaacatggcacatgtacacatatgtaacaaacctgcacgttgtgcacrtgtaccctagaacttaaagtataataaatttaaaaaaattggcggggggtagggggagacagggaccaatgaagtgaaggaaggattcagtgaagtgaaggattcaaggaagtgaagaatttaatcagcaaggaagtggaggattcatcttcagaaagaaagatgtttcaagcagctggcagagcatgagcaaagtcacggctgtttaaaaatgcctggtctatttggaaaactatggcatctggaaagaccaaggccaacttgtgacagtctgttatcaaaaatatctcagtaattaagcagattttaaactgtagggaaaggaataataacccccatacattcttagttggaacagactcattacaacagacagattaacaagagaaaaacaaacagaagtttgttaacatgtatatttcatatataaatgggcgacacccagggaataagttctcaaagacgtagctttgaattccagcttatataacatcttcaacaaagaacagtaaatttttagagaagtaaaaagacaaagaaaaaggacttggagtctctagggacagcaacttcgggaagactaacagaaaaagtttagttagtaaagcttgttaatgtggatttctctggcatcaccccaagcctataaattgtgtgtattagagggaaaatcacaccttttgtcttcgtaaatctatgtcctgcttttgagcaaatagagagaagacagagagctttcctgtatctccttcttaattgccttcaggtcaacaattctttatattttggggtggtatattctggtctttcatagtcccaccattgaaactttatttatataaaatttcgcaaaataaaagtagggttggtagctatggaaagatttgggttgcaagttgcaagatcaaagatgggcaaaagacagaaaaacataaattgaaacaagcagaaaaaaaaaatacattggagtacattgtcccataccttattgaatcagtcacttagtactaagaataagtcagttcagttaaactgaactgaactgaactgaactgaactaagtcagttcasttcagcgtctcatttcaggaggtggtattacaagtgggctcccaccaaagttaggcctatatggtgcaagcatacagttatttaataagaggtatttatatgaaaacaagagaaaaacaaagattaatcattagagcaaattttaaaccagttactgaattcagagggtggctggtcagaaagaattctaaatgttgggctcaagcatcttttgcagttttaatgactccagtgatgtctgagtggcccacaggcaagaggcatgaaggaagtccacatgtgagctattgtggttatttctcctaagtttatgttaagttgtccagtatcaacttgcagggttttggggaaagggtagattttgttcttagtgatgccaagtcagaaaggtgagagaatattggaaatcttaatttggagacccacagccaaatattggaggaaactagaaaaattcagaatccagttcagttcacaggtagataataaaacctcaaaaacaatgaataggactagaatctaacaataggtgcactgtacttttattctgaaatttttttttctctgtaatcacccctatttctaccaaagaaaatcacagtaaggctaatttattttcaaaataagtctagtgttattaaacttcaattgattatttatataagtgcagcaaaaacagtgattgatcrcataggctctttttaagtctgctttgctggaacttttgataagaaatttcagattagatttttaaaaggctttgactcaaggccaaggatttgctagaagactttgaccacaatacctatagatttgattaaattcttctcttcttaaggttcctgaaatattttgaggttcctgattctgccaggaagtgacattccgtactcacctataaggtttgcaacacttttaattaggtactaggccaggttttttgaagggggggggggctttattggttccataaagccaaccttagtttcttaaaactacagacagcttgtcacccaggctggtgtacagtggcccaataacagctcactacagcctcgaacccctagaggggatcctctcacttcagcctcccaagtagataggactacaggcacatgccaccgcatctggctaatttttatttttcattttttgtagagacggggtcttactatgttgctcaggctggccttgaatttctggcctaaagtgatcctcctgccttggcctccccaagttctgggattatagacatgagctgcacccagcccatttcttatttgacaatgcttcctatgcagatttagcatatcaaataagcttaattaatttaatatgtctcgttataaagagagagagtaaattttttgagatagtcaaggggcttatctgaaaaatcccgaagtgaattctaggtttaaaagaatttgatttagggcgttgttaaaaatgccaaaatctttaagtcacttgaatccataggatcacagatcactgtgaaataatagtcattcaattaaccagaatgagaattaaaagacttcaaaggtgggccgggcacgatggctcacgcctataatcccagcactttgggaggccgaggtgggcggatcacgaggtcaggagattgagaccatcctggctaacacatctctaccacaaaaaattagccgggcgtggcggcgggcgcctacagtcccagctactcgggaggctgaggcaggagaacggcrtgaacccaggaggcggagcttgcagtgagccaagatcacgccactgcactccagcctgggcgacagagcgagactcctactcaaaaaaaaaaagacttcaaagcaaatacagaaagttacatagttgcaggaaacaacaacaacaacaacaactttgctcttttaatacaaaggactcagttgtcttaagtaatcaaagacctaataatagaaaacataaagcacagaaaattattttgataagacacaaaatctttgttttctagtcagagccctctaaaggtaaaactctttcagtgtctcttatcaagagcagatttaatgttccaagaacactttgcttttttaacagagagaaaaacagcttctagttttacactaataacttgttgatagtaagactcatttttaaaacccgtataatacatttattcaattttagccagcttcagcacaaaagatagtctctctctctttgacccctcttctcttcccccacataactttctatatcctttcagttttctccttcattttccttttttattctaaaataaccattcttttcactttagtacagaattaattactctttttcctttaacaaaacagatcctcataccttataactttccttaccaaaagcacatcttattttccttgtatactttgcactcagagttgtttcccttattatttctagtagttttaattatatatgttaatccaaatttttaactcgaagtaactttaatttctagaaacatgtgcttcctcatagtataattttttaatgtgacacatgtttaacagacccaaatatcttcagcttctctatactatatgaaaacaaaatgccaaaagtatacaaacttaaacttatgcttagtaattagtgcatcagtattttatcttatttggaaatgatctagatattgaataagtatctattttttaacttaacttagcaaaacttaagggtgtaagttaccaaagagatttacaaaactgtttttaagtagatatattataaaacrtaattattgtttgaaagcatattcataaattcttaccccacttacacctatttaattcacttattcttcacaattgtgcttggattacccgtgaaattttcagggacctcagacaaagctaagcatcatttcaagttatttcyccattaagtattttcactgcacatgcatgttaggcagacgtcaccaaaacaacaacttaaaagttaaatacatcggatttttgttattattaaactaacaatattaaagtagtcttatctaccaaaggtttatccaagtcatgtgaacttgaaaagcatttgggttagttcctatacttctggcagttttagggataatttatataagcactcatttttctttaagccaattaaatagagctcttttacgtattaattttggcaatgccatccagagttaggaaaatatcacatatgctaacatacatacaaagacatatatagacatgtagacagtagcagatcttatcgctttcattctaaaacttcagccatgttccaggtactataatacaaaactcactagtttataaaagaataagcagaatccaaattgtttctgacaaatgggacaagccagggttacctactcagatggccaaacctttctaccactatttttggaaaagacttagatttttttatttgcccaacttccaaatagcttttttttccttctgatwatcatctccctgaagttcgcatttcaaaagggatggttctcaggtaagacagggtagaacatttatatctcaaaggtacagaaaaagaatgtaagtttcaatccaagaagsagccttggggcacatttttctatcatcagagctcaatcctgtggaggctgttgactaaattttaagtgccagtatatttccaattaacctttgtagtctcggatatatgctttggsggaatcctgagatccatgagagcaggactccaaagctcaagtgactgaraggctagagtgggagggaaaaggtccgtcaaagaaggacagagggacggaggaggcagaggctggaaggagrcatatcaacaatgtaagggaactgatggaagatttaaggcaacaaaagaaaaaaggagaaacagaagcaatgagaaggaagaagccaacttggggagatcttaagttcttaaagaagctaatgaagttccatattacccttaacaaaatttatgccartgagaaagaaacctkaaagtggcggcagaacctacagttagcaagggtttgagaagggcttcccatggaggaattcctatgggaggagcaggatcaaatggagagaacagagtggactttaaaaagttgctcctatcaggctatgaatatcagaaaccaaacttttttaaccgaaggtattatctactaagcaactcaggatcaaaaccaataaacctttyatggcttaaccacagatacactagtcatctccagaggtgcaaagatactgcctccatgatttcaaagttcactttcagagatagccaaaaaaaatcaaagatctttgttgccacaggcggttaaggatagtgtttgtgcaaaaatgtgtcccagagaacgtgggatgcctccaatcacagccctgctaatttgaaataccatgcatgcattttactgggatagattttccctgcactaaccaaaagcaaagaaggttgagacgatgaragccccctgtggactgggatctattattaagacaaactcccctgagagttggcacaaagaacacttagtttctcagattcccaacccgactagcttccagacacaagttgacacctgcaaccccaccccaacaccagcaaggaccagagaaaatatttttaccagtcataaagccaagctctcaggacataaacaagacaaacaggaaaacgatggttgtccattgaatgaaaatgatcaataacaagtgggtaccccaagatagagaatcacatttcaaactaaatcatacaaatgttttcctgcagctaaaatgaatttggaaaggaagggacaaggagaaatttttactttgctctcttaaatgggcactatagatagagatcaggaagagctgactttgatgtaaattcttacccttttgcctgcttctgccatttccccaggatcccatctgtgggctctgaagcaagtgaatgtcccagaaaaatcccacatcctcgtcaccagaaattcagsgaaaggaataagaacctccctaggttcttagttggaacagacccattacaaaagacaggttaacaagagagaaacaaacagaagtttgttaacaggtttatttcacatatacatgggagacacccagggaatgagtagctgagtagctctcaaagatgtggctttgaatttcagcttatatcgcagatttaacaaagaaaagtaaatttttagagaagtgacatgacaaaggaaaaggactgggactctctagggacagcaacttgggaaagacaaccaacaaaaaaatggttaagtaagtaaagcttgttaactgtagattcctccagcattgcccccaggactatacgtgtttaaagctgccgtcagtggttgttgttcttggtagagcaggggcaagataccttttgtctttgtaaatcttcgttctgcttgtaggcaagtagagggagggtagagagttttcctgtatctatttattcttaattgccttcagctcaacaattctttatattttggagtggcatattctggtcccccacacaataatagtctataattccttgcctctgaaatttayttcagccccatattcaaactctcagagaagttctgtctcattttaaataaagatgcatcattcacttcagtcttgaaactaccctcttttaaatcacacagtgaggatttacacatttttaagaattctgtaacttagaaatcagctaatgatatttgctcttaagaatgagaaagaaacaattttctttgaaatgtgtgttaaacatgaaagaaaagaaaatgtaagtaaggaagaatgtttagtgcttgcccagatttttcctacttttattaggtagtccaaagtccacaatgtgttaaggtgtatgggaaaatgtcaagtataccaagaaaacatttaattagatcatagacaataaccagcaagaaacagtttccctcttcatcacttctctttgaggatataactaaaacaggaagaaaacagaaataagttcatagcacctagttgcccctgcccagcatgtcttcacctggaaagaacagagagaattgagccaaagagaggtaagaaatagtaagaaagcatccagtcccattaactatggtcacagcttctaggcccagctggactgtgcagggaactgttttcctgggagactggcagcgcttgcagatgtcagaaggaacaagtgccaaggaactttaaagaaatcaagttacctccattcaagaaaagcctcctactcagtaattgctgcccttttaataggccaactgctgttgccttccagcttgccacatctcaacctcaactcctcagatcgtgcttcagggctctttttttgccctgggtaccgttgttccacttcatctcacaaatccgtagctgcctccaaggccaccaacctctgctttgcacagttccagagaagaatctattgcagcaagcaatgtgttcatgctggcatttaagtgcctcagtgtctctggtattgtcctgttatttaatgccttaataggttcttacagatgctgctggagccattcaaaagccatggacaatgtctaagctaaactttctacatatatacctttctccctgatttgtgtctccatctgtgtccacaatcatactgaagttcatgtaagccatagctggatttggaaacagataatcatgtcagtaaaccagtggaccagtgattctcaatagggagaataggatttagccctgagggaacatttggcaatgtctgaaggcattattggatatcacagtgatatcacaatgatatggtttggctgtgtcccctctgagaagagggctaccatcttccagttaaattggactttaactagaagtccaattaaacctctttttgttcctagtttcaggtatgtctttattggcagcatgaaaatgaactaatatggtaaattggtaccagtagggtggggcattgcygaaaagawaccccaaaatgtgaaagcgactttggaactgggtaacaggcagagaggttggaacagtttggagggctcagaagaagataggaaaatgtggaagagtttggaamctcctagagacttgttgaatggctttgacaaacatgctgatagtgatatgaacaataaggttcaggctgaggtggtctcagatggagatgaggaacttgttaggaactgaagcaaaagtgactctttttatgttttaccaaagagactagcagcattttgctcctgtcctagagatttgtggaattttgaacttgagagagatgatttagtgtatctggtgaagaaatttttaagcagcaaagcattcaaaaggtgacttgggtgctgttaaaagcattccattttaaaagggaaacagagcacaaaagttcagaaaatttgcagcctgaagatgcagtagaaaacaaaaacccatttttgaagagaaattcaagtcagctgcagaaatttgcatatgtagcaagaagcctaacgttaatccccaaggccatggggaaaatgtctccaggccatgtcacagaccttcacagcagcccctcccattacaggcccagaagcccaggaggaaaaagtggttttgtgggccgggcccagggtccctgtgctgtgtgcagcctagggacttggtgccctgtgtcccagctgctccagtcatggctgaaaggggccaacatagagcttgggctgtagcttcagagggtggaagcctcaagcctggcagcttctgtgtggtgttaagcctgtgggtgtgcagaagtcaagagctgaggtttcggaacctccgcctagatttcagaagatgtattgaaatgcctggatgcccaggccaaagtttgcttcaggggtggagccctcatggagaacctctgctagggcagtgctgaagagaaatgtggggtcagagcccccacacagaatccctactgaggcactgcctaggggagctgtgagaagagggctgccatcctccagaccccagaagggtagatccactgacaggttgcaccgtgagcctggaaaagccacagacactcaaagccaacccatgaaaacagccaggagggaggctgtaccctgcaaagccacaggggtggggctgcccaagaccataggaacccacctcttgcattagtgtgacctggatgtgagacatagagtcaaaggagatcattttggagctttaaaatttgactgcccaactggattttggacttgcatgggccctgtaacccctttgttttggccaatttctcccatttggaacaggagtatttacccaatacctgtacccacattgtatctaggaagtaactaacttgcttttgattttacaggctcataggtggaaggaacttgccttgtctcaggtgagactttggactgtggactttttggttaatgctgaaataagactttgggggattgttaggaaggcatggttggttttgaaatgtgaggacatgagatttggaggggccggggtggaatgatagggtttggctgtgtccccacccaaacctcartttgaatcgtatctcccagaattcccacatgttgtgggagggacccaggggtaggtaattgaatcatggggaccgatctttcccaggctattcccatgatagtgaataagtctcacgagatctgatgggtttatcaggggtttctgcttttgcttcttcctcatttttctcttgcctctgccacgtaagaagtacctttcacctcctgccatgattatgaggcctccccagccttgtggaactgtaagtccaattaaacctctttctgttcccagtttctggtatgtctttatcatcagcatgaaaatgaactaatacatacaacttgagcaggtggttgggttgtgctattggcatctaactggcctagtccaagaatgctccaaaatatcctacaatgcacagggcagtccccaacaacaaagaatgatccagcccaaaatgtcaacagtgctaagattgagaaaccctgtagtaatctaacaaaatattacttattcagtaattatgatctcatttctcatgtcatacattcttggtgaatagaattgcagcacctaacttcaaagatttatcaatgaaaagaaccagaatatgagcctgttctgcatacctgccatgaatacatttaaagcatatacagagttcagcagtatcagagaaacaaaatgtcaaaaacattgtctaatcatttttttgtttgtttgtttgttttgagacagagtctctctctgtcacccaggctggagtgcagtggcgcaatctcggctcactgcaacctctgcctcccaggttcaagcgattctcctgcctcagcctcctgagtagctgggattatgggcgcccaccaccatgcccrgctaattttcatatttttagtagatatggggtatcaccatgttggctaggctggtctcaaactcctgacctcaggtgatccacccacctcggcctcccaaagtgytgggattacaggcgtgagccacaacgcctggcctgactcatattttgtttaatttccaaaatacatgtaagctgttgatatgcataaatcattaacaattcatttcataaatgcataaaagagtaaagtcactaacagttgctatccatctgtctcgagagtggtttctyagcctcactaaaacctttccttcattgaacatcatatccctcactgtaactagggagaatgtatgaagtccctctttcacatcaggagatctgagctacacacctgaccctgtgtggccagaatggacaatattctggatcatcctggtatcatttatgatgctcctacactgaaggattgatttttgtgaatatttattagaaaaaaaatgctaagaggaaatacgagcaaacaaatagtttcaaaaatgggtataatgcaggagtgagcaagtggagaaggaagaagactgggagcacaaagaragggagaggcatttttttaatcctttttttaatgcttgtgcaagagatgttgggggtaattgcttcarctgtgttcttcacactgcctctgaagccctgccatggccaacaatttgtgacttggtccgtatttctcttgatcaacctgtcactctgtcagttaaaatttgccatcaaatacaacttttaccaactgctacccttatgcccattggacttacaccagctatacttcccaacattttacactctgaactaaattgtgtgtgaaaattaccttttattgactttagtgagtgccttatacaaacaactgagggctgatttcaactgcccactgccaaaatagccctctgtcccatctgttggatgcacataccattaagacttttattagcctcagaaatagagaactcattttatggtgttagctaaaaaacctgcaaaagtccttgaaatgcagcactactagtccctggtaaccactgtgagcaaatgatgttaaaaaaaccaggttggcatcaatattaaaagataaaaccgcctccaaacgagagcaccaaaacgtaattttatgtctgtaaattcatactttacattggactactcaaggaaaatatacctattgcccttccaagaaatgaagagttttaaaaatacaggtgttgaaaagaataagaaaatgtcttattctatttatactgatttggtaagaaaaatgacacaaaatttcagttagaaaaaaataagtttgagagatctgttgtacatcatgatgattacagttaataacaatatattgaatatttgaaaattgttaagaatacatttttaatgttttcatcaccaaaaaaaagactagtatgtgaggtaatgcctgtgttaaacatcttagccattccacaatgtacatactatatcaaaacaagtaatacaccataaatatatttaatttttacttgtaaagttatttctaatttacaaataaaaattacataaaagaaataaagggaaatttcctcagaagcactaagaaaatataaattcttaatgaaaccactggggaataaagacatggcataacagttaccatcagaagaaatcaagaactttcttagaaaagtagtaagaggtttaaccattaggggcccagggagaagtaatgatcttttaccagaagaagagaataaaatcatggaagcctaatatggctttttacagttctgcttacaattacgcattaaacaatttaccccttgcagatgagttcctaaagcctgctgagatgttgcactcggagaaaatagtacatgctgttttttcttctgttgtggtttatttttattaaaacaaaaaacttacaacaactaaaaaaaaaattcacttttgctgaattttactctttccaagaagaccaacagcttggatgaacatttgtccaatgtttgtagtaaatctgaccataaaagacaatggcttagacattcatgcccagtcaatgtcctatgggctggaattcataaaataaaggcagcagatggcatacctaaatttaatttgctatttgatttatccttgtgttaccactctgaaatgcagataccgaatgtttatctaataacgctgttagaaaacacaagaccatgcttcaagcaagtttatcatggaatctgatgctagaccatcagtcctgagaatgaaaactgtagcccatccacagaggcactctcctytgactaagtaggacctgtcaacagccaatactccatggatcagggaaagcatttcatgtggtttagaatcactcttctggctgtaatgcaataccggagaccatcaagaggaagaatacgcctttgattcttttattcccatttgaaattcgaggggatatttttgtgtgcttgggtttatctcctattgttcactgagaaaactgatgctttgtttaattgttgtgatcacttttccttgtgagttctcttgaacgttatgctactgtctgattgtcygttggcatgtatacatcacaccaatattctggaacaccacatactaaaatgaaaactttttgagtctgtgttactgcgctggcagctgtcaaaataattcttgctgacatcatgttgaacagacttgcctccgagtcagatcaacgttggggagcatcatgcagtgcggcaaaattaggtcattaattgtgaagccagcacaacccttcttgcatttggagatcaaaattctgacataaaagaaaattgaacaatcaaaaactctggaatcatcttttaaatctcaaaacaagttgtcaatttagccatttaattctcagagttctttggaaggatttttattacataaaagtatggtaatataatacctagttttccaaaggaactatgaaatatcccaacatgaaaatatttcactcttaaagggtaaaaatccatgtctaacatccattacactgatcatatttctgagcactcaaatgccaactttttcaaatgactccaggagaacttattgtcaacctgtttctctcaagtatcaccatgctgattataggtttgcttataaaattaccttttggtaatatagtaggaagaaactagagtctcaatgattaagaatcggaaacagaaaaaaaaaaaaagaaagaaagaaaccaatctggtggttagaactggattgccaaatgacagcatcaccggcattatctgtgtgcctggggcttgcccttccaaactaatttttaaaataaattgaaattgaactggagccatgcaaagtagaacaaagacctttttgaagattcatatcaggtaaacagtaaacaggttgtcagaaaatattgacatttgaattgactttatgcttttatttcctacccaatatggcattttatattattaacatttatttattaaaaccctgccctttcctcaaaaggttttaaagagctttaatgttctgttacagtattttaagaataaaaatagtttcctcttaccttataaactggaataaaacaaatatttctcatatttgaattaaaagtagaaatgtacctcttcttataagtttgtttccaagaaatattaatatgaaaatataacatgtaatttatttaataattcaaaatacctaggaatttttttctaaaatttattacctgttacatgaatcaaagatcagactcttaagatggcctatgagaattaacaaagataaatgtaggaacaaaaacaggttgatttatttggcagcattccagtttacctcccgactcttctgtcctgattaattgccctcagcgaggagctggagcctagttatgctgttttcttaattcctgttgatggagtgttgatataagaatagaaagagaaccaactgccttttaactagtccattcttcatgcactaatcaatcataacttgtccattttaattatctcccaaattccaaatagagatacgcttggagtttccaaatatttgcatgattaaatatgttttccttatttcaataaggaacctcaaattgatgactcaggtggtaagatttatggaatgaagcaattgtgtttatctcccagctttcaaaatactggtctgcaattcagtaacaaacaacattcccaccagagatgtgcagactatgcccattaatgatgatgatcatgtttggaaataaaaataaaaccatataccaacattagtagatgccaaaaaggaaacccagccaagaaaatgtttactagcctctcttttcataaccataaaaagacagtttattcaaatattaagtataattatacaaaactaactggccataggtgcacctgtacaacattttcgggttgtttttgccctcctcggagaaataccagcagatcaggtcatcaatcagttatacccatcaagttacagggtaattctggctgcctcacaaacaactggacagttcagttaagaaaggtgcataaaaggagaatttttactgaactgactgaatgaatcagttgttttgattggatgcaaacaaacaaaagctaactcttttctgaaataactccccatttaggagcttgcctcttctataatataaaatcctattgcctttttaacatcagaattgaagcaacaaagttctatttkcatagtaagtggtctaggaattgatgacagaatatgatgatgaaaagaaggaggaggaggaaataatgacaataataatatgagaggaaaaataatttttcctctttcaattgggatggatccctgtaacaaaagatagattaacaagagaaaaacaagcagaagtttattaacatgtatacgtcatgtatacatgggagctacccaaagcaaaatgagcaaatatcaagaatatacatctaagaaggtagagtaaataccatcatccactgaaacagagagaggtttactatgcaggtttcagtcaatattctctattaataatacttcctagtgatttagagtcatccttctcttcctggaacaaagcggagatactcatacaaaaggaacattttttaaaagatgtaacttttttacaaatggtaacttctactctatttttaaagtttctcctgtgtctctcgtttcccgtaataatcaactcaaaataatccttaagcttaagaggcatattttgaggtggcatattttgttcttctaaagtcatattttggagtagcattttctgaacttcatcaatgataatgataaaatgcaggatttcttttttcaattctagattctgagtgtacatgtgcaggtttgttacacaggtgtagagcatgatgctgaggtttgggcttctgatgatcttgtcactcaagtagtgaacatagtacccaataggtaacttttcaaccgttgtccccctctacctttccctttttggagtcctcagtgtttattgttcccatctttgtgcccatgtgtacccaatgtttagctcccacttgtaagtgccaacatgcagtatttggctttctgttactgcattaattcacttagaataatgacctacagttgcaaagaaatttgctgcaaaagacataatttcattcttttttatggctgtgtagtattgcgtggtgtgtatatacaacattttctttatccaatccaccactgatggacacttgggttgagctcatgattttgctattctgaatagtgctgcaacacacatacaaatgcaggtgtctttcattagaatgatttatttccctttgggtatatccccagtaaggggattgctgggtcaaatggtagttctatttttagttcttcaggaaatctccaaactgctttccacaagggctgaattagtttgtattcccaccaacagtgtataagcatccctttttctctacaacatccccaacatctgtcatttcttgactttttaacagtagtcattcagacttgtgtgagatggtatcttattgtgattttaatttgcaaatgatgcaggatttctgaaagaataattttcagataaaaatgttcctagttgtttatagacaaattaaatttaacagagtttaattgagcaaagaacaattcataaatcgggcagtctcctgagccagagtaggctcagagactccagcgcagccacatggtagatttatggacagaaaaagaaaagtggcatatagaaaatggaggtgaggtacagaaacagccagactggttacagctcagcatttaccctatttgaacatggtttgaacagttagccccctttgattggccaaaactcagttattggcacaagtgtaggttacatctgtatacaactctgtttagtttgtacttcagtatrtacagggaaacctgtaggccaaacttaaaatatgtaagtagtcagctttaggcttaacttgatttagcatactcaatatctaacagacacaaatacatgtacaaagtacttgaacttctccaggtaattagaactgtttcctctgacttaacaggaattactcattctctgatttctctctcttccctggtatcatctggccattttaacagagaggaagacagccttctgtttactccttactcatcagttctaggtagcactcaggttgagagaatggtttttccagaatcatcgtttggcccagttgttaaactcacacctcaaragaaaaaaaaagcgtcaagagaactactcctttagtttttgtgcctgttcgcctgcctggcactataggtctcaaagaacacaattaagcccttttcatcactgaataccccataacacttagctcaagaacgttaacattgaaatcacaataaattcttcggttttgaacaaaagagaccatgaatccacagggccagatgttttaagtttacgtaattgtaattatgtactctgtctaaagatcccaaaatgtattctcaaaataactggtctgaattgatgcttttgaagaaaatattccacagtcaaatgcactgaaatcacaggagtggtcgtaagtcttctaattttagctggacttggttatcccaaccctctactgtgagacatgcttgggaaatagctgtatggcagagtccccttttgatgatttgtaatgcatattaaagactccaagaaaccttacactaaaggagcttgtttgttttagtttaaagcaaacatatttgacctcagaacccttttctacttaatattatggaatgcttggggaaatccttttccagaaattgagacatcacatgggataaattatcacaccatggacagtttggagagtctccaaaatctcacactgttacatgaaacacaaacagacacaaaggtgccactttccttattaatcaccaaagctttaagtaaaaaagaaatttaaaacatgtacgtgagacggaaagcagaaatttcaaaatctacggaaaaattattgtgtgcctgtagaggccaaggaaaaactttccctttgccctccgaagtttcgctgaaaaatcaactcacaaaatgcagattacctggagaaaagataaacaaatgtattaatgtgcacacagggaagaactacagactgattactctccaccttccaatggggttcagaaggtcaaatgccatctcgaggttacagaaagaatgagggcttggactatgacaaaacaggttatgggaggggaagaagaagaggcaaggctagcaaaagtggccttgttatgcagatgaaacctcacaggtagcagccctcagagggaagagatagtaaatgtttttttcagacctttaaaggggtcagactcttcaattaatctttcctagatctagatagatgagagaaggaagtcctcatagaaaaactggctgcatcaatgtggattctccacagatgcaaacctcccccatgaaagactttgcagggctacttctgtttgcaggccttctgaacagacaactcaaaatatgtcaaagaagtatatttgggggaaagatattttgatttccctcacacctaaaaaaaaaaatttaattactaactgaaaatcttaattgccctccacttggaaccacagtgtatggattgagataaactytccagtgtgtttacagttccaattacagcacaccacaagccatccacaaataattatgtcctcctttagtggatattggtcactctttttagctgtccagatctgaaccccacaccctaagactggggaaggctctagctaaggagccataggaggcagacacttcctaccatcaaagttaaagtcagactctcactttcccagcctcctagtagcaagggcactaacctatgactttggaagctggtgacaaatggaagtgaggattgctcaagatctcttctggaaagggtggcaacagcagcagcagtagtagctgcattaagtattttgtatggagtttatgccagagttctagggatgatcccgttaccctggcctggcaaaccagcacatcccaccatcctgaccacaagaactggtttcagagagagaggcacatgtctcaagttggtccactgagaatcaatctaaatatttggtttagaatttgggggaaaagaccgggcgcggtggctcacgcctgtaatcccagcactttgggaggccgaggcaggcggatcacaaagtcaggagctcgagaccatcctggctaacacagtgaaaccccatctctactaaaactacaaaaaaaaaaaaaaaaaaagtagccgggtgtggtggcaggcgcctgtagtccccgctactcgggaggctgaggcaagaaaatggcatgaacccaggaggtggagcttgcagtaagcagagattgtgccactgcactccagcctgggcagcagagcaagacttggtctcaaaaaaaaaaaaaaaaaaagtggaatttgggggaaaaagaaattatcttttcaatagggttaccaatccactaggatgcaaaactgtacttattagtggccatcctgtaactacatgacacaggtgaccaaaaatagaggcctaggcttaacaaacattgtaactgcccaatgggttcattttgctcactgcccagatagagtcaatttatcaagacagaggaattgcaatagagaaagagtttaattcacccagagctggctgaatgggagaccagagttttactattactcaaatcaatctccctgaaaatttggagactggatgttttttttaaggataatttgttgggtaggggggtcaggaagcagagagtgctgattggtcgggtcagagatgaaatcatagggagtcaaaactattttcctatgctgaatcaattcctggagagggccacagaatcagatgagccagtttattgatctgggtggcactagctgatccattgattacacggtctgaaaaatatcttaagcaacaatcttaggttttacaatagtcatattatccccagtagcaattgaagtggtttagaatcttgtggcctctagctgtttggttcctaagccataatttctaatcttgtgacaaatttgttagtcctacaaaggcagtctggtccccaggcaaggagggggtttatttcgggaaagggatattatcatatttgtttcaaatttcaattataaactaaagttaattcaccccacactcaggaatcaggaataaacaagaacagcttggaggtcagatgcaaaatggagttggttaggtcagattttttttcactgtcataattttcttgctggtataatttttgcaaaggcagtttcaatatcaccaactaaacctgtgatgtcaacactattgctaaacgttktagttatattaataacaagttctgtcatttagctagtttacttttagttttggttgcaaacaaggggaaattagggatrggaagtgaagaaagaacccaaattggggttgatggatttcaaaagttgaagctagaaagacattaacaaaagccaaatccaaaaggcaaggtcagtggggaggaaaatacacaaagcagaacagtgagcaatgaggttagaatctggaagaatcagcaacagaataaaatgtggtgtacaaagcagattacattaggataatttagaacaaatccatgaataataagcaaatgttgtgatgtatcatttttgtggtacccaaagcataatataaaaaagacatcccatgtgtccatgaccacaccaccctgaatgcacccagtcaactgatctcgggaaaaaacattttatatgtacaccactcaatcattaattctgaaaatacagaagattctaagacactaaaaggaaactgtcaattctaagaatatacacatgggtcagagtaagatgattttatgacttcagataagtttataatttttatttatgtaaattttcataaccaaaagggaattctggaaggtatgtttgctattaacctaagggaagaataaaatttgaccttcctaggaaagcaatatttgtcttaatatttttctccctataatgttactattgaacaatgtcaaaataatttgactttcttgtgaaaatgtcatattgtcattatttctatatccttccactcaacaaagtaccttgtgcttgctaaaaaacaaattaaaatgaatgagacagtttgatatctcaaggagcttgtaatctcagggaaaggagaaggcttcacaaatattcaactagaatacaaaaataaataaacratatgaagaaataaaagcaaaacactatgagactatatagaaaaggaaataattaacacccacaaaagaagcagacttgtcaaagtcaatgaattgcctaaattttcaactttttaatcagttgtgttgatagagtatcaatatatagaccatttatatcctttatatccagaaggttatgtaagtgggctttaatttgtttaataaaaacattcagaacatcaacaaaacagctgtaactttttttttttttttgcaattacagtgtggtattcagttaactaaacaacaattattttttataaactgcatcagagacaactgaagatgaaaaaactaccatcctcatatacaactaatttgggctgtgcactgacaagaacctactttaaatttccacacccatttacaaccccagtactgtagcaggcaacgttagtgtcttattgaaaataccaccaggacaggacaatcagaagatacatttagtagtgtgttaaccataccgaaaaagatagtatacagtttaaaaacttatcttaggcagccttacctttcaattttttctttaaaaggagtgagggtttacaggggatttaaatgctttatagactaggggaacaacttgtactagagccaacttatttatcattatcttcttcatcttcaatttttcatctttctcctcctcatctttttcatcttcttcatcttcctcttccttctttttcttgcttttttcagacttaatgacccctttttttgctacatcaggctttccttagcccagagtgcaacaatatccttttcatattattctttcagcttcacggccttcttttcgtaagtctgcttgtcatctgcagcagtgttatttcctatctctccgagtttctttacaacatcactgatggataggccgagatgttctgctttgatttgggggcaaaatcaggaaaaaggctgaaagtggcctcttgggcacattaggatccttgaactttttttccccctcttaggaaggatataggttttcatttccttttcacaacaggccctgtctgccgttgccatgtattgaaattttcctttctctttagcagagagggtcttccacttctctgagtgcttcttagamaactctgagaaatcgactgaagcatctgtgtgctcctcctggcaaatttgcacaaagaatgcatatgatgacattttgtctcttggcttctgaggttttcctttgcctatgtttggttatttttcctcagtgaggcatggagtcatctagtgcctgaccagctctcacttgttctagcactttctctatggatctcaaattatggtaatggctctttaacttttaaaaaaaatttgttgtacgcagattattgcctcaggtgaagtggaacagtcaatactgaaacttaaggaaaaagttgcctgtctgtctaaggcagacattgatggttaactattgttaacaatattractattgcacagaatctaccatggcctgcaaggaggaagtctaaggtaattctaccatccatgacaaccctggccagtgagttggggccgcccttaatgcctcccagggctaacgtggtgtttagtgcattttgtgtgtgtgtatgacttaggatccaatctaggatgtctctttagtcttctttaatctggactagttcttcagcctttatccttcataatattgacatttctagagggtaaatgtcagtttttgtgaaggatgtccctcattttggtttgtctccttgtttctcatgagaaacaaattatcttaaaggttaaagagccattaccatacattgagatccatagagaaagtgctagaacatgtgagaaaagccttttcaacaaataatagtggatctactgaatatccatattttaaaaatgaatgattcatatcttacactaaagactcatatcttacataaagaccccaaactacaaatctcttataagaaaaaaaataagtgaatgtgtttgagaccttgagataggaaaaattcctttgaaaaaatgtaaagacactaattataaaagaaaaatgttggtaaacaaactttatcaaaattaaaaacatctgttcatcaaaacatamcattaagaaaataaaaatgcaagccacatactgggaaaaatatttggaacatatatttctaacacaggtcttgtatccatgctatataaagaacggctacaacacaagaattaaaagacaaccaatttctttaaaaaggcaaaagacttcaatagatgcttcacaaaagaagatttacaaatgatcaataaacacatgaaaagatgttcaccactactaatcatcagggaaatacaagttaaaattagaattagataccactttatactcattagaaacaccaaaattaaatactaaaaataacaaggtgttggagagaacataaagccactagatactgatggaagcttaaaatggtacaaaccactatggaaaaattgtttagcagaatcttattgtgttaaacctagatttacactattacttaacaattccactcacatgtccacccccttaaatgaaaacatatgccaagaaaagaacttgtacaaaaatatttattgcagccttattaacaataacacaaaattggaaacaatataaatatatatcaacagtaaatagctaaacaaattatgacatatccatacaatggaatatcacttattaataaaaaggaataaaccaataataccaacaaagccgagcacagtggctcatgcctgtaatcccagcactctgggaggccaaggcaggcagatcgcttgatgccaggagttcaaggccagcctggccaacacrgcgaaactgcacctctactaaaaatacaaaaattagccaagcatgatggtgcatttcagtaatcccagctactcaggagtctgaggcacaagaatcacttgaacccaggaggtagaggttgcagtgagctgagatcacacgccactgtactcccacctgagtgacagagcgagactctgtctcaaaaataatatcaatagtaataatggtaatacaaacaaaaatactgataaatctcaaaaacattatcttgaatgaaagaagccagaaacaaaggaatatatattgtataatctcatttacattaagtttaatacaggcaaaattaatgtataaagccagaaatcagagtaacatttgcctgagaggagtacagaagtagactggaaaagtgctcaagggaacttgttagggtgatgaaaatgtgctatatcttgtttgggatgtttattacatgggtttacacatttgtcaaaactcatcaaactttacactaaaatctgtagaacttattgtatgtaattctcaattcaaaacagaaaaaaatacaaaatagattttatttaaatctaatttactctcagactattcaagttctgatccaaattaaataagttgaatttgagagtatttactctatttccacaggtgttgagagagataccctctcagactttacacagctaccaaggcaacaatgccaggaaaactattaatcaagatatgatagttcctgtttgcaatcaggagaagaaagcaaagaacactcaggattataaaagyagatgagacctacccactagacctggtcagacacaatgttggcrctcttggttctggtgactgtggccctggcatctgctcatcatggtggtgagcactttgaagggtaagtaagccatctttarggagcaagtccttcttccttgctagcccccaaatttggacacattactcatttccaattctctgtgcttctattatctcattattcagcgagaaggtgttccgtgttaacgttgaagatgaaaatcacattaacataatccgcgagttggccagcacgacccaggtaagtaacaattttgatttacttcacatctaatttaaaatcttagatcgcactgtgattccgacaatggaaaaaaaaacatgaaatattaactatagcattttggtagcaagaaataaaaacttggaaarcatttrgtgccataatgtcttcttyttctgcctaaattagattgccataagccctgtagtattataaatccatrgtaacttttaaaagagctgacagtgtgacaactggatgagttgcaactgtcacgaaggtcacagaacatctaatgtacagtcactttccttctaaggcaaaagagaaaaatgatcaacttggatattactgaaaaactgggcttttgtccaacttcaaattcatttccacatcccatgtatcatctgtcctctttgattttctttcattccaaatcaaacagcttgggttttcatgaccttgattcaggtccccttaatgatatgacgtgagggggaaaaagagggtaaaaagccatgagtgattttcatacttttcttttgctttcaaaaaactgacatctctgtgctaattttttaatccactatatatgaggtgagaactgacattttaaactgcgtatacaatgtggcaggaagctattgctgaccacaaatacagtagttccacttgggccaatgccgtttcttcataaatatataaactaaaataatctgctagcttatacacacacacacacatatacatacataaacatatatagtcattttgtagcttttaaggcatagaggaaggaagaagaaggtggagagtgtcataatcacaggctcagaagttcagaattgaaagaaatataaactcatctattccagcaatccactcaaatctggaatttccttctgggaaacagcatccccagttactactcctggtaaaacctgtttgagtacttccaggaatagtttgtatactactttttggaatagcccacttgccttacaaatcattccaactgttttcttccttattctgagctgaaagcttccttctctaactttgacctgttgggcttagctgagtcaaatatcatgttacctctaagatttatctttttcaagctttccgtaatttttcttagcactggtatacagactcttgatcattctgctcagatctagatacagctcagtctttctgtctatatttctttttttaaatgtagttaccagaattgactatggacctccaggtgtgttctgattaatgtatactacagggccattgcttgccttcatttgtaaagcagacatttattaatggtgcctaagattctttttagcatcttaaacagtcatagaacactatgagcttatattaacctgtgttcagtcaaaaccattaggtaattttttttcctcacatgaatcaccctcaaacaggatgtccctccttttgtgcttacctaattgactttyttcacctaaatgtaggattttagatttacacttttaagatttatcttgacagcctgttttcagcatgttgagatcttttagaaaactaattcagtcatccagggcaataaytcttcccctaactttgtctctccaacaagtttgataatcatgtctttttgacttttatccttgtcactgataaaagaaaacattaaataggtcaggagtcacagaattagaggccttctttacgtttcactcattcagtacatatttatcatgaatctccaatgtgccagacatagtgttaagcactgaagagattcattaacctattctgcttgcataagtttactcaactacccaagctaggggggtgttacctaggggtaactctgcctggtgctttctggtttataaagaaagatatcaatgcagagacttcatcaaatgctttactaagatcaagattcaacattctaccaggttagtgctctcatccaaaactaaggtgaatttaattgggcctgacttattcttgctttaaaccatactggctcccagagaccacagcttcctttcctcagcattcacaatccatctgcttccagttcactctgcagctttgccagaatccatgccaggccccagcagctcctgcttctgggcttcacctgttttcgtgtttataaaatctaaaacttgccccctctactcrccagtgagcccttcgagctctgattcttccaagattgctgagaaagttctgcaatcacatctgcagtatttttttagttatctaaaattcagcatttcatagtggtcaagagcagagagtctggacttagactgcctgggttcaattcctagcctttctacttgttagtcaaacttggacacctctctgggtctcaacttcctcatttgtaaaatgaagatgataatactatttacataggagattgttgtgagaggtaaatgaattaatataggtaaagcaattagaaagaacttaaatagtaagaattatatgtgtttgctgttactactatcattaggtctgggattttgaatacaatttatatggctagtataatcaatcacctatgtcctcatctaccttgggcctcaatgttctctttccaaagaaggtatttctgtttaaatcataacatgaaaaaatctttacttatccttgtggtaatttcatctctcagtagtaatagaataaacaaggaatagtgtaactctctcttggaaaagacagaagccaaaaaacagttaaatagggcttctttctttcctctggctgcaaacatcatgctttagctccaagcagtgggacacatatttcttctttattcttttattttcaacatgattgaaatgagattttcattctccttagcagttacgggaacagcatattctgggctgtagccttcctgataagatcattacaagggcatccagtctttgtattcatccttggccatgtgtccttcctctcagcttttgaacatgtccttttaaatgctgaatatattgggcagatccgtgaccacactgtactccagcagcccttcttttgtcatctataattgaatattaaggattttattttatctcctcacaatcagggttgtgcttgttcctttattgaaggcattcaccataaaacctattcacttttctctggactgtcttgaagtctgtgtttctcaaatttaaggtgcatttttctctatgcctggagtaacatggttactgtcttccaatgttcttatcattcctactgtaccagtaagttcctcactgctgtctggaattgggccttgagtagaagttgttttcttttccaacaaaaaaggaaaatttcaccaagataaatgaaaagtctatcagatgtttgacttacagtcaaatgcaatgtgaagaaacaaattcatgcaaatttttgaagaaaaaaagatccccaacaccaatatttatttttttattggccaatcttattcctggaaaaatttcaggttggcatgctactttatcttgcttttaggctagttttctgagatattttaggaaggattctttagttgttaggcagccggctgattaaattgatattcttataatgctatcatttaaagatatctcttgatcatccaataagtgttctatayggttctttgtcacatttataattttataacttcagttttctaacttcataatgtatagtttaattccctacatctacatcctatatttcactccatgtttatatttcagacatacatctcattcacaaggtcctggtaatttctgaaatttatatttatcaccttatgttattactttgactttattacctatattcatatttggtgcattggtaaacagctgtgaggctatagcattgctcctgatttccagccatgtttctcctaggaagtatcagagactaactccagtatagtgggtctgtgtcacacatgcaacactccagagtgttgtatgtatgttgaraggtttgctaactggttttctccatgtcaaactgaaatttttaagcaacctcaggttagttctgtaagtttctgtcaaacatatttatgagatttatttgccccatcttaaagaatccataattcttgcactgaaatcttaaaagtaacactttctctaaatatatagactcttctaatatttggcagagctaggaccaatgggtaagagctgaggaggatacagatgacaattttcagtttaatattagaaagaaaaccatttataagcaattaagctgttctgaagtggcactagatatacacaaggttctgctagaaccaccaccaagaacatcatgcaagcatttratgctttgagtggaaagctagcatcttaatacaggctcttccaaagcagaccctgagacaaagattcaagggaaagaattttatctgggaagtgcagggagccctggtgaagaagtggggagtgctaaatagaagtaaaggcagccaacaaaggaaacagtgttaagccagctaccacagaggacaactggcggtaaacccacagggaaactctaggaatgtgtgcaaacaacacacttcagaattatcccacctgagaggtgaaggagttggagtaattcatcattcgcttttcaggattcttggttgaaccacaaagaataatttccttggtacygcctgtctacctggagctgataacttggcttttcccagttctacaggaaagagccctcaggtacagagaggcagatcttagcaaggggagtacactgagcacactaaaaggtcccagcaattatgtgccagcgggacactgtctggtcagctacagatacatggaggactttatgtgctttgccaattctcaaccttgtcgtctataataaagacatatctctctctcccaccacaccatagaatgacaggtgtttattaggaacacaaattcagagctaagtttcaaaaatatgctttctcttrtaatgtgcttatcttcaattgcccttctctccacaatgttggctaactagaagttgtcaccagccccttgctttctctgtccttaycttagcatgtctttatacttcctcacttcatttaacctctcatccttgactcactaggtcaccttctacagccaatccttatccaaacattgatactctatcctttcaatccctttgtgacaacctcactcatgcttttttcttctggaacaccagtatccctgcctcccattgccctgacattccttatgggcctgattcgtgactcaccacctctagatttctacagtggtttgaagcttaccaggacagaatataggttactgggagccccacaagtgtatctgaaactgagatgccttacagtattaccttgtcagtttctgctgcataacctctaagtctgcccaaactcccttccaagtttccaatcagtggtcctaaatatcaccatcagacatatctctagccccaaagcagtgcgcaaacatccgaacagagattggctgagacacagggagaaagaaagacccaatgtcaggctgacctcaracttctaggcttccactcggcacaagcaaggaagagaataacagacacctacaagacacagtatgttttagttaatatttttccactgaaaggtgttacttaaaaccacacatccacagattaaaaaaaaaaaaacagctatttggggcttcatcttctctaatgtctcccccataaagacaaaggccatgtttgatttgcccactaatgtattcctagtctcagacacagagcctagcatatcgtaggttctcacaatagttgatgagtaactgaataaatgaaaatgtcagtacatgactggatccccaagagcaatttgtctccrgccacagtgtcaatatacccattgtgaaaagatgccatttttcttcctgatgtatccaccacaggtcagggatcctcctggttccacatattactgtgacttccaagataaactcataaaataagtccattaaaaagtaaaacagcttcatatttctccattaaattttgtaattctagttaattcatcattcatctggcacatagatccattaccacatagcatctattccaacaagttagtgatccagaaaatcaataaatagaaaagaacagttacagaatacaaccaactagcattatgggaaatgattctatgttttttcatgttcattgataatcaatcaaggttatgtatatatttgttaacacttttatcaacatctaactgcttggttccaacccttgttcactcaaaggaaatattttcaacagatttcatggatgatttgattytgaaaataactcaattcagtagagcaataatgtgctcgcagattatccttcatccattgaattataggtatccaatatatcttgtcctttattcagattgacttctggaagccagattctgtcacacaaatcaaacctcacagtacagttgacttccgtgttaaagcagaagatactgtcactgtggagaatgttctaaagcagaatgaactacaatacaagtaagtttatgttttataaatattaaaattctctcccatgcatgctttcatctgagcctttgaataactctgggaaggaagaaatgagaccaagaccaatgccttccccaggaccccacaaataggtaacggcagagctggccctggattccaagtcttaagacttcagttctgatggattttgtgtttagttattgctctaattaaaatggtttttattcttgaccccaagtcttctgccagatatctgacttggtccattttacaagcaatgtatagagtacaggcctagccaatggatactctattctcagctagacatagttttaaccccaaatcttatcagctcttctttccaggggatcagcgagacctattgtgagttatgagggctatttgtgctttttttagcagaaggataagtctagagtcagtctgaatggcccttctgtccttttttctctaaagtcccaccactatctctaatggtaggagaaggcatggagagaaagacgcaaagaaaggactagagtagttggctaagctgatcctgtctccctcactgaataccactttcgttcatctaggtctttcatgacaagaatgtcttcctaagtaaaggcaattgtccatttgctgatccaacaaatcaatattgaatgtctacatgtatcaagttccaataaggacagatatgacctcacatcctttaggggaaaacagactttaaataaggaattgcagtrgtatttaacagatggaaagaagagtaaagtgctggagttcagaagaatagagcaagtctaggggtcagggagggctgtcctaggaaatgattcttcagctgagaactgaaagatgagtaggagttgattagccagaaaaagacaaggaaaaaccatactttaggaagagaacagaccatatgctgaggcttagaagtgggagagaccatgctaacccaggacacttgcataagagggaaggaggaaataaagtctctagtacaaagcagaggtcctcctccagggggtagattagggaggaacaaagacaaagtcttgggctccrgtcctgaacattcaaatgtttatccggcaatcccccatcacaagctcaagtcttcattatgttttggaagaatgtagcckatataattttaacagaaatttctcttgtttttcacgtcttaaaaatgtaaaagaatagtatctgtgccagtgaagatgtcagaattgtcacctataaaatctgtacctccatcaggagaagtgggtagcatagtgcaacaagtaaaggctttgggaaaaaaacagattagattctaatcctggctttgcacattgctgtgtgattgtgggtaatttgctcaacctttctgagcttcagctttcttatccataaaatgaagatacaatgcctctctcaaagggctgttgtaaaaataaaaatatatatataaataaattacaactggtattatattgctgagaatgctgctatggtttactgttgtacaaagaaggagattatacgtttttttttttaagagtcaacagtaactgctatgtttaaccccattatcatgcctcacaaagcttagctatgtgctttctgcctgaaggaagtgtcaaaatgtgaccttaagaattgactgtctttttaaaacaaagatataacctggtaagtctcaaaatgtgattaagattcatgtctataacattttgctctttttattatactgaaaaggacagctaaaattctagtccttggagccttcagtagcattcaaaaagatgagtttctttgtaattctttaagaaaaacaaagatcagcgaccatagattaaccctagctacctgaatgatgtcttaattctacccttatcacaaaacagtaaaatggtttctgatagaatttcaayctctatttataatcagatagaaagttcactttcttttttagtggtgaactttttrggaattgtgtatgaatgttgtctcatctagaacataggacatcccctgagggctaagagcttgttaatttttgcttcgctgttcactgcttagcacatttgtagcatataattttctaaatattaaataataataagtccctggaaatcctggagaagcataccagcaayatccttgctggggttgcaagcagtccctgtgcatcccattattacctcatatggtaactagtatttagacgatttcctgctggcaaaaatttgcagtagtgtttgtatrtaacaagagccatccactgcacacaagttctaccaaaataacttttcagattttttcagtgtttccaaccctcttcaccaagacctgtattatttggcagctttaatcagatcctgaattatcataggaaaaaaatcaaaatgtgtgcaaaaagaaagataactgtaattttcaatgacaaagtttcactcttagtaacagaaagactaggaatcagatagtgtaaatctccaacttatggttatgaagctaagttgacagaacctttaggtggcctgccctccatggaattccttgctacagactgtagaaagattgctttgccctacttgattcagggagactgattgttgctcacacgtatatcagcatttttctgcatatttcagaggcgtacaggaaggtgtcccaggacagcaataggcacatagcaatgttcttcaataacagtgggcgcaaagtccaggtactgatcaaatattctattttccagaaatctgaaagggggataaaactgagtcatgtctttctttacttctcagacattgtgttccttrcttttttgggagtcccagttatctaatttgcttgtgtgttagaaaaaaaaaaaaaaaaaggagaagttggatggcactataaaacgagcatataaaagtataaaatactatacatgcttctctattttggagctgtgaggcattgttttaatcttctagaatggaagctcattatttagtaataatattttgtaatatagctaaagtagtactttgtcctaaatctaataaaatcaaataaccacagggctgggaaggatcatttgaggtcagtcccccgccttcaagcagaagtcagcaacacatttcaacctcactctgatgctcttttgcaagttactagaggatatttttactcttgggtgtcatcttcaatttaactaactggttttttatgcttctttgtcctggatattgatgaaaatgtttaatatttaaagtagtaataactctaacagaatgtctcttagtaccaaacaaaatgccagcccccacacagtcactgatcctcctaaataatttaaactcggccaggcgaggtggctcacacctataatcccagcaccttgggaggcctaggcaggtggatcacgaggtcaggagatcgagaccatcctagctaacacggtcaaaccccgtctctactaaaaatacaaaaaattagccgggcgtggtggcgggcacctatagtcccagctactcgggaggctgaggcaggagaatggcgtgaactcaggaggcggagcttgcagtgagccgagatcgcaccactgcactccagcctgggcgacagagcgagactctgtctcaaaaataaacaaattaacaaaaataataatgataatttcaactcaagggttgggtgcaggtaagaggatagcaatatgttctggaagctttgaaatgaaagaggatgtcattttctggtcctcttgggtttttttttttcgttccgagaagctcatccttattaggtaagatttgttctttcacattatgatatcgagacataattgtcctcttagcagtttctgtcggttgatttttttgtttgtttccaggtttttgtcttacttggcttgctttgttttggtttggttagtctgtttttakttttttgttatccttgaatatcattttcctgaactattttttagttttcctccacgttttcctgagttatgacagtggtaactgggaaatttttatttttttcataaacttggaagacatgtatgtaaatgactaaggcttatagattggaatcaagtcactgcattttagaattgaaaaggatgttggatatttactaatcaaatgacccccttctaaaacttatgacattaaggtccagggattagatgacttttctaaagccaatttatgagttaggcaaaactatgaccttgatcttttgattcctcattcatgattccttctacttccaccctattccttaacaattcaactgggatagtaaatataattatagtgctgactaaaatcattgttcctaactataagagacagactgatggtccccaaaaaactctatatcctaatccccagaacatgtgaatatgtcatgtttatcacaaaaaggaatttaggttatagatggaattaaggttcctaatcagctgatgttaaaatagggagattattctggattgtcctatatgtccactgtaatcatgagtctttaaagtgaaagagagagggagaagaggtcacagtgattggatgtgaggactttatcccctgttgaagccttgaaggtggagaaaaagggtatggccaaggaatgcaggcgacctctcagaactagaaagggcaaggaattagattctcccctagagcttccctgttgataactcttttttggccacacctcatttttatcccagtgagacttgtgttggaatgctaacctacagaactataaaataaaaaattcacgttgttttaagccactaagtctgtggcaactgacaagagccatagaaaactaatacactcacaaagcattggcagctgctcaatagaaaatatttctccatggaataacttttaaaatctgcattttttcctttttaaatactaccttaagatagttaagaccttaagaaagtgtttatcttttgctaggaaacagattccagttagtattaatttattacactttccaaaaacagacacaagttcgtacccaagttcaccaattgaaggagtgaccaggaggaaggttcagaggatgtccctgacatacttcatcagaatgtccttggggcagccagaggagaagcagacttttgatgtgtgtctgmaattctctgtatgtcagataaaatcatttcaaggtttaactgtggataatagaaatttctgcaaagtggcctctrtctgtaatattcactgtactgtgatcaaggatactaatgatcataaacttttctctcttccaagcatacttttcactcaaagtagaaagggaagtgaagtcacacacacatacacacacacacacacaccttcagactggcctcataatagaaactatcacctggacaattcatttctctaaatagtaggcctcaaagatttctgttaccacttttcatattaccttgctacagaactattattagattacttaacccacccaaaagacaagcaaatagaaactagttttttaaacccattcttcttttaccaagtaaatcttcagcttgttaatatttctgaatttccagacaagatatttttctcagaacctagagacaggtccaaagtgacaactcctcccatttacccaggactgagtagcttcctgaaacrcaagacttttagttctaaattcagaaaagtcctgaggaagaaagaccaaagataggttttgagtacatagtgttgtgtggaagcccaaggccctgacccaaaatgtcccaggtaccaggagcaaccattttccaagtttaaggttcacagatagtcaaatacctgaggtttgggctgtggaagatcctaccttgcttgcattctccagtatccttctyagtgacttactcactctttatggtcagtaacagaatctctctggagcagctgaaggtcatcaggaagaaccagaggacaacatgagaatttatggagagtgcaatgtgccatctactaaagcagtggctctggggttttatgtgtgttcactggagaaaaatacacttatgttcatargaacacccactttggttcgttgcagggtactgataagcaacctgagaaatgtggtggaggctcagtttgatagccgggttcgtgcaacaggacacagttatgagaagtacaacaagtgggaaacggtatgatgtgcacatgatttagacagatattactttgggaattgaaccaagaatgccacattgatctacaaatgattccatttggtagatagaggcttggactcaacaagtcgccactgagaatccagccctcatctctcgcagtgttatcggaaccacatttgagggacgcgctatttacctcctgaaggtaatcatttttaaccatgaccttgccatgtctgagggctttaaatcaatgaattctaacacatgaacatctgtttcacagacacgcttatcccaaacattgttataactctttcctgcctacatccccgagggaaccagattcccyagcttcttttatcatatgtggatttttaaatcattattttgatttattcaaaaggaaaaatgcaataaaataagagaagacctataaatttaaccacattcttgtaagcaacgtaaatgattatctaccttgatgaaattcttctttcccagctgtggtttgcaaatccatttttaaagaggttcataaacttcatgtctatcagacaacattacaaagcacatcaacaatttgtttctgtcattttctaacaccatttttgtcaygtaattctaatgaaggaaataaaaagacagggaataagtgagagagtagtaaaaattcttacaagattagcgacaatcatgattacttctaattactcatccagttgtcttggtcatgtcacctaataacagcagctgaaaataacctccacatgagtacaattaagcagggtaatcaagcatcatctgaaaatatgagcttgtcaagcttaataaaaataataaacagccatataagctttcagctcaaacattgtgagtctagaagcgagaacatactgtgttagtattatattttaatttaatcatgggatccagctcttgctgctgtcgggtttcacttgttgagtctcaagcccagatgggtagtggaggttaacccctgaatgtcctatgatgaatcatggtttcccttttccttttgtttgcaataggttggcaaagctggacaaaataagcctgccattttcatggactgtggtttccatgccagagagtggatttctcctgcattctgccagtggtttgtaagagaggtcagtgtgtagagtggtttttggcaaagagaaatgtatgttttaattttcaattaattccttaaaacctagagagaataataacacagaaaaaaatacacaattacaagtgcccaattttggaaattagtttcaacttccaccaacagacctttataaggcagaaaattctatttatgggccaggtgcagtggctcatgcctataatcctagcactttgggaggccaaaacaggtgaattgcttgggcccaggaattggagaccagcctgggcaacacggtggaacctcatctctttaaaaaaaaaaattgtatttatttgaatttcactcatctgaactttctcacccacatttggtagagagtccaacaactagcatagtgattggtcatgtaaaagctaatggttgtggttaaaccaatttgatcattatctcttggctaataatcattgtacacttcagattaaaagaaaagagtgcatagtagtccttactctaaatgacactgtttttcattccttatcattctaataataagatgaatgtaaaggccttttaaaaacaagttttaaaatatgcatgagtctatactgatatgcatagatgatgcaataaataaaagagaggcaaagaacaactccttcttgcagaagaattacaactaatatatgtacaaagaatgagcaaaacataaaatcatcactagaacatcacagcaataatcatgtcaggcaaatccacagatggatgtaaaattagtgggtaaaagtttagggagaaacaggatatttacagagtctaaaagttatctcctcgcaaaaagtattaattataaagggaaaacttagagtggataaacctagcagaaggaactaccttaactaagtgatcaaggttaacatcaccaataataaataagacatatcaatataacgtagcttcagatatgctgtgaaaagacatatcacctttgtgatattcttccttaaaataaatgacctccctttaatcataaacaaaatttaattttgaaaaataatttagacaaactcaaagtaagggacattctgcaaaataaactgaccagcactcttcaacagtgttaaagtcataaaacacaaaaagactgaagacctgtcacagatcagagaagactacggagacgtgacaaataaaggcaatgtaggatcctagattgtaacctagaatggaaaaaggacattagtggataaacttgtgaaatctgaataaagtctacagyttagtttatagtattgtatccatgctaatttattcactttaataattataccatggttgtgtaagatggtaacattcaggaagctggatgacgggtatgtgggaactacttttgcaattcttctgtacgtctaaaattatttcaaatttaaaagttgaaaacattgaagtgctttaaatatataataatattattatatacaacataatttttgtgtgaagcacttccgtacatatttgttatgtagtcttggtttctagacattatgtatcagattggcatcacttagcttcactatgtagctcaccatctgcctttcagaagaggataactggatgttagaattaaattttactatttttccaatttgtagaccattaaaagaacatgattgcatagctcctccaacccaaaaagcacatgctttatcatgtaatattgtaattaatttatatatataattacaaacagtatataaaaactgttcacacatagaagtctaatctactttaaagtttattcaagcaagcctagggaagggttgaatttaagtttaatatgatgctggagcagagggactgtgactacgagaacatattaaatgggyatgatgtccctcattcatagataagtatctacattatttaacagggacaacaggattgtcccttcttgagaaagacaacaaaggaaactcccatcactatgcagcttggagtgttggtgagagcctccccaaaatccatgagtgtgagcttattttgagaggcattctcattaccttgttatattggacattccctctagtgagatcatctacaggaggttttatagaaaagaaatacatttctaaatgacattattaggaacatgcacagctatccacagacacgtcttacttactagaactagtaagttctataccttacttacacttataccctactaactttgtaaaaagctattgtagttgttatcttaaaagaaatgagtatatatgttctttagaagtctttaattaaataagtttctcattaaagtaaaaagttaaaataagaaggatgcaatagaaatatcctggaagcagagaagaattagaaataacaattataaataaaaatatcaagtattggtagtaatttgctgattgctttttaaatattaatattgtccacctcaataggaaatgctgctcttattaccaaagttaacattcaacagtctttgtaaattttaacagcatcataattccatttttccatgaaattcctcttcataattcacatacaggctgttcgtacctatggacgtgagatccaagtgacagagcttctcracaagttagacttttatgtcctgcctgtgctcaatattgatggctacatctacacctggaccaaggtatatgcaccaatactgagasargctgatgaaattaaaaccaacgcctstctattatatttgtcctaactatgtagtccactttcagagccgattttggagaaagactcgctccacccatactggatctagctgcattggcacagaccccaacagaaattttgatgctggttggtgtggtaagtatctggctagccattttgcatgtatccattgaaaaacataagaggaaaaatatgaaaacrcaacagtatctaaaataaaaaaagcaagttttatattttaaagttctaaccttctaaaagcaccaaaaaaaaaaaaaccagtttaattcatttgaccaaaacatattgagaactctgttgcgttcccagctgtgctagatgctgaaaatataaggctgaacaaaccagacataatcctactactcatggaatgtatagtctagagggggagacagctattaaataaataattatttacataaaatcgtaatgcaattaagaatgatcatagtaataattttttcatggatattagtttgtcccttacttattaattttcttgcactatattgatatcattgtgtaatactacacggagacacattggtgattccatatgcaacttcttaccaggttagcttaaaaacataccatcctaatcctgtgattaaatggatattttactatataatatatacataatagggacaactttaaggactccttgataaggrctcctatgaaaacaactccctaatttgaaagtttaaaacatccccacaagaayttcactaggtgatccttgccattaacatcatatgtttttccagaaattggagcctctcgaaacccctgtgatgaaacttactgtggacctgccgcagagtctgaaaaggagaccaaggccctggctgatttcatccgcaacaaactctcttccatcaaggcatatctgacaatccactcgtactcccaaatgatgatctacccttactcatatgcttacaaactcggtgagaacaatgctgagttggtaagtagcaaagtagtaggtatgacattttactattgagatttttwaaattctaatcctgaaaaaaaaatcattataaraacactttctggaagtccctttattgatttttttggtagtagaattgaaaaacttattacagatttataaggaatctggagttggctaaaagaaatacaattttcacgcaggaaattgttccccacatgcgatttattgactaatcttcaaaatgacaatagttccatttcctctggcttcaccacaatgctgacttacatgatgatttcagatgcatatgagataatcaacaaagttgcttgatcacatacatatttttttttcagtcagttttgtgaagctgccctgagctgaatttgacacagatccagagcatagcagagcacagcagatgtcattaggaatttgtcacatttgggtgatatcaagtttagtcattaaatactaaaattgtttatttcactttttgattgggtgagactcaaaagtaaatcaatcaatgaacaaataatgtgaatgagtctttaccacatacagggaataaagcaaagaaatgtaagaatctctgacatcaaaaaaagctagcaatcttattgaacaatcaagacataatcacttgagcagctaaataatgagttttctcatagaaatatcacatgtcaatgaataattttttaaataagcatgtttgaacctttcaaacaatatttctttaatttatgaaacatctggctgccagaaattggcaccaataaactaaaagagcaaatataagatttaaagcatttgagttatgccaaaaaaaaaaatgtattccatttagacaatgacatggatatttggcttacctaaatgcataaatttgaagacctagtaactttaaaactgaaaattgttgttttatactttcagattcagtctttcggagaccaaataaaatatgtaatgccgtaaatattttgagaacaaatcagaaaaataacccagtctcctagaaaattgatagctaatagttggatgggcccttttctttaaaaaacaatacaatttttcaaaaagcttttcatttttccccatccatggccaaaaatatatatatatatatatacatatatatatatatacacatatatatgtgtgtgtgcgtgtgtatatatatatatatatatatatatatatatatatatatatatatgttagcaccgccaagcatttcagtttttcacttaagcttggtctgtatgtgttcccaatgggtgctcacagtattgctctcccagagatgggtgtggttggctctcatttctgtccaaaatttctggccaccagaaaagaggaggtgggggtatgtagtttgtataactcatgtaaatatatttaagttgtgccatatcagaagagaaaaagtcaaagtcataactacatactaatgagttaattaaaataaaaaaattacaaaacacattaagggtagcaataacatatatatatccagtttgcttcaatatcaactagttttagacataactactaaaagactaacactaaagaataaagtttaaagtgttcctggaagctgagctaccaaagttttcttattcaatacattttcttattggaggaataagtttaagcccttttagtgatgagacagctttgttgccactagttgtatacaataacaaccagaacctgggctactctaaaagtctccaaatcattcttaaaaaaaaaaaaaaaaaaaaaaagrcaagtaagtcctgcctttagaatattatgaataatttttgctacttcctaaggaaattttctccagtaaaagaaccaagcctcagagttagcaagtttaatgggccaattcacatgtgtgccaaatggtgtaaaaatgttccaacagaacatgagtcactgatactcttccctaagagtcacttctttgtttaaagtcaaggagaggtaatagtaaaagagatactattcaaaatcctgtcctccaaaattgttaaattctaattgccaaagaagtagagtaagtagaattctaccraagtaaaatgttcataatctattctcaaaaggagaaaaagcacaagccacaaaataatcttatcttggatgtttgtttctacacatacaaaactaaaaagttcaaataaaaatacatgccacttttatctttaccagagtacaagacaggtraytaaaaygcaaaaatttaatttgatgtatcatactcattgatttaaaagttatttttaatttccaataattttctctattgattaagcttttctctagtatcttaaaagaaatatttaaatgccactagtaagtggcatgctacttaaggtgactgttatttgattatctgattcatttggtgtctgaatttagtttagcacrccaaagcaactttaatattttgagtagctggagatccttccaactttttcttatattgtagaattctagtttacttacttccagagcacattttgctaaaacaagctcattaactatagtgcaattacaaatatatgtatagacaaaaaagaatatgagtctctcaaaaataacagtattaacagttttacagtttttatttacaatgaggatttcaaggggaaaaaaatgtcttggtctagaaaagttaattttgcacccaaatctagtgcctccatattaattcttacatagagaaatgtgactctgctgcakaaaacaaaaggtagtaaaacattaggaacatgatttcttgcatcataccacattaaaatttaaaggaaacaatgaggacttacagcgttctgccaagtcattggtgtacaagagatttctatttttctttatacctataaaattattattttatttatagcaaaaaaatatatatgtttcaaggagaataagactagactaaaggaaattattttgtgcttatgttagcattttcagcccaaacttaggacatcctataaacagcagtcctttgatatctgagtcatgataaaaatgtatgtgccttcatttctgaatgattttacatgtagcttgcctaataattgctcatatcatgagacaaccttcagaagaaagaaaggcagagataagaatgcaaaagaccaatgaagtaaagaacaggaaaagtattatatggattgcagagaagactacaatgtttctctaagatatgtttagcagagcagtagaaagtagatggaataacaagaatatcttacacatataatgctttcccatttgcaaactgcttttactcatactatattgtttaaagcaagaatacaaagtgcactctgagcttctaatggcctcataaactgtccagtctctcagtgtagacctctttaatataaagttgccactaccgtcaaaggaagttttgagacttaaaagaaaaacaatgaatttagatttccaaaattctaaaggacaatgaaatattgaattctgtgamcttgttattgtcagagaaattaaaactgggagaaaaggctctcaaacctagccatatggctgcacttattgggcaggaagaagctcccaatctttggtgcacctcccctgcaaagatgtctacatgacactgttaataataataataatacaacttcaaagtgaaaaatgggaagccagaagaatatccagccaacaagtatcttgtccctctccacagattaacaaaatggaaagcagagcgcactacacaaaggtgccaatccagggcatgtgtcttgcaccatttctctgcattagaagcacagaatgttatgcctagaaaagtcttagaaattctctggtctgtttctcattttccagctgaggcatggaatgcttggcgaagccaacactagtagtcagggtagccctgggtctaaggctactggctcctgaggaatcttctaggctgcctcaatttccaaagacacacagacacatatttaagtggccacatgctatggtggtaccccatataactgctttgcagaataacattcatcagaaagtctttaatcccacacagtacatcataattacctctgcctctggacattaataaagatgtactctggttagctaagatgactaacttctcatggcctagtctttatgattctggcccattcttttgagagatatatattcattaacgaggaaaaagataacagtaaccagaagaagaaatatgacagactttctgaaaaattattaaatgtgaacaaaagatagaaagctacttccaaattctaacaccttccagtccagtggcaactcagtcactgcctcttaattgaagttttttttgtttgtttgtttgyttgtctgtttgtttttgagacggagtctcgctctatcacccaggctggagtgcagtggtgcaatctcggctcactgcaagctccacctcccgggttcatgccattctcctgcctcagcctcccgagtagctgggactacaggcacctgccaccacacccggctaatttttttgtatttttagtagagatggggtttcaccgtgttagccagggtggtctcgatctcctgaccttgtgatccgcctgcctcagcctcccgaagtgctgggagccaccgcgcccgtcttaattgaagttttaattaaggcattactaagatagaagtccactgctctcctcaagaatttgagtataatgcaagattataactaaagataaacgtaaaaatcagagggaagaaatattgtgattagaaggcagacagttgcagggccatgcacacacccatgcacatcactcatcacagctgtaccatgtccctgcctaatagcaagagtagcaagccacaattatgcttccaggcaggcttaggtgaacagggctttaggcacaaaacatctgctgcaggaattgtctccaactttatactctcatttaaaagacaaaaattttaaatgacaaactcagaattcatttaataaactagtcatttattcaacattatgctctttaagtgacttcttggcctgataaaattctcctaccaggcttgctcagtacatggcttatcaatcatcgaaaatttcatggccaagcctggtggctcatgcctgtaatcccagctctttgggaggccgaggcaggaggatcactatggtcaggagtttgagaccagcctggccaacatggtgaaacctcttccctactaaaaatacaaaaatttggctggatgtggtggcacacgcctgtagtcccagctcctcgggaggctgaggcatgagaatccatttgaacccaggaggcagaggttgcagtgagccaagatcatgccactgcactccagcctgggtgacagagcaagaccctgtctcaaaaaaaaaaaaaaaaaaaaaagaaagagaaagagagaaaaaaagaaagaaagaaagaaagaraaagagaaagaaagaaatttcattgagcacctattaagtgttcattataaagtatgtttcctgccactgagaatttacaatcctactgaaatgataagacttgggtaccagaaaccatacaaaaggagaacagaattgggagtttccagttagtgcaatagtaagaattcaggaaaggaaaatagcaatgtttgctgaagctgctcagtgaagattatagagaggggatgcaatttgttctgagctttgaagtctgggcaggatttgagtggcagagaaaggaatagggtgttttaggcagagaaaagagccaacaaatgaacaatggagaaactgaaagatgaagttgaggaagaaagtagaagagggtcatcctgtatcgagtgttctccttagggaagagtcggggcaagggccaatcaatgaggtaaccaggttgtgtaggcacttgaatgccaggatgaatcctgtgtcacagtgggccctggagccagggacctggaaaataggattgcaggtccattacaggacttccagtagaatctggaattcaaacaacaaacaatttttattgtaaccatgtccaaatatttcatgggacagacttatactgaaaaattattgttcctctgaaatttaaatttaactggtcagtctgtattttttgctaagcctgaacgttctgggaataaagtgatgttttagcaacagtgacctagcagaggtgtttaaaagatagctgtaatgtcatcaacgagaaaaaggcattctcatagcacctttaaaatcagttgtctttctttttaatctttttcctaaaataaattctagtttaccataactaaatattttatatgacttccatttcaactaattttgccccccactcccactcccacccccagatgacatttggcaatgtttgggagacatctttggttgtcataactgtcgagctctactggcatctagtgagtagaggccaagggatgctgataaacatcctacaatgcacagaacagccctcccatccccaacaaattatccagcccaaaacgtcaagagtgccaaggttgagaaacttgctttaaataamtataagaacaaagtcacattcctggacaaaggctctcgcctttcacaggatcttatactttcttcacaaaactttacaatgttctgcaaattacaagtgcaagagaacctacaaatcccccattagacagtatttatttatttgggagaaactccacttccaccagaaaaataaataaataggtaaataaataaatacattctctagactttgcaatttcagctgactcacacttcacatttcccttgaatttcaaagagcttaaaaatatgtatgcagatcagccaaataaaaagtttggttttcatcagtgaaagcgttcccacactccccgtgggctctgtggaaatcggcaggcctggttctcctaagccaaactttttcctaactccttgcccttctctaatctcagggcctcctttttctcaaaacatatttgctttttcaggtctcaaatgctttctccttggttcctgcttatagaccgtaagggcttcttcttttgcaccaaaattataaaagttaagtttcttattggtcccttggtgtaatttacccattatcgcasgacagaaggaaggaaactgcagttaaggattattttgatgtttctcttatcacaaatattcacccatagggatggctaaactcagaactttcagttagaaacaaagttctacagaaaattttctttaaattgttttataccttatagttggtttggagcttttgttttcttatgctgtaataatgggtcactggaagattagaagaggcagccccctgtcatgatgctggctgtgtacaagagattggaacaagggctatgtgcacagtcacgaaaggggagtttctttatcrtatattcgatgggaatgcaggtcagtggaaaagaatatcctctccttattcatctcaccaggtccttggaactcaatgcctggagaaacattacactaagcttttactttgtctcttgggctacgagctagatgtgacattttagactctctctgtcttttgctctaggaccaaggcctcattttgaggaaacagatgacaaaagagaacatgcataagatgtgaaaattcatagctaaggattaataaaggctgaccatgtttggccttgactgaaagcaaagttttctctcaggctggtttatatttagcttccttctgttctttacaattggtaaaaccagctccagcaacacttcttttgaagtattccaaggccacaaggagaagtgaaaaagagcagaggatttaaagaaagaagaacctagctcaagtcagccacttatggggctgtgtgcccttgagcaagttcttttatcctctgtgagtgttagttcttttatctgtaaaatggggataaaaatatctagctcttatcaagagctctttgtaaagcttaagtttttatgtaaatgttagttctgattttgaatccactgagaaacaatgtaagatgtccctcaaaaggcaagttttatagaaatcatcactaattggagtttcaagatatggaccgagttctctgctgtgtcgttgcttcttggttcttccatcatctgccctcatctctttttacagaaacatgaagggaaaagagttaccactctaaattgtagcaaatgcaagaattacctttctctctaccattcttrgcaggggtcagtcatctgggttgattggaacattcccactgagcttgctgccccaggtggaattccattctgctagaaatttctgtgttggtgaaatatggacagataatgttgagaagataaatgagtaacatttgtgaaattatttgaactcttctaaagaaaagacccacactgattccagggatttttgttaagataattggaatttaaaatatgatattttacttgattaatgtctgttctgactttttttgtcttttggccttggaggggctaagagaaaggattcatagacttttttttttaattaatagaaataagtaaaatgcacagaagatgtcaatgtctaaatgtggcatcctatcaaccatcaataaatggtaccactgccctcccccagaagcatccccaatctccactcaggtgggttcagcctctgcaaagctcagcactctgtacctccacccaaatcttgattattcataatgcccctaagccagagtgttagactcagtcaactaatcatgtgctaggtgctgtgcaatctgctgaggatacaaaatgaatagccaacaattccttccttcaaggagctcacctggtgaggaaatagatgcaaaaacaactgattatagcatacagtgaaccctgataaaagtgtgggcccccaaaaaggagaggggctcaatgcttcctaagagagtagaggcagcttcacaaagaagataacactaaaactgaatctggaaaaacaatagcaattatccatattagtaaagagagaaagaggattccagtgaagagaaaagggtacccacagtcatggaggtcaggagaagcaggaaagggtgtacagggaagtaattcaggaaaatctacctcagaaggaacacgggaatgcacaacaaataatgtagcctgagagacaaggccggacctggtttgcaacaactgtttttgccaaaagaggtttgacatgatagagccatcgaagacgtggtgatgaggtgatcttcagaagatgagagatgaggtggatatcaaaatgagagagcaactgaggacaagagctgagaacttaggcataaactaaatgttcctccagtgtgcacctgtgacaggaataaaataacaacctttttaagctcacatcaacctcagatattgcttcagcatcaaaaaaaaaatagagcaactgttgccaaaagatgccgatgacggtgtagagagaacttggatgtcacttcacatgcccagagtgtggtttgaggaaaggacaactaaacatttttctgtggccttaatggaaatcatgtctaaattgatataataagtcaaaagagataacagatcacaagtagccccctttggttttgtctgaaaactgtattactacattgcaccagtaaatatattgagagacttgaaagacaatcaatcaacacacgagtccaatagataatgacaatgactattaaatcttctctagtcttcgtaactttatatgtttggaactaatattgaagaatcatatttctactaactaaaaataataattcaaggcttaaggaaaaattgaagtaaagcctgaagaaggcaaccagggaaggaataagaattctttaagatcagaggttctgcctttcagataaataactaactggagatttcctttgataaatggcaagataaagaaattgtagaatggtagaaaatatcatgtttacstacaaaaagaactattgcctcaccatgtttcacatctctagaagatggttttaaatctattatgagcattatgtaatgtttaactggttctggtttcaattggcagtggaacctaagggtttaaacaaagggttaaaaaaatctaaatctagtgtcttcgttacaataagattaaacaagaggagcaatatatttaggccacaacagtaaagatttcatgcagttagagaaagcatgtcttagtttatcagtttagaaataggaaaatggaaccctaaaatttgcaagtaccgacccaaaactctgagaataatgttagttccaggaagctgattgcatcatttcagtggaccagaacagaaaataatgagttacatttaataactctttttaagttttctaatttaccacctggctgataaagtattaatgctataggaattggaatccttgaagtcttacggccacgccctcatcagtttgacataagattctactaaactrgtttcaacattagaataaggaaaggaaaattcctactttgtaaaaatcatattattctgatttcatcaccaacctcacagttttccaggcatatgtagaagaagtaattataatgccaaagtatgaaatatagccggtttcataaccggartgaattatggctaattctcctgcagtaaataatttgtttttcaaatctgtattccccagacagctgagccaggccttgcttctcaagtgttttatttaaataggcagtatgtcagtggagttttaccacagagtttctgagcgcagagagcctttccctaggagtrgggtgcagggaactggagggcaatggttcttatgagaaggtgatgatgcttctaagaaaaaagattacacgtaagttaatacctaacaattttttttaattctgaaattcaaatgttctgcattttgaaatagaatgaatattctctaactttttagtctaaaaaatttccaagctggagctaccactcatccttggaactgccaattcctaagcattttcatgctggcactgaatgttgcattgactagccattcctatgtgcagtttctaatgctcctgccctaactcacacaaccctattgtaacttaatctggctttataaactgccacattgccaagtgtttttttgtttttttgttttttttttttttgctttgttttctttgcgtttttgcatgcgtgtgttttggtttgtttgcctgcaaacaggtaaacaacttctttgcacaaccataaagacttccttgtctcctgcttttctgttacaaactcttacaagacaagataaatagaggctcagagtgaatgcttggggagggtattagggaagacattcttgcacaagaattacttggatcatatcactaggttaagtagaaaaatgaaaatgggtcctgaataagcatataatacgatccaaattgttacttacatgytttgaatgccttaaaaataatgtacagggcatttgtttggcagtgtgcttttatttatttccttacttattcctgtttcttttgcagaatgccctggctaaagctactgtgaaagaacttgcctcactgcacggcaccaagtacacatatggcccgggagctacaacaatctgtgagtcttggcttcagaactgtgcaaagaaccatgtgcctaaaaagccaaygaaaggttcctggggcctttcttttctgatagtttaaagcatgtggcttttgcctcacagyaaatttttctaaaatatgtaatcagttttctgttcaaaaaaaaaaaaaaaggagggaaagcctggacaacatagcaaacttttctctaaaaaaaattaaaaaattagctggtcatgcacacctgtaatcccagctactcaggaggctgaagcgggagagtcacttgagcccaggagttctaggttacagtgagctataattgcaccattgcactccagcccgggtgacagagcaggaccctatctcaaaataaaaagggaggaggagaaaaatatccttttcaacccacagagacatttcctccctgtaagcatctactgagcacttactatgtgccagggccttactaggcactaagagaacaagaaagtaagaatagagagaagaaaagatgaaaagagaaaaggaaggagggagatcagggcaatctttaaagaactagcagtagggaagcagcaaaaataagcagtcttttgtgatacaggtgctaagtgctgtgacattaggatgcacaaggaaagaacacacccaaagaccaaccaaccccacagtatcagaattaacttcccaagatgatgacacaaaagttttatctgaaaggattgttgctggaggaaaatataagacagagtgttttcagccgggtgcagtggctcatgcctataatcccagcactttgggaggccgaggcaggcagatcccgagatcaggagctcgagaccagcctgcccaacatggtgaaaccccacctctactaaaaatacaaaaaattagccaggcgtggtggcgggcacctgtaatcccagctgctcgggaggctgaggcaggagaatcgtttgaacctgggaggcggaggttgcagtgatctgagatcctgccactgcactctagcctgggcgacgagagcaaaactccatctcaaaaaaaamaagacagagtgtytttttggctaaacagacgacaaacaagtaccagggctacctgaggcacaagtcaccttcaagaggtagacaccagtccctctaattagacactcagtgtatgcaagcaagtggctagagtggtaggggctagacccragagctgtgggtgctgcagcttagatttatctggaaggcacattccacaggcctcattttcaatttctacgtatatcttcctttgccttcaaatggtttctttctgcctgaggttggaaagaaattgaaacacacacatgacaaaagacccagtctcatcatcaagtggcctccagtgcagttggagaggctccagtcctgagttgttgggatttattttaagcctttatgcaaaatacaattttctttatttttattatttttaaaaaactgctctgaatcatatgaggcatactgttttcttaaggggtttctagcagagatagcccacctatttatatatggtgaacttggtgcatgttttattcagttcaactaggcttctttttccattacaytgtaagactttggagggcagagccaacatctctcctttgttctggcatcttcagagttgagcccatagcctgctgttcagtgggggctatacaattgttgattgaaaaaacagatgagtgaataaatgaacaaatgaattaattagtacatattctatgtgttagtgacaacatgattgttattgaataaattaataacatataccttatctacaccaggccctatgctagataaacactaaaaatatgaaaatgaaggcatagccctgccctcagcttcttcaatcttatcgtttggcacagtttcagccgggtttagagttttctcctcttgccaatcatcatacggctttccttattttcctgagagatacacatcctttcacatataaagtgtagtttaccatagcatacaagcacactgggaattttgcattacagattacgtactttctgaagtattaaacacatcatttctacaaagtgaagtggtgatacgtttaataaggttggagtaattttttaaaacagcccccataacatttatgatccagtttactagaaaattggcctactcaaaatattttgcacagtgaaacatttgtaatgaaaaaagaaactggcaattttttaaagctccttcctagatttaaagttttttttcactgctgtttgcacatttcagatcctgctgctgggggctctgacgactgggcttatgaccaaggaatcagatattccttcacctttgaacttcgagatacaggcagatatggctttctccttccagaatcccagatscgggctacctgcgaggagaccttcctggcaatcaagtatgttgccagctacgtcctggaacacctgtactagttgagaaagctgatggccttgtttcaaaattctcatttttcatttcttttctttcttgaattcttattttggtttgcctggatgttttgcagatcccaatctttcttttaagcttctgggtctattaaactaggtagatcttttcgtattgatcataataaaagtgaatcattactattggaaaacttgacatatggtctacttctttggggaaacactgatgtgaatgaatgactaagcaagccgtgcacagtgaggatccggtcagctgtataggagttaacatcctggggtgctggctgagaccatcagggtgtagatgcactgattatagtgggaggcttgtgagctaagaagaaatgtaaagggaaatttaggactgttaaacctggcatacatgaaaagacaccatctttcttggtctagctttcatctcagctcattaaagttattttatcggctgtctactacatgccatgcactttgctaagcaattgaagatggaacaatgaaaaagaaagataacatttctgcccttaatgggtgtataggccctttggaaagacagacattacacaaataattaactcattaattaacaatttattaattagtaatctaatttacattaatcaaataagtgctggatgaactacacaaaaagaacatacaaaaagtctacctgcttgatgtacgggagaagcctccctcagaaactgctgtaacctgagaaataagtcacagttagctagacaaagggagcaccgcttccaggcctgtggctatcccaaaagtataagaagaaagccagtgagggtgaaatttggagagctgaggaaagaggagcatgtgtacaggctggggagggtggtaggaaccatgtcaggcagagcttagaggtcacgttaaggactggggacactggtctaagaacaatgaaaatccattgaagatattaagtcatcaatgacatggttacagtgtttttggaacaccaactaggctagggtgtggaaagcagatcagaagtgagacaagaggataccagggaccctgactggaccacttggaccaatgaaagtggcaaaaatcactccagaacttgatgttttccgggattggaattggacatgctgtgttgggaagtattgtgccaagttcaaattttaaaatagaatgagatgtattaaagttacgatttgggggcatctcttacttaaaaatgatagactattaactcattactttctatagactttctgtagtctactttcatagactcttaacttattactttctatatggcttcaagaaaaatgagactccatatagggagggcatgatgtgctaaaatatctataacagtgttctattcataaagagaatccattgaagtaacaacggtttgtgaaagttgtcaagccaaagaataattaattgcattaattgtccactaggtggtagcagtgcagctgctacaatgtgtcacacactcatcttcaaactcatttagtaatacatcatttaaatagacagagaaccatatgtgaaaaaaaaaaatcccattaatttgtcagcaacattggtggtaatttaaaaatagatgtaatttagctaaatattcttcctcctactctttaagttatatccactttgtgtattggagggctaacatagccatagttacctgagtgaggtaatcttgctggaggtgtatcattaaactcctgttccacaggatactcccttgctatctctggcaagtaacaccaacccctgactaagggaagctgtggcccaaagtatggaaatcttggcaaaccacaaagaactctcctaattccctaaattgaatgctttaaaatagaaattaggaataatatatgtggactgcttttttaaaattccaaggaatttttaagggtaagaacaaagaataggaaagcaaatatgcaaatattcttatttgaaatcccatgtatctgagatgtcctgcacctgagaaatttttactatgaccactgtctactgaaagttaacaggaagctgggtagaatttccacttgcctgggcaaaaccaagaaaaacagaaagagaaatctgccttagtcttcactgtagtagtatctgaccagctaatcagagactgctgtgagtccacccagccttgcccacctgagagccccaggttggggggatacctcttcttctccctcttttatcccactcccaccctgagatcccagagcaggctctgagcctttccttcagctccaagctctcagctcccaaagcaacagtgaaccaacagcacaagagtagcccctgaatctttctttctcaagtggtgtgggtagaaaatagcaagactgattttctcatctggattatggaattcctacatacctagaatcatatgccatttgttcatcttattctgcaagctgacctatatgaattggtcaaagagagaatttctagaaggaaaagaaggcagaccatagcaagttaacatgttaatttgggggcaaaaagggttctgctgagtgataatgattaaaaatatatagagaaaagcatagctaaactatatggtgatattttaaatcatggctagacgtgcactactacaaataccatagaaagtgcagagctcaagaaagatggaaaattatggctgcatgaagtattcacctctaagtcactttttaaagaggttgatttaatctgtgaaacatcacagtcttacatagtcaatcctaaaatgatacggggtttgacaattattcatcctacccacacatatgccaagaccttttataaatcttgatgcagtaatataaggcagcactgatctatgcttgccaagaaatagcgcttgttctgagaaaaagctctagaacattattgaaatccatctattgtatttttcttcagaggctaaatagattggagaggcagtgggagtctcaaacacatcacatgtttatatcatattccagaaagaagaaattgccaatatgtaatctattaagaagccaaagatgtacttttatttattaacaaagtcttatcctgagaaataccaaagtcctcaaagcactcacctagattccccaaataaaataaaagtgttcttcctacttgacctgaaaaacagacatagaagctttctccacacaattttaaaaccagtcacagaggaaacagcttcaagaaaatataacagaattctaaaattaagaggatttctatttttcctctttcacctttcctgtattttccagaatcattttcaatgggcatttataatttttagaatcagaaaataaaactctaaaaagcaaagctataacattaaaaaaaattattgaagtagtccacatgaaaacaaatacagagacatattttatccctaaaggtcacggccaccactttaatctaccacatgatctattttgataccggttctgcaggctggcagtggcccactggaagtctctgttgacagcacatgaacattttatcaactgtctagagagcatggacgtgttttttagcacctaccacgaagtccctaacatatcctgtctcactaagcctcacagccacttgttagagtcacattagcattcccattttacaaatgaggaaaccaaggcccagaataactaggcagcctgctcaaggggatgtagctagcgtgtgggagccacattgaagtgatgtctgtcgaaacccaaagtcaaggtctttctttttcactgttccctggtcaaaagtatctttagtcaaaagcaatggagcaagcatttgctttgggagttctcagtgctggtgagcttgcccagtgtcaagaacatgaaggcatttgtaaaaccctcctcttccttacctgcaaggctggagccggaaaatccatttggggaaataaaaaaaagtcccgagttctaccacacacccatcagatagagaagaatggaattactgctgctgtatatataacaggggcgtgtctccaaccacactattttgatagtacataagcgtgactctgagaagttttatctacagtcagctatacgtttgtcaatgtgaagaggtggttttcaaaaaggaaattctaataagttaactgattagataaattcacttactcttttaggttacctatgattctaggtaaaggtgttattctcccataattaaccaagttgtgttcaagactaaacatccctccagagatggttgtgaatggtctataggtggctttcattaattcaactctcaaaaggcattatttggcaattacagcatccaggctctgaagacagtgtccaattaataaacattacagcattgatattttcttgctgtcaggtagttctcaagttgccttagaaataggggtcacctctgaggacagagagaagagaagggcaaagagttagggcagtgctttaggtctttagtgtttatttctttacccagagaagtacaggaaaaatataacaaaaatgttatcattgtaaaatctaaatggtgaacatttcaatgttcgccatagtacttacagcatttttagtacatttatattttgtaatttaaatttttggggttttttttgcctcccaagtagctgggattaaggcacctgccgccacgcccggctaatttttgtattttttagtagagacagggtttcaccacgttggccaggctggtcttgaactcctgacctcagatgatccacccgccgcggcctcccaaactgctgggattacaggcgtgagccaccgtgcccagtcaatttaaatgtttttaatttcacaacttacattctagcttcaaaaatatattttacattattacgaaccactcaccaagattttatggccagatacccaaattcatctcagtctccaagtgcaaattttaaaactaatttcttccatcattcaattcaagcagaatggtagagtagtattttagaacagatagaactagtaaatcccagctctgtgaacatactttctctgttaccttggccaagttatttgctaaaggcatttgcttcccatcctgtatctgtaaaatgggtatttcctattgcaaaaggtagataagtagcatgtgcttggtgggttagtgtttttccctctccagctggaaaaaaaaaacctggtgtgggggaagaaggggaacagtttgtgcaacagaaccctaagaggaaatcagctgctcatcaagataagggctgaggcataaaactgccagagggtctcaaggcaggcaaagaagaaccatgaggctcatcctgcctgtgggtttgattgctaccactcttgcaattgctcctgtccgctttgacaggtaaatcttacttcctgtgttccagtctctgtgtagaagagaattaaaggttgtttccttacagttcactttttttttttcatttgcctccacaaagggagaaggtgttccgcgtgaagccccaggatgaaaaacaagcagacatcataaaggacttggccaaaaccaatgaggtaagcatttagagggatattttatcttttcttactgttctctaaaagatgcttcttcttattttactgtcaatgcccatgggactacaaaagactattgaacataaggggaaagcaggagctatctggataattcagccaatggccaatacttcacctgttctggttttggtcttggtttccaagactaccacttctgtttttcctcccaaaagcttttcaaacaccagctttttcaaggtaaaactatgaaatcaggagctgttcttggcctccttatcagggcatctttctcttgcctacgggtgccattccctctccattctccccactccgaccctcatctcctctggtgccataatttctcttgagtactaactgaaaacgttgaggcactggctaatatcaagatgtgaccctttccaagagcaggtacattttcaaataagacttttaaagttagatcaatcctttaaaatccaacagcctaatataattttatcatgtattcagctgctcctatttatgttgcaccagccaccttatatatgccatttcaaattctccagcagattctcaatgtcagggttataatgtaactcatttgaaacagaagagctaaagtgcaaagacaataaatt

SEQ ID NO: 8747 - DNA, 137935 bp, Homo sapiens
  misc_feature (1)...(137935): n = A,T,C or G, or insertion/deletion polymorphism (see Tables 1-2)
ccaacatttaaactattgagaaaataaaaccttgctcactggtgaccacaaatttactctgtaccttcccctagactaggtatgctgttcagcatctgttttttttctgttttttaaaattgtgattaaaaacacataaaatttaccatcttcaccatttttaagggtacagttcggtagagttaggtacattcacattgttgtagagcagatctccacaactctttttctcttataaaaccaagattctatatccattatatagtaactccacattcccccatcccttcagtccctggcaaccaccattctgttttctgtcgcaatgaatttgactactctcagtacctcatataagtggaatcatacagtacctgtccttttgtgacttatttcacttagcataatgtcctcaaggttcattaatgttgtagcaygtgtcagaatttctttcctttttaaggaaaggaagaaattcattgtgtgtatatgcaattttgtttacattttgtttatccatttatctgtcgatagacattaggttgtgtattagtctgttcttacattgcaatatagaaatacctgagactgagtactttataaagaaaagagttttaattggctcatggttccgcagactgtatgagaagcatgatactggcatctgctcagcttctggggaggcccccaggaaactgacaattatggcagaagatgaagagggaagccaggcatgttttacatggcagaagcaggatcaagggagagaatggggaggtgccacacactagaacaacaccaaggggatggtgctaaaccattcatgaaggatccaccctcatgatccaatcacctcctaccaggtcccacctccaacaactgaggattacaattcgacatgagatttggatgggaacacagcgtttttctgagccctccatatttttccaacctctgcctgttacccaattccaaagttgctgccgcattttcaggtatctttatagcaatgacccactcctgggtaccaattttctgtattagtttcttcccacattgctataaagaaatacctgagactggataatgtataaacaaaagaggtttaattggcttatggttccagggtctgtacaggaagcatgctgctgacttcttcctgccttctggggaggccttgggaaactcacaaccatggaggaaggcaaaggggaagcaagacatctcatacggtgggagcaggaggaagagagagagggggcaggtgctacacacttttaaactactagatttggtgagaactcactccctacatggtaccaagctaatccattcatgagaaatccaccttcatgatccaatcacctcctagtaggcccctctccaacactggagattacaatttgacataatatttggatccaaaccatatcaggttgtttccatctctttactattgtgaatagtgcttccatgagcatgggtgtgcagatgtcttttcagacattgcctcaattcttttggatccatacccagaagtgggatgctcttcagcaccttttattcgtgtacagtcagcaacactttcatttccccacattgtctgttcactcacctcgagccatctactctattctacattcattcattcttccttctattaagggatgatgaaaacatccgaaggtaattctcttaacttcctctccctccaccttccatcctatctacatccactcacccttaccctcatgtctgtcttccacttttcacagcctatatctttcactcttcatccctttctgtcttttccaggacattgttccttcagttagcccctctctcatcattggctccttcgttccacctccaaaactcctgaagccaagacctgctgagctgcatgtgacagaaatccacctcacactggcttagaccaaaaatgaattttgctaaatcacatgacagaaaagtccaagcatgtagctggcttttgtcaaaacaggaatagtcaaagggtgccttcaggaatatcttctccttctgctttgcctggctggcttcattctctggaaaaaactccctaaaaactggcaaaatatttactgatgatgcaacatgcacgtctcatcagcttagccttccagtacaaagagcctctcgtccaataagtctttcaaaagtcccttcaatagctttcattctccaaatagggttacatgcccccaaaggaaacaataactaggagcaggacagtgaaataaacacagggcaaggcctgagttgcctgcccagccttggagatgggggtagggttggtctacctcattggttctcaggtgggatgattttgccctcccaaggacatttggcagtgtctagagacatttttggttactacaactgaaggacggaagggtttccagcctctagtaggtagaggccagggatactgccaaacatcctccaaggcaaaagacagccctccagaacaaagaattatctggtccacgatgtcaataatattgaggtcgagaaaccatagtcttccagaatcacattgaactatgggaaagaggggatttcccagtggaaaaatctaggggcaaatcccagaggaagggacccatttagagcaacagatatccaccttcacctccatctgaaaaaaatcttcccccaaaccatctatgtttctcgtttaaactacctctcttacaccaaattttctgaaagagtggttggccttagctgtctcaaccactgtagtcattcattcaagtgatgataattatggagctccttctgtgtgctaagcattattttaggtcatgggatttggcagtcgtaaactgacatgttctcatgcagcttttattctggtgggagagacacacaataagcagattttcagttggtaataaaatgaaaaaatgataagtataattttttaatctatatgaaacaggcaaaaaggaaaggaagttctgaattaatgtgcaattttaaatagtggccaaggaaggctccattaagaaggtctcatttgagccaaataactcaaggagatgaggtagtagccatgcagagcgatatctgggcaaagagcattctaagcaaaaggaatattaaatgggaggaaaaaactgaagagaaaaatacacctgctgcacttggagaaataatttgtttgcaagctgatggtaaaaatccagcagaaagaggtgtatgatagtgctggaggaagtgagaattgctggtttccttgagtgagtgagagcaaatcgaatctagggcacaagtggagagatcacccttagacttagactgtgaacagtataattatattaacaggagagacggaggtttcatgggccaaatacaagaatttgggtggagtgatggtagaaaattgtagatctatttgattgtttctattttctcaataaagaaagaaacaaagccattcacagaaattaagaatgttggagaaggtgtcagaaataaatgtcaaaataaaaatatgaaatagtcatttaggagaatgggagaataaatggattagacaaacaatagtgggaatgtcaggcagaagtataatggtccatttgaaattatttgttactaaagtaaggctagtcattgtggctatgtgtcttttccagccacattcagtttcacaggtatgacagcaaaataatggagaattgattctaaccagtaatgttgttttgtctaatggctataataacccaagagaagggtgagggagctaacagtgggtgcaagatggtgattataaagacagagtatggaatttaacctggtagtgatgaaagtgaagacacaaaggaggtgagaagctgagagagatagcggtaggatcaatgggctgcaggcactgagacagacaaagattgctggattcagtttaacgttactagggtaaaagaaaagagttggattggtggttagagagtgggatcattgaaatcactgagaggttgaaagtgacaagtctccgagcatgcacatgagcattagagtcagaggagagtggaggacaagaccacaggcagagaagaggtcaaggcactggaaggccagggatttgaaaatactattgctgtgaatgttgaaatcaccaggaactgtggcagaagtaacagtggagaaggtggccatgagccaggagctcaaactttcaaggaatgagggagaaagtagatactaggagatggataccagcagaagtggtaaggagtggcaccttctgatagcatgtgatgtaaaactggggaaatgagccttctcctcttctcttttcctaagcctactacaatctggctgctactcccattactctgttgagaataacttgaaatgatgatagcaaatccttaaaagaatgtcactggatgtactaaaaactgtgataagtgatatgatcaaagtagacatttcttccactagaattttgggaggaagcctaatggaaaccaatgcgcacagaaagacaaatgctgtatgttattagtcatatgtggactctaaaaaactcatctcatagaagtagagggtagaatactggttaccagaggctggggaagggagagacaatgggagatggagagagattggttaaagggcacaggatcacagatagataggaggaatacattcatccttgaatacttaaccctctgccctaaatctgtcagtcctacatccatacttcttatttcagtaagtagcaccaccattcatttctaatcctggggctaactcttttttttttttcttttctgaatcatgtctccttttaatggttaaggaaaacaagtttaacataaaattagcaacaacaacaacaacaacaacaaaatcaaggtttaaagtcaaaattattttaacagaaaaacccaggcaaaatagcctacctacagacaggcagtacatgtcagaaggacaggccacccccaataaaaaagataaaatattattttttctaccttttttaaacttaattatttaattatttctttcttttttcttttttttgtttcttttttttattatactttaagttttagggtacatgtgcacaacgtgcaggtttgttacatatgtatacatgtgcgacgttggtgtgctgcacccattaactcgtcctttacattaggtatatctcctaatgctatccctcccccctccccccaccccacaacaggccccggtgtgtgatgttcctcttcctgtgtccatgtgttctcattgtggaagctggaaaccatcattctcagcaaactaccgcaagggggctaactcttgattgctttcttctcaccaccaaccttaagaaaggaagtaaccaaaatccaatacatgagcaactgttcattccatctccaatatctttgttaattgtccactttatccacccagtcagggccgccatcaaacctcacttggatgtcggcaaaagctcccctgactggtcttcgcagtccattattgccctattctaatctaccttccatactatacacagatttacattttttaaatgtgtatctaattgtccctcccttttaaaaaatcttacaatggcatgacgtctcaattcagggtaaggaaattgtttcttcacattccctgtacaccgtacacatcgcctgcaattgcccttcaacacggagagcaggcatttcattagctgaccttcccacacacattcttgcaaagaggaaaagttaagcagggtgtttggaggcgagctgccatcatccaccgcctttgtctggaagcgcagggcctcacacgcgggatccatcggaagcccgagcattgtcaagctctgctgctgcacctgggtcagcaaggtgggctctgccagcgaaactcgttagaaacaatgcaaatggggagtaaacatgacctcgcccatgaaggggaagctgtggtcaaaagcattttgtcccggaaccccgcagccctccccacactctgggcgcggagcacaatgattggtcactcctattttcgctgagcttttcctcttatttcagttttcttcgagatcaaatctggtttgtagatgtgcttggggagaatgggggcctcttctccaagaagcccggagcctgtcgggccgccggcgcccggtctccccttctgctgcggaggatccctgctggcggtygtggtgctgctygcgctgccggtggcctggggtgagaggcgggcgggcgtggggaggcgcccgggcggacgrggaacccggggccccgcagagaactcgcgtgcagcgctgagctgcgctgctctgcgcgcccgggtccgaaggcagcgcgatgggtgggctgagcgcgcgacccggcagggcggcgggtgtaggatccttctgcgcactggagaccctcgstgcttctgggtaagcgtggagttcccasgtgcaggggcttaagtcgtgacgagcgcagtggaaggcgcagatgctgagcgggtgccgcacgaaattccttgcctttgtgtattcacagcctcggctggctatagccaagacgtggcgtygatcctagygaaagggracttggggatccgacaaacctgagttctggtcctagaaacttaactgtgaggcaacttagcacacctgagtctgtttgctcttctgtaaaatggggacactggtatctctgcatcgtggagttgctgcctcagtggcattaagcctgtcgagtatctaacacagggctatgtgtccccgagtccatttctatcccccaaccgttacctctgtacttagctcccaatggtgtttagacaagcagtcctagggatgcaggtgttacctgacaactgccccgcatggaactgtcctcgccccccacaccaagccaccacggccatcatcaccatgcacttaattgacagcrtactttaagacagatgcatgccaggcacttgcggattagaagagcaagggaagccccagaacatgcaatgtaaccgttgcaggtagaagggacagtagatatgtttacagttcgcattttagtgatgtgtttagtacaaaataacgcctattataattattatggaaattttgaggccacatctcttcctttttcttaacttcaaataggtaaacatcttcagttagaacccttctattattatttttcggctccccagaagtcttcttggttgcctagactcactggcaacatctcatttgaagygacagtcttggttgtttttgtccagcctattcctgacaactccgggttcgcccttctctgccactagacattttacattcattatttgagtgttccttcttctctaaaagagtaaataaaataaaataaagtagaaccaagtcccgcaagagttgttattaatatttgatctccttaggcaccrgaaagtaacctgtcaggtgcagagatgtgataaaacgtacaatcttatttttaggagagaagcatgcccagtaagttaagcaatctgttgtcaacgcttaggaatttgtgtcatctttgggagtactggccctcttcttactagaatgttgttttacttagcctatgttgattaagttactgttataaacaatcccagacactattaattgcaaaaaaaaaatttactgaggttatcacaataacttccaaatgtgaaacagcctaaactaaactacctagaaattttgttgctgacataatttaaattttaaaatgctgatggatgcttccagtgtgcayggtcctttggaattttaaagaagtataagagctctgcacccaaagtgtatgcatatagaagtaggtggtggagttttatgaaatctacttattaggaagccagcgttctgctttttccagcctctgctacttaccagctggtgtcttggacccagtaagttaagtcacatcactgaccttcagtgtccacatgtataaaatgagcayaactgacatcctgatctctgagagagacgttttgaaaatcagatggtgtaatgcatgtgacagtgttttgtaatctgaaaacccccatgcatgtctgaaaaaccatgactaagaagtcgtgcaagactgcaggatcaccgaaaarcgagaaatctcaactcctatgatcaggaaaggatgagtgaaaggtatatggctttactagcacttaaagagtgaatctagaaacagattgcatacgacaaaaaatagcagaggagctaggattgttttgttattatgagttactcacagtacccgtaaagtggtatagtgctatttgaaagaggacttagattagctgcaaatagatattgcaaatgtaggacaaccmctgaaaaatgtgaaaaaaagaactataatttatatgttaataagtaagagagaattgcatcatataaaatgctcagttaaaacaataaagatggctggggacagtggctcatgcccataatcccagcactttgggaggctgaggtgggtggatcacctcaagtcaggagttcaagaccagcctggccaacatagtgaaaccctgtctctacaaaaacacaaaaattaccagggcatgatggtgggtgcctgtagtcccagctactcgggaggctgaggcatgagaatcgcttgaacctgggaggcggaggttgcagtgagtcgagatcgtgccattgcactccagcctgggtgacagagcgcaactccaaatcaaaaaaaaaaaaaaaaaaaaaaaaaaagaaacaaacaaacaaaacaaaaaacaataaagggcaggaaaagaatggaagacaaaaaatagaaacagagaacaagagaaaaaaagcaacaaataaaaaccagtaacaaaactaaagcaactatatcaacaatcattttgagtgtcaatgatcgaaatgcaccatttgaaacagatcatcagagtggatcaagaaacaagacccaactatatactgtgtacaacaagaccgttttaaatatagacaatatatatgaaaagtaaatggataaagatataccatgctaatgctagtcacagaaagcaggaatagctgtgttaatttcaaacacagcagacttcagaccaagaaaaattattagggataaagagggrcatcatataatgataaaggggccaattatccaagaagacgtaacaatatcccatatgtatgcacctgatggagagacaaaatacgtgaggcaaaacccatagaactgcaaggagaaatagatggatttactatcatagttggagacttctatgatatctttctgatatcagaaaaggtgctgaagtctccttatcagaaatgggcagattcagcaggcagaaaatccgtaaggacatacttgaattcaacagcaccatcaatccacttgggtataattgacatatatagatgacttcatccacaacagcagagcacatattctcccgcttacattcatggggatagaccacattctgagccataaaatagtacacgaattaagctttaccaggcagtgtttaatatagggtggactctggcgccctcacgtggtcctcatataggatctggtttggttatccctgctaggttaaggtgcaagatagaagggaagttccaatttgctttctgtgctttgtggtgtattttggtttacatatgctcagatgagtggatgtgtgatttatattatctattttaatctaaaataagcttcacatttggacaggtaacatcaaaagtgtcctacacagaaatgctgggtgaagatcccagtaataaaaccaactccagaaaacaagaaaatggtagagttgacaatccctctcaccctctccgcaaagacacatgtatacacattttttgtcagaggcattaagtagaagaaatgctgtcagtctaatcacaactgatcacaactcgatgaaaccaaaaaacctagaaagtatcatgaagactgtcgaaataagctttacattcactattgtgaacagagagactcaatgtgactgttttttgtcccgttagatgttagctaatgattgtgctaagtcatgatgattaacaaagcatttaaaatatttattttatctgtgttacatttcaaaaatttatattgaggcatataatttatgttcgcgtacatatataatttataaatttatatatttgaaagggcatgctctttttttaaactgatagaggtgcctaagcaaagcaagtgcaaatctattccttaaagggtaagtatgcagaatggaaagcagagtgttctttgggttgacagctcatattgcaacagacatgaaagtgatgatgtgttaattgtgcatatagcacagaatacatcaacttgctttgaatggaatatctgaaccaggagaatgtgaaagtgggctgagtcatacaagacaaaacccgaaatgagataacaatacatacccactagaatggctaaaatgaaaaagattgaccgagccaagtgttggcgataaggtggagtaactggaattataatatactgctatttggcaggtaaaattataacattaactttagaaaatagttcaacagattcttaaaaccttagacacacactcaacattttactcttaggtttttacccaagagaaatgaaatcatatgtccacacaaagacttgtacatgaattttcatagcagttttgtttgtaatagccaacacgtggaaacaatccaaatgtccctcaacaagtaaatggataaactaaattaagatatatttatgcaattgaatattacccagcaactaaaggaaacaatttgtatacatgcagcaacctagatggatctctaattatgctgtgtgaaggctaaaccataaaaaaaaacctgagtgatttcctttatacaataggatataaatgaagtgatttaggttatatgaaattttagaaagtcaaatcaatctgtagtaagagaaaaccacctgagttatttcctttatatgataggatataaacgaagtgattcgggttatatgaaattttagaaagtcagatcaatctgtagtaagagaaaacacattgaaggttgcctagagaaggaagtggatgtttggatggattacagaagggcatgagggaactctgtgtgggtgggatgtatgatggaaacgtttattgtcttcattttggtgatggtttcacaacgcatacatatgttataagtaatcgaattgtacacttcaaatactcatcaatcattgtatgtaatatatcttgataaagctataaaaacttttaaaattatggtaggtcttcagtttgtggattttatattaatatatttgtcataggaactagtcacaattgagggattggtaataaaggagagaaaggaaactacatcaagctttctttgttgaaggctcatatattccttttttgagctattatacaactttgctttttataattacctatactattcatatactactatgcaggtaagaatattatgtaattaaggggaaggaacttctttccaagaatggttcattcaatttgctttgttactttaggtctcattccttcctctcgttgcaagctttgctgtgacatttaccctctctcaatacagcttttggcgctaggcacttcacatggaatctcttcctttgtccggcatcaatggataagacaaatatcaaaattgtatttcatcccacatatcaactagaggaaaggtgaatgcataacactgaaaataacagcaactgttttactcagtgttttttttttttacagtatcctcaaagtgctgttatctatcaaaatcagctgtgaaaatttttaaaaatagactcctgggccctaacctagacccactaaatcagagatttgggggacatagcttggattcttgatttttttgagttttataagtaattcttcattttttgttcattgcaacaaatatgcattgagttcttataattgagtgttaagcaccaggactaagtattaatttagaggtacaaaaaaacacatcatctcttgcctttaaattatgcatatctaatatctattgagagaaatagatacttctaaaagcacacaaagataaaaagcacaaattgtaataacaaacaattattgatatgaaaggaaaagcaaagtgtcrgactagaaattattatagggtggggcagagggaagtagtttagattccaaatccctaagagggtcagggaaggcttcagatgagattgggtgtgttcagggtggtatggccataggcaggctggggaaggcttctataagaaagtgacattttagcagatgcctgaaggaagaattgaagtcagagtgaagataaaattgcgtcacayagaaggaatgtcatagacgggaaaaatgtgtgtctttgggaaactgaaaaaggggaaagggccacaccttggtgaggggaccaagtggcacaagatgaggcagggaacatagacaagggcttccttgcttaacaactgctggcttaataaagcaaatgtgtgatgatggatacaggctgtctgggaaaaataagtaagaaatatgagctttcttggagcatcatcctttgcttcagtagaaagcacagagttaggcttccaattctgactaaagccattgacaacagggaaaaggcaaccttaggaattctcctctctgtccggggtcccgtgggcactatgatggagctcatgagatgcagatgagaagtcccaggctgaatccggggcacattcactcaggagagctgaggtcaccagtcactgaggtcatccagtgcattcccgacagcataggctcattccaagctagttctgcaaaggagcagaaaatgaactcttggaagcaaagcaagcactcccactttagcggaataatcgaatttaactcttagaagtccccttacccttttctaagggtaataatcgtaagtataatttatgaagtgccttctgtgtatgtggcagcatatactacttttgattctccctgcaaacctggtaggaaaatattattccctttatgaagatgaaactgaggctcagcaagattaagcggtttgcctaagacctcatagccaytaagtagaagacattgggttcaagattcaatctatgaacccaacatttttaatactatataccattctctttttgtattaatttcctattgctgctgtaacaaatttccacaaacttagtggcttaagacaacagaaatgtattctcttccagttctggaggccgacgtctaaaatagatccatagggctgtgttccttgtggaggctccaggggagcaggggttttcttgctctttccagcttccaggggctgcttccgtcctttggctcttggcctccttcctctaccttccaaaccagcaccatagtgtctctgaatatccttcttctgtctcctttcaccctcttgcctcccttttataaggacccttgtgatcacatttaaggtccacctagataacccaggataatctgcccatctcaagattcttaatcacatctgcaaagccctttaaccattacaggtaacaatcacaggcttcagggatcagaacatggatatctctgagaggtccttacttagcctaccacacctttccatatagattctcaaaattttagctgagcctaataagggagttcattaccattagggtccggtttagtagcaagtgcttcctttaagtgaaaaggtgaaagttgtccacttaataaggaaagaaaaacattgtatgttgaagttgctaagacctaaggtaagaaggaatcttctatcgatgaaattgtgaagaaggaaaaataaatttgtgctagttttgctgtcacacttcaaactgcaaaagttacaaccacagtgcatgctaagtgcttagctaagaggggaaaggcattaaatttgtgggcggaagaggtgaacagaaatgtgttctaattgacagctrtcaggtttggtactatctgaggttttgggtatcggctaatgtcttggaacatgtcccccaaagataagtgggtgactactgtatattcaaaataagcatttatatactggggagtaaatctcccatgttatttgtgttttatttgtcccacaaataaagtaaacaaagtagaattttaggcaagattcatttctagaggcagagatattttattataataaagaaggttgctctaccataaaatatagcaatttaaatttttataatcctaataacctcaaaatatataaaataaaagatggacaacattataaaaagaaatagacaaatgtacaataaataaaatattttaacacaactcatttagtatctagtaagacaagtactcccccmaaaatcagtaaagtatctagaagatttgaataaatattaacagattggattcactgaccttgttacaagaaagaattatacatgatgataggagagaggaagccacagcacaggcacttactgattaactaaattttgaagctgtgaaatgcaccttatcctttagtgaaagatgatataaatagcttagttgccttcaaactggcagagactttttgaatggatggatgctgattttttaaaaaggagcccatttctgaggcatcttttaaagcaggggtcctcaacccctgggccatagactgatactgtccagtggcctgttaggaaatgggcagaacagtaggaggtgagcagccaagcattactgcctgagctccacctcctgtcagattagtggcagcattagattctcataggagcagaaaccctattgtgaactgtgcatatgagggatctaggttgcatgctccctatgagaatctaatgactgatgatctgagtggaacagttccatctcaaaaccatttccctgcaccctccattcacggaaaaattgtcttccacaaaaccagtcccaggtgctaaaaagggactactgttgtaaaggaataagtccctttgctattattatttttattaagatggaatcttgctctgtcacccaggctggagtgcagtggcacagtcttggctcactgcaacatctgcctcctgggttcaagcaattctcctgcctcagcctcccaagtagctgtgcacaggcatgtgtacaggcaagtgcaatcatgctctgctaactttttgtattttgggagaggcagtgtttcaccatgttggccagcctggtctcaaactcctgacctcaagtgatccacccaccttggcctctgaaagtgctgaaattacaggcatgagccaccactcctgcaccccttggctattattgaagtgttctttttcttttttgatcacatctatgaagtatattggagagaaagagaaggtagaatgggaatttcaacagggtcacggtggctcactcctgtaatcccaacactttgggaggccaaagtgggtagatgacctgaggtcaggagtcgagaccagcctggccaacatggtaaaaccccatctctactaaaaatacgaaaattagccaggtgtggtggtgggcacctgtaatcccagctactcaggaagctgaggtaaggacaattgcttgaacccaagaggcggaggttgcagtgagccaagatagcgccactgcactccagcctgggtgatggagccagtctccgtctcaaaaaagaaaaaaaaaagtatggtaatttctccattaactttgatgctkctatggtcttgatctccaggtcaatgcaatgccccagaatggcttccatttgccaggcctaccaacctaactgatgartttgagtttcccattgggacatatctgaactatgaatgccgccctggttattccggaagaccgttttctatcatctgcctaaaaaactcagtctggactggtgctaaggacaggtgcagacgtaagtaactctggagtgggaacccccctgttagtcaaacatcygtaagatctgattcaatttgttcaaattttgtaactgagttgcatatgacaattagtttgccaaggtgcaatacatatgagaattattcttgtagatcataccttgttactgctttgagttcctggcgccttcattaaaagtttatttcatgagaaacagtcattgcaggacatgattgagggaaaatccccattcactgggggtctcccattttcatgactaaaattaagtaatgaatgacttgggacaagaaagagaagtggattaaataactaaaagatgtgacaatcttgggctttgagatctttggattataccagttgaattgaattacagataataacraagtttacatttttctgggaggcataatatggggatgaaacagatctgaaaggaaagttttttttgaaagggagctgatcctgaggcagtctggtgagtttcctcaaggtagcaaaatctgtggaaccatcagaactgcgtgtgttcctcagtaagctacaggcaggttgagaccttatgtactaaaaaaagtttttagtttactctacttggctccaaaattctgtttctttcctgtaggtaaatcatgtygtaatcctccagatcctgtgaatggcatggtgcatgtgatcaaaggcatccagttcggatcccaaattaaatattcttgtactaaagggtgagttggcatctcttgaaccaacatctcttggttcaagagttctaacacagccttactaccttctagtcacatgtcagaaaggacaactaaactattaccatctgctctttaacggcttcaacacagatgtttagctcctgactgaaatgagcaaaggtatgacaagatygggggaaaatcatctgtatccttgctggaaaccaaggcagagcatatatgaaaagtgtggcattcattgggtgggaaggaagaaaatgggggaagagtatagtcaaagcacacaaacagccttaacgcagaggggacattgctggaagaaagggaaggccattgagtaactgtgtgagagaaatcttaacggtcatagcacaagtagtttgctagggctgctgtaacagagtactccaaaacgggtggcttaacacaaatgaagtttttaaaattctgttccggaggctgaaagtgcaaaatcaaggtgttggcagagccatgctcccctctaaaacctgtaaggatggatccttctttgcttcttccagcttctggagccccaggccttccttggcgtgtggcagcagaactcccgtttctgtctctgtcctcacatggccgtcttccctctgggtctgtgtcctcacatgctgttttcctgtctgtgtatggctgtgtcgaaagtgctctcttttaataaggacaccaatcataatggattagcgcccacactaacgacctcatcttaactggattgcctctccaaagaccatatttccaaataagatcacattaataagcactggggattaagacatcaatatatttcggggtaagggggacacaattctcattcattgctggtaggaatgcaaaatggtaccatgacttggaaagataatttggcagttttttataaaactaaacatactcttaccatgttatccagcagttatccttcttggcatttatccaaaggaattgaaaactcatgttcacaccaaaaaaaaaagaaatctgcacacagatgtttataacagctttattcataattgccaaaacttggaagcaatcaagatgtcctttagcaagggaatggataaactgtggtacatccatacaatagaatattattcaataccaaaaagaaatgagctatcaagccatgaagagacatagaggaaccttaaatagtgaaccttttttcaccatcactaagtgaaagaagccaatctgaaaaggctacataacatatgattccaactatatgccattctggaaaaggcaaaactatggagacagtgaaaatatcagtggttgtcaggggttagggaagaaggggatgaatsggaagagcacagaggattttgagggtagtgaaactactctgtatgatgccataacagtaggtacatgtcataataaatttatccgaagtcatatagtgtacaataccaagagtggaccctaacataaactatggacttggggtggccatgatgtgtcagtgtaggttcctcaattgcgaaaaaygtaccaccctggtgaaagatgtttataataggggaggttatccatgtataggggcagggagtacataggaaatctctgtatcttctgttcattattgctgtgaaccaaaaactgtgctaaaacacaaagtctattttttaaaactgcatagacataaatacatgggcatatgtgcataaacagacacgcacacaaataagtgcaggtaaaacaggaaatttgaacaaaatctgtggattataactgtttcaatatcttaatgttgatgttgcactattgttttgcaaaatgttattattaggggaaaattgagtaaatagtacctgggatctctctgtactattccctgcatgtgaatctgattatctcaaagtaaaaagttttttttttttttaaagttcctactaaatttccaaggggatgggcttcccctcagatcactaccccttttcagggagcaataaagtaatcttccttggaatgtagcaatctgtaaccaatcaaaatgctgtaactatgcatggtcccatatggaaaatataatcctgctaaaatttctctgtctctgccyatgtaagtgataccttatgtcctccactttggagtgctgaccccattcatttggagttggtctcttccaggtggctacccttaacctttgtgctcaaataaactctatccttaaatatattttctgaatctcattatttaaggktgaaaatgtgctaacctaaataattcacaggatttgttttttattctcattttttcctaacctatccacctggttcaaggcacatagattaagaaggaaaatggaaatgggactaatatcccaggcttcactgtccctcttcggggccctggggaggagactcccaaaagtctagacatgttcacccacatcctgtatgtggtttctggaaacgaaatgatcatggcttttcctgaaccatggcttaactttgtgaatccacaactctctcttccccaggagatccaaaaaggtagggtaggatgtaaaggcttcaatctgttcaagtggatatgagactccctggctccccttacaataagtagcatggattttstctctctgccttacttcctccaaacattctgaatgagaagtgttcaaaccactatttgttcaattgcttaatctactttgggacacaagtttaataaattaaaatattcttctatctgttccccttgatcagtgaacataaagttatcttttgactcatatttaaaatgttcagtattacaacactgaacaatagtatggaggaaaaaaaatgccaacttaagtttgaacttgcttcaccattcctatcccaacccccatgattagaaaatcaaaaagaacactttgagaaataacctcagtggggtcaaaagccagaggagcctccaggatcccttgttcctaagacaaacaggcaggaggaggtgcacatataggattgcagctgttcttcacttcatttgttcacatacttcatacttgtgtttatgtctgttggcagtgcaatagaaaatgatttcatttttggtggtatactagaaggcattaaaaaacaaaataaggccgggtgtgctggctgtaatcccagcactttgggaggctgaggtgggtggattacctgaagtcaggaattcaagaccagcctggtcaatgtggtgaagcctgtttctactaaaaatgcaaaaatcagccragtgtggtggcaggcacctgtagtcccagcagctaaggaggctgaggcaggagaatctcttgaatccgggaggtggaggttgcagtgagccaagatcgcaccattgcactccagccttggcgacaagagtgaaaatctgtctcaaaaaaaaagaacaacaacaacagcaacaacaaaaatcccaaatgatattgaagtcattaataattacatcataatcactagtataatgtaatagtgcatcaagtatcttcaaaagcacccactgttctctcactatttatttgatcttcatttgtcactgttttgttgtttgaataaagctttatgttgccaggttttcttacatactcataaagcaaagttctcagctataccaataaccatgactgttatttgacattgcttcattccttcatgtatagtactatcaagtttgaccctaccctcactatgactagtttcacccaaccatctatcacaacagagagtctaacgtgaagtaaaataaatgtcataaattattccaaatttatggcacactgtgaacagtttgagacatactaattgagaattgctgactttagtattttaagtataaaatgagtgttcaattctttttgatcagcctggatttcctttggttctagttatgtatccccttccttccttccttccttcctttccttccttccttccttcctccctcccttccttcctttccttctttccttctttgctttctttctttcctttttactttcttttttttttttgatacaaggtcttgctttgttgcccaggctggagtgcagtggcatgatcagcactcactgcagcctcaacctccctgactcaagcgatcttcatgcctcagcctcctgagtagctaggactacaggaatgtgccaccacgcctggcttttttataaattttttgtacagacagcgtctcactatattgcccaggctggtctcgaactcctgagctcaagcaatcctcttgcctcagccccccaaagtgctggaattacaggggtgagccactgtgaagggcctaatttggccttctttaatgaatcttattgataaaagcccatccatgcatccgtgcatccatacttttaaggcaaagaaatacatacaacaggactgtatacacacatatacatgtatatatatgacagcttccctgcactcaagaactttgtgctatcttttaaaaaatgaaatttataggaaaaactacaattcatcttagatttgcataaaaaagtgtcataaggtaataaagaagagaaagctcatccaattgagaatgtatgaaaaagaaagtcaaaaagtcccaagaagaatgtgaaacttgggaaagtgatagatagtcctttgatgagtgtaaaaagtccctctgaatcctataagagtgtaatctctggaagtagtaatttaattgggtagttgacctgtgtctttagaatgtaacattccttattttttgcctctagataccgactcattggttcctcgtctgccacatgcatcatctcaggtgatactgtcatttgggataatgaaacacctatttgtgacagtgagttgaaatatcccttcctatttcttttaccgacacattctaatttttctctggaataataaaaatcttaactgaattcyttctrtgcaatctgtccttcacacggctgaagactgcggtaatgttctcgaatattcctatggggttcctggcaactctttctttaagttcttccttatcctgggatgtgtcttttctaattccagaagtttaaatacataaaagccttcaaacttgattttacttcaataaacgtgaaattatgttgtttctaccacctccagtataataatcatcytgcttggcaaatcagtaaagattttwaaaattgatactcttcaaggttagcgaagctgtggaagaacctggactctcatgtaccacgagatcaacacatcctcttgaaaggccccatgcactataaacctcagaagtgaacatatattttaacctayttcttaaaatttatacttaggaaataatcacacactttttaaagyagtttggtataaacttttcattgcagcattatttatattagttaaaatgttagagtaacctaaatattttaaactatggtttggaaataatctactagtaggaaaaagatgtgttcaaatgaccattataaagaattccctaagaaacataaaayagctatgcagaatgaaaataagtatatccatacactggcatggtattcagccataaaaaatgacagcataaagaagcacttaatgactagaaagagatgtattttacgtggaaaaagaatcagatgaayggcatatatggcaagatctcactttattaaaaaataatacacctatgtagtgagggccaggctgaggctgagagaaatacagtgtataacatctttgtcttactcttctctttggataactggactcctttacttttcttcttggtatttaaaaatgttacttttactagaaagtttamgagcttcagaatctaagtttacaaatgacattggtcacacatttattgctgtttatccactttaagaaacagttttgctattttgtaaaacaaattgggaaaccttccatcttatttgaaatctgtaataaacatggaattggaataggaattttcctggaaatatgaaaaagattagtaaaatagagaaaacaaaaaatataataatacacctatacctgtatytattttttatctctgtttctacttctgtaacctctctgtatccaaatcctggtaaatggcctcaagtcttcttggaaaaggctaggggaagatttacaatacatgcttttgaytgygtagcatggtgcttcctcaagagaatccagtctcccatccgttggtgctgctctgggtctataaactattcaagtctaggaattgttgatgaacaatgaacttcttttgcaataattcaagtcagacttctattcacttgacctaaaactcttacacttatacaaatcaagtaacactttagtcggctatccgtctactttggttttagagactccatgatcaattagcccaataacaatgtcctcttcaatcaaatcattctgattgctgtttcagctcaaatatgcattacaagaacccccattgtctctggcaattaagtgctgccactgggactctgccaccctgaggtcctttggtccccaagtgaattcagagaatccagttcaatggcaacagttcccattgtcattcctggcctacagagaatgaaccgttgcagaggatgctgaaactccccatgtgaatgtatttctcaagcctctggtaaaaggtctgtcttctgaaccctctactcctgcactgtgcctcaccagctctatccaaggatacaactttcagagtggaatggctgttgcttaacttctgcctctcaaatatcaggctaatttctcatgctataaccctagtccagaaccgtacagagaaagtaagtctggaaaacttaattccaaattggcctggttgacatggtgccaaaccaccaaataattataattttatttaactctttgtcttcttttctttctttccttccctccctccctcctttcctccctnnnnnnnnnnnnnnnnnnnntccctccctccctccctccctcccttccttccttccttccttccttccttccttccttccttccttccttccctctttccttattttctttcttctttaccacgctggctaggaccaccagtataacattgaacattggtagcaatagatgtcatccttgtcttgttccacatctcaaagttaaagtttaaaacatttcaccattaagctggtgtttactgtaggcttttggtagataaccatttttgaaataaggaaattatcttatatattcttcattgctaaaaaatttatgtctttgaatcatgttgaagtttatcaaacactttagttacatatattgatgtaatcatatctgtttctctttttctgttaatgcaacaaattgttttgagtacatttttgaaaggcaaatgattttaaatttcaattttacattcttaaaataaatcaactcagtcataatatttaatcatttttatatatggcaaatatgcttttatgatatattttagatgtttctattaaaatataattcatgtatcataaaagttacctttttaaattatacaatttagtggtgtttagtatattcacaaagttgtgtgttatggtctgaacgtttgagtccaccccaaatccatatgttgaaatccttacccctaaagtgatgacattaggaagtgaggcctttgaaagatgattagggcatgagagcagagccatcacgaatgggattagcgtcctaataaaagaggcccggaagagctcctttggccctcccaccatgggaggagatgctgaatctgccagtgttggtcttgaactccccagcctccaaaactacaagaaataaatttctgttgtgtacaagctaaccagtttatagtattttgttatagcagcccaaatagactaagacattgggcaaccagcaccgccaattaattctagaacactttcatcatcccattcctaacatattttagagataagactataattttctttcttgtaatgtccttaataagattttgatatcaaagctatgacagtcttataaagccagctggtagtgtttcatatatttgtttccttgtaagggtttatataagattggcattatttcttctttaaaaataattcaccagaaaaggtatgtggcctggagtttacgttcttgggaagtttttttttttccaaccattttcctgtaccatgtagacttttggctgaagtataacatatatatatayatayacacacacacacacacacacacacacacacatatatacatatatacttatatgtatatatgtatatatacgtatatacgtatgcatacgtgtatgtatatgtgtatatatgtacgtatatatacatacgtacgtatatatacgtgtatacgtatatatacatatacatatataggtatatacatatatatacgtatatatacatatacatatataggtatatacatatatatacgtatatatacatatacatatataggtatatacgtatacrtatacatatataggtatatgtatacatatatacacactatatatatatacacatatatatagtgtgtatatatgcacacatcttaatcatgcagttcaatggagttttacaaagtaaatgtatccatgtaaacgtcactcagattaagatatagaacattatcagcaccccagaagccttcccgatgccctttcccagttatcttcccaaagaaaccactattctgatttataacactaatagttttgttgcttcctaaattttatattaaaggaatcaaaaaatagatactcttttgtgtccagcttcatctcaatgttatatttggaagagtcatttttgtttttgcaggaaggattgttgggtcttctttattattatgttgtatttcattgatgatcttgagtaccttttcacgtttgtgaagtgctattccaaacttttgcctattatttattagtttgtctattgttttgtagaagttctttaaatattctcatgttttctaataaatgtaacacaaatattgtctttcaggctgtggcttttcttttttccttcttaatgatgtcttttgtttatgaaagttctacattttaataatattcaatttatgagtcttcttttttccagttactgctttttctattctacttaagcaattgggccaagtgaggtggctcatgtctataatcccagcattttggaaggccaaggcaggaggattgcttgaagccaggagttcaagaccagcctgggcagcagagtgagaccctgtctctacaaaaaaaataaatatataaaattagctgggctcagtggcacatgcctgtagtcccagctacttgggaggctgaggtgggaggatcccttgagcacagaggttcaaggcttcagtgagttatgatggtgccactgcactccagcctaggtgacaaagccctgtttcttatggatgggcaatagatctaatatcatctattaaaaagactattccttgcatagtgcaatgcgacaccaccatgaccataagtcaggtgaccttatgagtggatctcattccagagaggttctgtttcactggtttatttgccatactataagcactacattaagattttaattactatagcattacattaagatttgatatctggtagcatatatctcctaactatgtgcatcttcaagatttacttggtgattcttggccctttgcattaccatataaaatttagaatcagcttgtcaatttccacataaagaatcctacttgaatttgtattaagtttctgttgactcagtagatcaatttgtggacaagtaacaaatttacagttttgaagtttaaatttatgaatatgatatatcctcccattttgaagtcttctttaatttcttttaataatatttgttaatgtacattatagaagtcatgtacctatttcattatctttattctgacatattatttttaaaatttcattctttaattatttacttcttagatatgcacctgtttcatctcagctccagcaaatttgttaaatttacttataaattgaatagtttatctgtagattcttttgaatttgctgtgtaattatgtcatctatgaatctgacaaagtttttacatcttttcctttcttatgtcttttgtttatttctcttgctttattgcattggctagaacctccagtacaatattgaatagaagacatgatacaaggcttttaatagtcctcataaatcatgatgtatgctgtagatttttgcatgatatcctttattagattaaggaaactcccctttctttctaattactaaaagatttatgaatgttctttctaattgatcactgcatgtattgagattatcatgtttctttttcactctgttaatgtaatatattacattgattgatgtttaaaagacaaacgctgaattcctagaataaacctatgttgcttgtgatgtgttatagatgattatcctatgtatgggggatatgcgtgtgtgtgtgtgcaggattgctcatatttttattgtaacattgtaacattgatttaatatttaaaatcagtcaaggtaaacctcactttgatcattgtatcatcctttggaaatattgctggattcagtttcataatattttgttcagaaaatttgcatttatattctcaagagatcttgggttataatttgcttttattttaatgtccttatcaggtttgggcatcaagattatgttggcctsataaaatgtgttaaaaattatttattttttctagtgtctggaacaatttgtgtaacattatttttccttatatgtttggaagaattcagcagtgaagcaatctggacctgagggtttgttgttgttgttgtcaggatttaatatctttaatagctgtaaaactattattttatatcttattgaattagtttgggtaagttatatttttcaaggaatttactcattttatttagatttcctaggttatcagcataatgctgtttattatagtctcatattagcctttggatgcctgtaagttctgtagtgatacccttacactcattaatttctgatattggtaatttcttttgcttctttttccttgattagttttaccggggctttatcaattttactaagcttttcagaaaaacaacttttaactttcttgttttttctttagtttatgactattttctcttttattgatttctgctttaagctttgtgtattcctccagtcctaaattcttgatactaattaatttgtttccaacctttatttttctaatatgtacatttaacctatcaatttttctctaaaactgttttatttatttccaacaatctttatatttttattatcattgtacataaaagctttctaatttcacttttaatatctcctctgacccataggctgtttagaagggcattgcttaatttctaaatatttagagatcttctagttatcattctttcattaatttaatcatttgagacatggtttattgcccagaatatggacgattttggtaaaatgttacatatgcacttgaatgtacagttattttgcttcattttctagaaatgtcatttaggaaaatgtggtttagaacagtctttttttccccctccacttgttctctcagttatggagaagcatgtgtaaaatatctgtattagtttcccagggctgctgtaacaaattaccacaaacttagtggcttcaaagaagagaaatttactctcttaacagtttggaggccagaaatccagttaagatgtcaataggattggttccatctgcaagctgttctgtgcctctctccaggcttccttccagtggctgctggcaatcgttgatgttccttggcttgtagatgcatcatttccttctctgtctccatcttctcgtcgccttctcctctgtgtgtgtcctttgctcttctgtctcctataaagacactggacatggatttagaggccaccctggcaatccagaatggtcacagctcgagatcattaacgtgattgtatctacaaagactctccaaactgggtcatattcacaggtttcagagatcaggacacagatattttttaaggaggacagtggttattcaacccattacaatccccaactacaactatgaatttgtctgtctttcctctttgttctagcaatttttactttatgtattttaaacatgttattaaatgcatgaaatttttggtttattctttctgctgaattgactattttatcataatgaaatgtctctctttacctctcataatacttcttaccttaaaatctactttgcatattaatacagctatataagctttctttattgtttttatattatatgtgttttaaatcttttactttcagcccttctttgtcttatatttaaagcttgtctcttataaacatcatatagtaaggttttgttgttttattcagtcttagttgttcattggtgtgtttggaacattaaaatttaataataaaaattaaaaataaataaatttaatatagttactgatataaagtctaagtcttggtatttgtttcatgtgtttgttcctttattcctcatttctcacattttttaattcatcaagtatttttattattctatttccccagtagcttttaagttatattccattttttattcttaaatgactactctagagatagacatccttgatttactatagtctgctaaaattgtacttttaccactctccaaacaacgcaagtaccgaaactattaatagttaattccatttatgtcctccccctctttttgtattgttgccatacgttttgcaaaaagaaaagcttcagctgaattaaatttaaaagagtttaattgagcaatgaacgattcgcaaatcaggcagcctcccgagccaaagtaagcgcagagactccagcccagctgcaatgggggaagaggatttaccgacagaaaaaggaaactgacgtacagaaaacagaagtgaggtacagaaacagccgattggttatagctcagcgtttgccttatttgaaaacagttcaaacagttggccacatttgattggccaaaactcggtgattggcgtaagagtagtctgcggtctgtttacatcttcacttgttatagtttgcagtttacagagaaacctttaggctgagcttaaactacgtaaggctttaggctaaacttgatttaacgatttacatatattctatatttcaaagacactgttgtctttataaaaacagtatttatttatatttacaccttagtgaattcttagaatttttatgttgcctcagcatccatttagaatatgtttagctttctcatgccagaagcagggcttagtcacccttaatgccctttctagttctgtacctcctcccaattttkcaacgtggtcgagccagatatctgccttatacaactgcctcctggtgaccacctctctatgggacagctagataaaacctacttgactagcgtccctgacctctgtgccctgcatggacttcgcagatatgctgccgtgaccacctctcagtcgcagcacgactgcctggaacatgtgcctgctttctttaaactcaccaattagaactccccatgggagataccttggcttgtagatgcaagatgctgggtcatactctggtccccaataaaggcattggctgatgggtccccttctctctctctgtctcctcgcgctgaccaacctctgtgtgatcttcaggcgtgccatacccccagcccgtaataaaatctttactgccatcttgtgtttcttgtaatgactgaagaggttttctctatcataaagatcctaaatgaaaacatacccgcatatgagctctttctggtgtgtttccttcttattgcaattctgtcaattctatatgaaactattttccttcagcctgaaaaagtctctttggcatttttgtattgtagagcttctgacaacaaattctttaaacatttttctaagtgtggttcctctgaaggttattgtccatgtttcctggctgcttttaaaatggattacactttaaaacagattttttacaatattattgtgttgtgtctaggtaagaatttctttgtattgcttgggtttgcacatttttttttttttggttgttttttttttttttttttttttttgacagaatttcactcttaycacctgggctggagtgcagtggtgggatatctcggctcactgcaacctccgcctccggggttcaagttatcctcccacttcagccttccaagtagctgcaattacaggcctgtgcctccatgcctggctaatttttacccttttagtagagatgggttttcaccatgttgaccaggctggtctcaaactcctgacaagaggtgatctgcccacctcggcctcccaaactgctgggattacaggcatgagccaccgtgccaggcctgtatagccttttgaacctgtaatttaatgatgtcttgcatcagtcttggaaaattctcagttattaattcttcaaatgttgtttatgctcagttctctctctcttctcatcgagggacttcagttaaacatgctaggctttattcttctatgtatttagtctgtattttttaatctttttatatattggtgcttggttttgagtattttcttctgtcctagcttccggttcattgattttctttcagagtctaacctgctattaatctcacacaaattcttaatttcagcaatcatattttacttttacaattctagactttttattttccaaatctgccctcttccctttttttttttttttttttttttttgagacagggtctcactttgttgcccaggttggagcacagtagcataatcatagctcactgcagcctcaaccttcacaggctcaagcaattctcccacctcagccacctgagtagctgggaatgcaggtgtgcaccaccacacctacacatctggataatatatatatatatatatgtatatatacttttttttttttgtcgagacagggtttcgccatgttgcccaggctggtctcaaactcctgagctcaaacgatccactctcctcagcctcccatagcgttagaattacaggcgtgagccaccacatcccaccctgttctttttaatagtttctagttcttacaagtttcaattatacccttgaacaggtctgtagttctaatgggtcagtttctgtcatcagtaattgtgtgtgttattttatctctccaaatatctggttatctttgattgtgtatcaggaattctatttgaaaactgtgtctgtagaaataatttcaaggccttagataacccatcttcttccagatggaatttttgtcattgtttctgcaggcatctggggacattagcaatctaggaccactctaattcagtctcaggaactgtgattttccagggccacccacagtaccagtacttgaagtactagttccagtctctgagacagcaaatttattttcagttaaccctgattaccagggcctagttcttgtggcctcagaacacatcagaaggtattaccaggccttccatttggggcaggccctggacttccattgttgtcccttaacttcatgagaaaatcaaaagtctgttcagcctctcagttgccccgtcctgattcagctgcccattcccaaacaataagcagcccagktgccaagcccaaatacccagctctcaactggattctcatcttctcctagatcatggcccaggaatgcttcactagtttgttagctttctgatgctttaacagataaatatttttaattctccagtatttctagcctttcttgagggtggatggttggagcaatattttatttgaactgttgagattactattagtagaagcagagcctgaaaaatttttatttttaattttaattcattcatttctaaatttatccaattaaattcactcagttttaatttcaagtgttttgggatttgggttgaagaaattttgttctagtttatagcaacacagtatactatgtactactgctatactttaaaatgtatttaggggtttttgtggactaatatatgatcacttttacacagatatcatcttatgatatcaaacttagatttgatgaaatgagttggtaagcttcatrtcttttatatgttgtgaaaccttgaaattacatttggaagtatatttttgaatgaattttggtaatttgtatttccatttatatcatttagattttcaaaatatttaaccccctgtagtctacagttttataaatattctcatatacataaaaatatgyttaaattctttttcctactgtgtatatttgtgttttctctcatcccttatactttatcttttagcaaatgtttttgtattttatttttctaaaaaagctaaccttggttaataacaaaaatggaaattaagaaagcaaacggaaaagagtaggagaaaactgtrtaaatactataacactatgatcaaagagctatttaaaatgaaaagaatgtggattgagttaatacatgcatgcaaatactataggaaatcatatcagtaagaaaggcaggacacatcatattatgcccattgaagctacaactttataaaaatgtacctatgtgttagcaaagattaaaagcaaataatgaatgtaaaaatagctatagtttagtgactcatgagatttctgtcattcatwatttaaactgactgttatttatcctgctcttcctttttccaggaattccttgtgggctaccccccaccatcaccaatggagatttcattagcaccaacagagagaattttcactatggatcagtggtgacctaccgctgcaatcctggaagcggagggagaaaggtgtttgagcttgtgggtgagccctccatatactgcaccagcaatgacratcaagtgggcatctggagcggccccgcccctcagtgcattatacctaacaaatgcacgcctccaaatgtggaaaatggaatattggtatctgacaacagaagcttattttccttaaatgaagttgtggagtttaggtgtcagcctggctttgtcatgaaaggaccccgccgtgtgaagtgccaggccctgaacaaatgggagccggagctaccaagctgctccaggggtgagtctgactgaggcctagaagggccctgccagtgacatgcgttgctgttggatcaggagattagtatttgttcagggggagggatgtgtgctgagcagggtcgaggagcaaattttctaggtagtgaacatgaaattcagaaggtgtgtgtacatgcacatgtgctgaaattgcgaagcaaagctcaacctgggcaagggatatgatgtttctttggggttcttataaacagatctatcaattacctttgagtataataatggttgatacaaaatgagtgattcctctggccgggcactataatacaggctacatgtgaattttaatccttaaaacaaagttattaggtagttaccagttgttctatgtttgtctgtattgttttgcttgagatactgtcttgatctgtcactcacgttgaactgctgtggtgccatcatgacttacttcaacctccgcctctctggctcaagcaagtctcctgcctgagcctcccaagtagctgggaatataggtgcatgccaccatgcctggataagttttttatatattttttgtagggatagagtctcaccatgttgcccaggctggtctcgaactcctcagctcaagcaattcacccaccttggcctcccaaagtgctgggattataggcatgagccaccgtgcccggcctctatgttttayagagaatatgtgccttagacacatcagataacattctgagacagtaacttgcagacaaaactggattgcaagtccacctcactccagagccttggctttgctcatcagcattcagtcatgaaatcaaaacttactctagatactttcaaggagggagggatttcatgcaggttgtattagtctgttctcacattcctataaaaaactacttgagcctgggtaatttataaagaaaagatgcttacttgactcagagttctgtaggctgtacaggaggcatggctagggacccctcaggaaagttacaatcatggtggaaggtaaagaggaagcacgcatatcttcatatgcttggcaggagagagagagagagcaaggcagaggtgctacacactttggaacaagcagatctcgagagaactctatcacaagacagcactagggtgatggtgctcaaccatwagaaaccacctccatgatccagtcacttcccaccaggctccttctccaacactgggaattaccatttgacatgagatttgggaggggacatagagccaaaccatatcgcagctaataggtcacaaaaatgttagaagggcaggaaaagcaataggacaaaggcaaagttacgagagatcagggagctgctgtggctcccagtctacagcacaggagcctggagtgatggtgaaatggccagcccctcccactgagcaggcagctccctgtaagctgctagtgctgcaggagccaccactgctgccagaatgcagctgatattgctggagccaaagtcattggcatcgttacaattgaagctgtagctactcactgaagccatctatactgccactgcctgagccacttctagaagtagaacagattctgccatcatcctgctttttaatttggtatatatgcctccaattggcagaacctaaccagagcccagctatcaaggaagatgaacaattgtagttttaaggcttcctttgctagctgtcaaaagacagtgcagaagtgtgaggctgggggccaacagaaatttaaccagcacagcacctcaatattacatcaccaggcattgattagtccagggaaacactgggtgatgagccctgaaaatggacattacagcatcagagtatttacaaactccytaaagaagtcatttttctattccaatcccccatttgatgcttgagaaagctgaagtccagaaaagggaactgatctgctcaaagacaaaccgaaattattttttccattttataacagttttatgtaatttagttgagatccaaatgtgttctgatttcctgagttccaatcaactatattaagagagagccagcgctgcccttacaatatgttgcgtaaatatacactctcatcatggtgacagtaggtctttcagattttgttcgacagtttcccaccttctcactgaagtgaaatgaatgactaggcagcaccttgctacatagcatgaggagaggagacccatagttctttaccatcctatgtcaggtggccgctgagagaagacttgaaaggagatgagcatagatgtatggacgctctttgttgcaccagtgtgataggtgatggagggacctattagatgrgacatgggcaggggcactcctttattgcttaaaatgcaagactaaattggtgatgcctttctagaaaggaagtatgaagatacraaaatccatcattcctcccaattttgtactgggtgaacagtaattggaagcattctagaaggaactgtccattgtgaaatcttagttgcatactttagatgaaaaacaatgaattggagatacctctgttttagtcacagttgtgccacgtgtcagttctatgactgatggcaagacatcttccttgccctgtgtatttagtttatcaatgtaataaggctgttattctaactttattattatatatagattcgtaattattattcccttggccagtttaacagtgagaaaaaagttgttttcacacaattagctgtactttgtttctctctccccagtatgtcagccacctccagatgtcctgcatgctgagcgtacccaaagggacaaggacaacttttcaccygggcaggaagtgttctacagctgtgagcccggctacgacctcagaggggctgcgtctatgcgctgcacaccccagggagactggagccctgcagcccccacatgtgaaggtgactagactcttatctggcttgatatttttagcttgcgtctttattctccacatgccagtgatttctgttcatttttctttatctccagtgaaatcctgtgatgacttcatgggccaacttcttaatggccgtgtgctatttccagtaaatctccagcttggagcaaaagtggattttgtttgtgatgaagggtgagtatgagcttgcctgacctgctggacattgaaattggggttgggaatcagtctaaaaaggggagatttggtgtggcacacacacacacaccttcagagagatgaactttcgaaagtatacctaggaagaaaggaaagaaacatatagaactaataacatgagatatgaagaggaaactggaacatatattaactggcaagttcaaaggcaagtataactactggttatgaatatataagtaacacattaagcaaaaaatatcagccagaaacggtggctcacccctgtaatcctagcacctttgggaggttgaggcgggcagatcacctgaggtcaggagttggagaccagcctggacaacatgatgaaaccctgtctctactaaaaatacaaaagttagctgggtgtggtggcatgtgcctgtaatcccagctattccggaggctgaggcaccagaatcacttgaacctgggagatggagtttgcagtgagccgagatggcaccattgcactccagcgtggacaataagagtgaaactccatctcaggaaaaaaaatcatattttacaagcaaaaaggaatatgagtaatttagagagtcccaggaaaaaactggaagtaacaaaagcttattataaaaagctaggatcatttgtgaatcatttcagtaaattctttaaatcgtcaacagtgaaatttgtaataggactgaaaatgtaaaaatcagcattttttaaaaaaatccagccatatatcatctggttaatcatgggctctgggctctgagctggggtcctgatggctgctgttaatatttccrgcaagctcattaccttgtttatgtccacctagtgctcttcgcagggtgcacatctctacacgggagctgaccggcatgggcaacaaagcacctgatcccaaaatgtaacacagaatcttggcagcctccaaatgccagcacccagtaagagttaggagggcatcggggtccagcagacattgagaattttcgacaattgcatgcaraaaataagtcctctcttctttcctttttcccctagaatattcatgcttactcttcagcagcccaaattgcccttttgagccttcttcacgccatcacagatgtggagatgaaaggacagtctgttctctcgccagctatttcccacttttccactccaaactgggagctgttttacttgctgttccagggtcagagttaggaaggcattacattagaagactgggtttctaataacaacaatgagtgatttatcaggttatcatggagtaatcagtgaaactccaagcctgggtcctgggtcaaggggatggcgcctatgtcatgaccacctttttcagttcaagcaggactatcatgtgaccaagctactgcattttgccattctatattgttcccttctggaggctgtgatttttccagaataaggtagcctgtgcaactctgccacctgctggcctaaggtcctaataatcctgaaattggggctgggccttagattgtgaactaagggttctcttggctgaaacagctcacactattcactcctattttcttctttagatttcaattaaaaggcagctctgctagttactgtgtcttggctggaatggaaagcctttggaatagcagtgttccagtgtgtgaacgtgagtagcaggagtaacatttcaggccagtctctcccttcatctgttcagtatttgacccatgacctcccctaatgtggttcttcaattttctagtttgaattattgatttgaaaattgcttattttaataatgtttggttgtgaatcaaatgtatacatcacctgtctttggaaccatctgatctgtctctgtccttctgtattctgtgttctagtgcgataaatcctatggtagcatgattctaggtcaggagagattagataatgtgaagccttaacaatttgctttctttctctctttcttttgtttcttttttctcttccttcctttcttcagttctttcttcccttctctttctctcccctttcttccttccttcctccttctttcttttccattttgttcttccatcaggtgcagtctacaatttttgtatatatttgataatacacaaatattaaacatgcctttatttaatcaatatttattgatcacatactttgtgcctgatgttcatctagccacaggagttatatcagtgaacaagatgaatgaattccctgtccccatgttgtttccactcagttggggaaagggacaagaaaaaaaataaatacgatgctatgaagatagtagagcaaagcatttaggcatgagggaaaagtgaggagcaacattagacaaggcgagcagtttgagactccttaaattctcaaaacatgtacytaaataatttatgctgagagattcataaataatgtcatttttaaaaatttattatacttttaagttctagggtacatgtgcacaacgtgcaggtttgttacatatgtatacatgtgccatgttggtgtgctgcacccattaactcgtcatttacattaggtatatctcctaatgctatccctccccgcttcccccaccccacaacaggccccggtgtgtgatgttcccctttttgtgtccaagtgttctcactgttcaattcccacctatgagtgagaacatgtggtgtttggttttttgtccttgtgatagtttgctgagaatgatggtttccagcttcatccatgtccctaaaaaggacatgaactcatcaatttttatggctgcatagtattccatggtgtatatgtgccacattttcttaatccagtctatcattgatggacatttgggttggttccaagtctttgctattgtgaataatgcagcaataaacatatgtgtgcatgtgtctttatagcagcatgatttgtaatcctttgggtatatacccagtaatgggatcgctgggtcaaatggtatttctagttctagatctttgaggaatcaccacactgtcttccacaatggttgaactaggttacagtcccaccaacagtgtaaaaatgttcctatttctccacatcttctccagcacctgttgtttcctgactttttaatgatagccattctaactggtgtgagatggtatctcattgtggttttgatttgcatttctctgatggccagtgatgatgagcattttttcatgtgtctgttagctgcataaatgtcttcttttgagaagtgtctgttcatatccttcacccactttttgatggggttgtttttttcttttaaatttgtttgagttcattgtagattctggatattagccctttgtcagatgagtagattgcaaaaatgttctcccattctgtaggttgtctgttcactctgatggtagtttcttttgctgtgcagaagctctttagtttaattatatcccctttgtcaattttggcttttgttgccattgcttttggtgttttagacatgaagtccttgcccatgcctgtgtcctgaatggtattgcctatgttttcttctaggatttttatggttttaggtctaacatttatgtctttaatccatcttgaattaatttttgtatacagtgtaaggaagggatccagtttcagctttctacatatggctagccagttttcccagtaccatttattaaatagggaatcctttccccatttcttgtttttgtcaggtttgtcaaagatcagatggttgtagatgtgtagtattatttctgagggctctgttctgttgcattggtctatatctctgttttggtaccagtaccatgctgttttggttactgtagccttgtagtatagtttgaagtcaggtagtttgatgcctccagtttgttcttttggcttaggatagacttggcaatgcaggctttttaaataatgtcatttttaaaaaatgagccccatatgttcaataatgagtagactactgatttctcctagtctccccatttataatttccccaatagaagatagaactttgcttcatttcttgattctaatgattgggaaatgtgtttctttagaaaaccatgaaattttactaaaatgtttatgttgttagaaatggacatcttacagtgctttttagagtaaaattttggaagaacataacttatatagagattcttgctgtctaagaaattcagtgctccttgaagcagcatgacaaatttctgttctaccatcatgaatgaaagctcattgattggactactcaagctttctcttatttttcataactgttgctagttaaagtagcttcttccaaattccagttctaatgaaaaatgccaattagaaatgaggaagaaactgttctaaacaaatcagcagatgctagaaaggagaaacaacttgaaacctgacccagaaagttaaaagagaaaataaatcatcaacagacctagacattttcaaaagcaaagccatctgaatccatttggagttgttttttatcatggccttactatgttttaattcactgtgacagggctattgttatcactgagattgatgatcaatatcaagaagtaatcagcgaaaggtttcacctatttaagatgattagcacacatatgtacatttgagaaatatttcctaagaatgcaggctccttcctcagcactctgtccccaggatcctgatgagtggctgacacaggacaagtgcttaattaatatatattgactaaatgaatgagcaacccttcaaaatggctatttttctttttcaaatgttttgctacttcattaaagttgtaaagtttccattgtccaggaaccgttactatccggaagattcaggatagacaagtctcttttgtactttgcaatacactttcattgatatctcatttaatccaactcttcaaagtcctaatgtctactgtcatctccttagcatattttcagcaacaccaatcatagcaccctgtaattgcagaatacctctggtgaaactcctgaatgaaacttagagctttyrtrttttttctagaaatcttttgtccaagtcctccagttattcctaatgggagacacacaggaaaacctctggaagtctttccctttggraaarcagtaaattacacatgcgacccccacccagacagagggacgagcttcgacctcattggagagagcaccatccgctgcacaagtgaccctcaagggaatggggtttggagcagccctgcccctcgctgtggaattctgggttagtgctcatttccccacatcccaaatgggttcagaatatctaacccaggccctccatatttccgtaattacaatgtggtatttatttgtgcatttgccacaatggaatgccaaaccaatgatagatggttctaaggtaggtcaacacataagatcctgatgacctttgcagatggagggactgatgaaaaaagagggaggcggtgagtggtgggaaagtccttcattagaatcatatgaattaaaaacagatgcctgtgaatctccttattgaaatgtttggtttagaaatctgacctagaaaatcggtggctccttctgccaggaaacgtcttgagttcccgcccatgcttgacagcctctcattggagttttgatgacttgaagtacaaggaaaccagacaggaaaggtggaacctgggcagaaaaactctttctggcttcctaaaaatgtgaaaaattaaatgggagctatctttacattaaattatatgagcattagctgagcgtggtggcaattgcctgtggtcccagctannnnnnnnnnnnnnnnnnnnnnnnnnnnnnnnnnnnnnnnnnnnnnnnnnnnnnnnnnnnnnnnnnnnnnnnnnnnnnnnnnnnnnnnnnnnnnnnnnnnnnnnnnnnnnnnnnnnnnnnnnnnnnnnnnnnnnnnnnnnnnnnnnnnnnnnnnnnnnnnnnnnnnnnnnnnnnnnnnnnnnnnnnnnnnnnnnnnnnnnnnnnnnnnnnnnnnnnnnnnnnnnnnnnnnnnnnnnnnnnnnnnnnnnnnnnnnnnnnnnnnnnnnnnnnnnnnnnnnnnnnnnnnnnnnnnnnnnnnnnnnnnnnnnnnnnnnnnnnnnnnnnnnnnnnnnnnnnnnnnnnnnnnnnnnnnnnnnnnnnnnnnnnnnnnnnnnnnnnnnnnnnnnnnnnnnnnnnnnnnnnnnnnnnnnnnnnnnnnnnnnnnnnnnnnnnnnnnnnnnnnnnnnnnnnnnnnnnnnnnnnnnnnnnnnnnnnnnnnnnnnnnnnnnnnnnnnnnnnnnnnnnnnnnnnnnnnnnnnnnnnnnnnnnnnnnnnnnnnnnnnnnnnnnnnnnnnnnnnnnnnnnnnnnnnnnnnnnnnnnnnnnnnnnnnnnnnnnnnnnnnnnnnnnnnnnnnnnnnnnnnnnnnnnnnnnnnnnnnnnnnnnnnnnnnnnnnnnnnnnnnnnnnnnnnnnnnnnnnnnnnnnnnnnnnnnnnnnnnnnnnnnnnnnnnnnnnnnnnnnnnnnnnnnnnnnnnnnnnnnnnnnnnnnnnnnnnnnnnnnnnnnnnnnnnnnnnnnnnnnnnnnnnnnnnnnnnnnnnnnnnnnnnnnnnnnnnnnnnnnnnnnnnnnnnnnnnnnnnnnnnnnnnnnnnnnnnnnnnnnnnnnnnnnnnnnnnnnnnnnnnnnnnnnnnnnnnnnnnnnnnnnnnnnnnnnnnnnnnnnnnnnnnnnnnnnnnnnnnnnnnnnnnnnnnnnnnnnnnnnnnnnnnnnnnnnnnnnnnnnnnnnnnnnnnnnnnnnnnnnnnnnnnnnnnnnnnnnnnnnnnnnnnnnnnnnnnnnnnnnnnnnnnnnnnnnnnnnnnnnnnnnnnnnnnnnnnnnnnnnnnnnnnnnnnnnnnnnnnnnnnnnnnnnnnnnnnnnnnnnnnnnnnnnnnnnnnnnnnnnnnnnnnnnnnnnnnnnnnnnnnnnnnnnnnnnnnnnnnnnnnnnnnnnnnnnnnnnnnnnnnnnnnnnnnnnnnnnnnnnnnnnnnnnnnnnnnnnnnnnnnnnnnnnnnnnnnnnnnnnnnnnnnnnnnnnnnnnnnnnnnnnnnnnnnnnnnnnnnnnnnnnnnnnnnnnnnnnnnnnnnnnnnnnnnnnnnnnnnnnnnnnnnnnnnnnnnnnnnnnnnnnnnnnnnnnnnnnnnnnnnnnnnnnnnnnnnnnnnnnnnnnnnnnnnnnnnnnnnnnnnnnnnnnnnnnnnnnnnnnnnnnnnnnnnnnnnnnnnnnnnnnnnnnnnnnnnnnnnnnnnnnnnnnnnnnnnnnnnnnnnnnnnnnnnnnnnnnnnnnnnnnnnnnnnnnnnnnnnnnnnnnnnnnnnnnnnnnnnnnnnnnnnnnnnnnnnnnnnnnnnnnnnnnnnnnnnnnnnnnnnnnnnnnnnnnnnnnnnnnnnnnnnnnnnnnnnnnnnnnnnnnnnnnnnnnnnnnnnnnnnnnnnnnnnnnnnnnnnnnnnnnnnnnnnnnnnnnnnnnnnnnnnnnnnnnnnnnnnnnnnnnnnnnnnnnnnnnnnnnnnnnnnnnnnnnnnnnnnnnnnnnnnnnnnnnnnnnnnnnnnnnnnnnnnnnnnnnnnnnnnnnnnnnnnnnnnnnnnnnnnnnnnnnnnnnnnnnnnnnnnnnnnnnnnnnnnnnnnnnnnnnnnnnnnnnnnnnnnnnnnnnnnnnnnnnnnnnnnnnnnnnnnnnnnnnnnnnnnnnnnnnnnnnnnnnnnnnnnnnnnnnnnnnnnnnnnnnnnnnnnnnnnnnnnnnnnnnnnnnnnnnnnnnnnnnnnnnnnnnnnnnnnnnnnnnnnnnnnnnnnnnnnnnnnnnnnnnnnnnnnnnnnnnnnnnnnnnnnnnnnnnnnnnnnnnnnnnnnnnnnnnnnnnnnnnnnnnnnnnnnnnnnnnnnnnnnnnnnnnnnnnnnnnnnnnnnnnnnnnnnnnnnnnnnnnnnnnnnnnnnnnnnnnnnnnnnnnnnnnnnnnnnnnnnnnnnnnnnnnnnnnnnnnnnnnnnnnnnnnnnnnnnnnnnnnnnnnnnnnnnnnnnnnnnnnnnnnnnnnnnnnnnnnnnnnnnnnnnnnnnnnnnnnnnnnnnnnnnnnnnnnnnnnnnnnnnnnnnnnnnnnnnnnnnnnnnnnnnnnnnnnnnnnnnnnnnnnnnnnnnnnnnnnnnnnnnnnnnnnnnnnnnnnnnnnnnnnnnnnnnnnnnnnnnnnnnnnnnnnnnnnnnnnnnnnnnnnnnnnnnnnnnnnnnnnnnnnnnnnnnnnnnnnnnnnnnnnnnnnnnnnnnnnnnnnnnnnnnnnnnnnnnnnnnnnnnnnnnnnnnnnnnnnnnnnnnnnnnnnnnnnnnnnnnnnnnnnnnnnnnnnnnnnnnnnnnnnnnnnnnnnnnnnnnnnnnnnnnnnnnnnnnnnnnnnnnnnnnnnnnnnnnnnnnnnnnnnnnnnnnnnnnnnnnnnnnnnnnnnnnnnnnnnnnnnnnnnnnnnnnnnnnnnnnnnnnnnnnnnnnnnnnnnnnnnnnnnnnnnnnnnnnnnnnnnnnnnnnnnnnnnnnnnnnnnnnnnnnnnnnnnnnnnnnnnnnnnnnnnnnnnnnnnnnnnnnnnnnnnnnnnnnnnnnnnnnnnnnnnnnnnnnnnnnnnnnnnnnnnnnnnnnnnnnnnnnnnnnnnnnnnnnnnnnnnnnnnnnnnnnnnnnnnnnnnnnnnnnnnnnnnnnnnnnnnnnnnnnnnnnnnnnnnnnnnnnnnnnnnnnnnnnnnnnnnnnnnnnnnnnnnnnnnnnnnnnnnnnnnnnnnnnnnnnnnnnnnnnnnnnnnnnnnnnnnnnnnnnnnnnnnnnnnnnnnnnnnnnnnnnnnnnnnnnnnnnnnnnnnnnnnnnnnnnnnnnnnnnnnnnnnnnnnnnnnnnnnnnnnnnnnnnnnnnnnnnnnnnnnnnnnnnnnnnnnnnnnnnnnnnnnnnnnnnnnnnnnnnnnnnnnnnnnnnnnnnnnnnnnnnnnnnnnnnnnnnnnnnnnnnnnnnnnnnnnnnnnnnnnnnnnnnnnnnnnnnnnnnnnnnnnnnnnnnnnnnnnnnnnnnnnnnnnnnnnnnnnnnnnnnnnnnnnnnnnnnnnnnnnnnnnnnnnnnnnnnnnnnnnnnnnnnnnnnnnnnnnnnnnnnnnnnnnnnnnnnnnnnnnnnnnnnnnnnnnnnnnnnnnnnnnnnnnnnnnnnnnnnnnnnnnnnnnnnnnnnnnnnnnnnnnnnnnnnnnnnnnnnnnnnnnnnnnnnnnnnnnnnnnnnnnnnnnnnnnnnnnnnnnnnnnnnnnnnnnnnnnnnnnnnnnnnnnnnnnnnnnnnnnnnnnnnnnnnnnnnnnnnnnnnnnnnnnnnnnnnnnnnnnnnnnnnnnnnnnnnnnnnnnnnnnnnnnnnnnnnnnnnnnnnnnnnnnnnnnnnnnnnnnnnnnnnnnnnnnnnnnnnnnnnnnnnnnnnnnnnnnnnnnnnnnnnnnnnnnnnnnnnnnnnnnnnnnnnnnnnnnnnnnnnnnnnnnnnnnnnnnnnnnnnnnnnnnnnnnnnnnnnnnnnnnnnnnnnnnnnnnnnnnnnnnnnnnnnnnnnnnnnnnnnnnnnnnnnnnnnnnnnnnnnnnnnnnnnnnnnnnnnnnnnnnnnnnnnnnnnnnnnnnnnnnnnnnnnnnnnnnnnnnnnnnnnnnnnnnnnnnnnnnnnnnnnnnnnnnnnnnnnnnnnnnnnnnnnnnnnnnnnnnnnnnnnnnnnnnnnnnnnnnnnnnnnnnnnnnnnnnnnnnnnnnnnnnnnnnnnnnnnnnnnnnnnnnnnnnnnnnnnnnnnnnnnnnnnnnnnnnnnnnnnnnnnnnnnnnnnnnnnnnnnnnnnnnnnnnnnnnnnnnnnnnnnnnnnnnnnnnnnnnnnnnnnnnnnnnnnnnnnnnnnnnnnnnnnnnnnnnnnnnnnnnnnnnnnnnnnnnnnnnnnnnnnnnnnnnnnnnnnnnnnnnnnnnnnnnnnnnnnnnnnnnnnnnnnnnnnnnnnnnnnnnnnnnnnnnnnnnnnnnnnnnnnnnnnnnnnnnnnnnnnnnnnnnnnnnnnnnnnnnnnnnnnnnnnnnnnnnnnnnnnnnnnnnnnnnnnnnnnnnnnnnnnnnnnnnnnnnnnnnnnnnnnnnnnnnnnnnnnnnnnnnnnnnnnnnnnnnnnnnnnnnnnnnnnnnnnnnnnnnnnnnnnnnnnnnnnnnnnnnnnnnnnnnnnnnnnnnnnnnnnnnnnnnnnnnnnnnnnnnnnnnnnnnnnnnnnnnnnnnnnnnnnnnnnnnnnnnnnnnnnnnnnnnnnnnnnnnnnnnnnnnnnnnnnnnnnnnnnnnnnnnnnnnnnnnnnnnnnnnnnnnnnnnnnnnnnnnnnnnnnnnnnnnnnnnnnnnnnnnnnnnnnnnnnnnnnnnnnnnnnnnnnnnnnnnnnnnnnnnnnnnnnnnnnnnnnnnnnnnnnnnnnnnnnnnnnnnnnnnnnnnnnnnnnnnnnnnnnnnnnnnnnnnnnnnnnnnnnnnnnnnnnnnnnnnnnnnnnnnnnnnnnnnnnnnnnnnnnnnnnnnnnnnnnnnnnnnnnnnnnnnnnnnnnnnnnnnnnnnnnnnnnnnnnnnnnnnnnnnnnnnnnnnnnnnnnnnnnnnnnnnnnnnnnnnnnnnnnnnnnnnnnnnnnnnnnnnnnnnnnnnnnnnnnnnnnnnnnnnnnnnnnnnnnnnnnnnnnnnnnnnnnnnnnnnnnnnnnnnnnnnnnnnnnnnnnnnnnnnnnnnnnnnnnnnnnnnnnnnnnnnnnnnnnnnnnnnnnnnnnnnnnnnnnnnnnnnnnnnnnnnnnnnnnnnnnnnnnnnnnnnnnnnnnnnnnnnnnnnnnnnnnnnnnnnnnnnnnnnnnnnnnnnnnnnnnnnnnnnnnnnnnnnnnnnnnnnnnnnnnnnnnnnnnnnnnnnnnnnnnnnnnnnnnnnnnnnnnnnnnnnnnnnnnnnnnnnnnnnnnnnnnnnnnnnnnnnnnnnnnnnnnnnnnnnnnnnnnnnnnnnnnnnnnnnnnnnnnnnnnnnnnnnnnnnnnnnnnnnnnnnnnnnnnnnnnnnnnnnnnnnnnnnnnnnnnnnnnnnnnnnnnnnnnnnnnnnnnnnnnnnnnnnnnnnnnnnnnnnnnnnnnnnnnnnnnnnnnnnnnnnnnnnnnnnnnnnnnnnnnnnnnnnnnnnnnnnnnnnnnnnnnnnnnnnnnnnnnnnnnnnnnnnnnnnnnnnnnnnnnnnnnnnnnnnnnnnnnnnnnnnnnnnnnnnnnnnnnnnnnnnnnnnnnnnnnnnnnnnnnnnnnnnnnnnnnnnnnnnnnnnnnnnnnnnnnnnnnnnnnnnnnnnnnnnnnnnnnnnnnnnnnnnnnnnnnnnnnnnnnnnnnnnnnnnnnnnnnnnnnnnnnnnnnnnnnnnnnnnnnnnnnnnnnnnnnnnnnnnnnnnnnnnnnnnnnnnnnnnnnnnnnnnnnnnnnnnnnnnnnnnnnnnnnnnnnnnnnnnnnnnnnnnnnnnnnnnnnnnnnnnnnnnnnnnnnnnnnnnnnnnnnnnnnnnnnnnnnnnnnnnnnnnnnnnnnnnnnnnnnnnnnnnnnnnnnnnnnnnnnnnnnnnnnnnnnnnnnnnnnnnnnnnnnnnnnnnnnnnnnnnnnnnnnnnnnnnnnnnnnnnnnnnnnnnnnnnnnnnnnnnnnnnnnnnnnnnnnnnnnnnnnnnnnnnnnnnnnnnnnnnnnnnnnnnnnnnnnnnnnnnnnnnnnnnnnnnnnnnnnnnnnnnnnnnnnnnnnnnnnnnnnnnnnnnnnnnnnnnnnnnnnnnnnnnnnnnnnnnnnnnnnnnnnnnnnnnnnnnnnnnnnnnnnnnnnnnnnnnnnnnnnnnnnnnnnnnnnnnnnnnnnnnnnnnnnnnnnnnnnnnnnnnnnnnnnnnnnnnnnnnnnnnnnnnnnnnnnnnnnnnnnnnnnnnnnnnnnnnnnnnnnnnnnnnnnnnnnnnnnnnnnnnnnnnnnnnnnnnnnnnnnnnnnnnnnnnnnnnnnnnnnnnnnnnnnnnnnnnnnnnnnnnnnnnnnnnnnnnnnnnnnnnnnnnnnnnnnnnnnnnnnnnnnnnnnnnnnnnnnnnnnnnnnnnnnnnnnnnnnnnnnnnnnnnnnnnnnnnnnnnnnnnnnnnnnnnnnnnnnnnnnnnnnnnnnnnnnnnnnnnnnnnnnnnnnnnnnnnnnnnnnnnnnnnnnnnnnnnnnnnnnnnnnnnnnnnnnnnnnnnnnnnnnnnnnnnnnnnnnnnnnnnnnnnnnnnnnnnnnnnnnnnnnnnnnnnnnnnnnnnnnnnnnnnnnnnnnnnnnnnnnnnnnnnnnnnnnnnnnnnnnnnnnnnnnnnnnnnnnnnnnnnnnnnnnnnnnnnnnnnnnnnnnnnnnnnnnnnnnnnnnnnnnnnnnnnnnnnnnnnnnnnnnnnnnnnnnnnnnnnnnnnnnnnnnnnnnnnnnnnnnnnnnnnnnnnnnnnnnnnnnnnnnnnnnnnnnnnnnnnnnnnnnnnnnnnnnnnnnnnnnnnnnnnnnnnnnnnnnnnnnnnnnnnnnnnnnnnnnnnnnnnnnnnnnnnnnnnnnnnnnnnnnnnnnnnnnnnnnnnnnnnnnnnnnnnnnnnnnnnnnnnnnnnnnnnnnnnnnnnnnnnnnnnnnnnnnnnnnnnnnnnnnnnnnnnnnnnnnnnnnnnnnnnnnnnnnnnnnnnnnnnnnnnnnnnnnnnnnnnnnnnnnnnnnnnnnnnngccaggagaaattagagcagaaatatctctttcaatagtgagagaataggaaaaagaagtagaaaagctgggaacaataggtaaagtttaggctaggccttagacttctcctgcattgtaatccctctggtttgccacatatgcatgctgtcaggaagttgatgaggtatgtacagcacaatttattttccattttttgcctttaggcaccgactcattggtcactcatctgctgaatgtatcctctcgggcaatgctgcccattggagcacgaagccgccaatttgtcaacgtgagttgaaatctctttccccattcaccccaccgtttaatcctagagttgtcctcctagaattacaaagaatggatctcatccctcttggaaatggtatccttctcatatttgaagaatccagtcatatccttaaaatggctcacagcattccaaacttccaccttcagctagaaatgcttttttattttttcttatctcaaggtctaattttttttaaactagtctttagctcacttaaacagtcccccaatttcatcctctgttgggtgaacacctcccagtttaaagagcattttatttagtgaagtcaacaaatacaaagtcagtgaaagaaaccccatatcctctctgcaagctcttagtatcacatcagatattcaagccatgcagctctttcttccttcttattctttgtctaaacaggatcatgccatcttccctgtgagttgtttggaagatgagctttctacattttggggagcaaagacgaatgagcaattgcaagctaacaaggaatataaaatgtgtataatcctgggtttagtgatggtgtgaggaaatcagcaatttcaaacccagttggtgggaggataagtgggaacaaactttgtagaaggccaataaactggctgggcactgccctacggtagagtaggacacagtattcagttcttccaagatcagacgagattgggcgcatttagggtggtatggttgtagatcagtatccagttctttttattatttctgaatctgtaagtatcatgtttattatatgtaatattrtatatttgtactttgtctttgttagttcttccagagcttttgttcttattatttaataaagatgttatactgagccacatgtggtgactcaaacgtgtaatcccagcactttgggaggcctaggtgagcagatggcttgagtccaggagtttgagaccagcctgtacaacatactgaaacgctgtctctacaaaaatacaaaaactatacgggcatggtggcacatgcctgtagtcccaactactcaggagactgagaggtgggaggattgcttgagccagagaggtcgaggctgcaatgagccatgatcgtgccactgcactccagtctgggcagcagagcaagaccttgtctcaaaaaaaatgctatgctgtatgctttattatattaatatccaatagaataaagacacatgccttctatatagagagaactaaattaataatggtgagataacagttaaattctcatttagcaggagaaataaaaacatagactataggctaggcacagtggctcatacctgtaatcccagcacattaggaggctgaggtgggcagatcacttgaggtcagtagtttgagaccaccctggccaacataatgaaaccccgcctctactaaaaatacaaaagttagccgagtttggtggcrcatgcctgaaatcccagctactcaggaggctgaggcaggaaaatcgcttgaacctgggaggcaagggctgcagtgagccaagatcacgccactgcactccagcctggggaacagagtgaggatctgttaaaaaaaaaaaaaaaaagtggactctaataatacatggacacatttagtgaaataaacttaactgagtagagcagaacttataatattttaaaactgtaagaacatgtctgtacmttagcaaatagtagatgagaatagtattttcaatatttacttctggtaatttggaattaaaaaaaaaacttttgggaaaatttacaataaagtatgattttaacaaaccagkctaggcgtggtggctcacgcttataatcccagcactttgaaaagcagaggcatgcagattgcttgaggccaggagttcaagactagcctgcccaacatggccaaaccccatctctactaaaaatacaaaaataaaccagacatggtagtgcatgcctgtgatcccagctactcgggaagttgaggtaggaggattgcttgacctgggaagtggaggttgcagtgagccatgatcgtgccactacactccagcctgggtgacagagcaagactctgtcccaaggttttgtyttggttaacttgctgtccctttttccaggaattccttgtgggctaccccccaccatcgccaatggagatttcattagcaccaacagagagaattttcactatggatcagtggtgacctaccgctgcaatcctggaagcggagggagaaaggtgtttgagcttgtgggtgagccctccatatactgcaccagcaatgacgatcaagtgggcatctggagcggcccggcccctcagtgcattayacctaacaaatgcacgcctccaaatgtggaaaatggaatattggtatctgacaacagaagcttattttccttaaatgaagttgtggagtttaggtgtcagcctggctttgtcatgaaaggaccccgccgtgtgaagtgccaggccctgaacaaatgggagccggagctaccaagctgctccaggggtgagtctgactgaggcctagtagggccctgcaagtgacatgcgttgctgttggatcaggagattagtatttgttcacggggagggatgtgtgctgagcagggtcgaggagcaaattttctaagtagtgaacatgaaattcaggtgtgtagacatgcacatgtgctgaaattgcgaagcaaagctcaacctgggcaagggatatgatgtttctttggggttcttataaacagatctatcaattacctttgagtataataatgkttgatacaaaatgagtgattcctctgcccaggcactataatacaggctacatgtgaattttaatcctkaaaacaaagttattaggtagttcccagttgttctatgtttgtctgttttgttttgcttgagatactgtcttgatctgtcactcaggttggactgcagtggtgccatcatggcatacttcaccctccacctccctgactcaagcaagtctcctgcctgagcctcccaagtagctgggaatgtaggtgcatgccaccatgcctggctaagttttttatattttttttgtagggacagagtctcaccatgctgcccaggctggtctcaaactcctcagctcaagcacccacccaccttgggctcccaaagtgctgggattataggcatgagccactgtgcccggcctctatgttttacagagaatatgtgccttagacacatcagataacattctgagacagtaacttgcagacaaaactggattgcaagtccacctcactccagagccttggctttgctcatcagcattcagtcatgaaatcaaaacttactctagatactttcaaggagggagggatttcatgcaggttgtattagtctgttctcacattcctataaaaaactacttgagcctgggtaatttataaagaaaagatgtttaattgactcagagttctgtaggctgtacaggaggcatggctgggaaagttacaatcatggtggaaggcaaagaggaagcacgcatatcttcatatgcttggcaggagagagagagagagcaaggcagaggtgttacagactttgaaacaagcagatcttgacagaactctatcacaagacagcactagggtgatggtgctcaaccattagaaaccacctccatgatccagtcacctcccaccaggctccttctccaacactgggaattaccatttgacatgagatttgggaggggacatagagccaaaccatatcgcagctaataggtcacaaaaatgttagaagggcaggaaaagcaataggacaaaggcaaagttacgagagatcagggagctgctgtggctcccagtctacagcacaggagcctggagtgatggtgaaatggccagcccctcccactgagcaggcagctccctgtaagctgctaatactgcaggagccaccattgctgccagaatgcagctgatattgctggagccaaagtcattggcatcgttacaattgaagctgtagctactcactgaagccatctatactgccactgcctgagccacttctagaagtagaacagattctgccatcatcctgctttttaatttggtatatatgcctccaattggcagaacctaaccagagccyagctatcaaggaagatgaacgatttatttttaaggcctccattgttagctgtcaaaagacagtgcagaagtgtgaggctgggggccaacagaaatttaaccagcacagcacctcaatattacatcaccaggcattgattagtccagggaaacactgggtgatgagccctgaaaatggacattacagcatcagagtatttacaaactccytaaagaagtcatttttctattccaatcccccatttgatgcttgagaaagctgaagtccagaaaagggaactgatctgctcaaagacaaactgaaattactttttccattttataacagttttatgtaatttatttgagatccaaatgtgttttgatttcccaagatcagatcaactayattaagagagagcctgagmtgccgttacaatatgttgtgtgaaattacactctcatyatggtgacagtaggtctttcagattttgttcgacagtttcccaccttctcactgaagtgaaatgaatgactaggcagcaccttgctacatagcatgaagagaggagacccatagttctttaccaccctatgtcaggtggccgctgagagaagacttgaaaggagatgagcatagatgtatggacgctctttgttgcaccagtgtgataggtgatggagggacctattagatgggacatgggcaggggcactcctttattgcttaaaatgcaagactaaattggtgatgcctttctagaaaggaagtatgaagatacaaaaatccatcattcctcccaattttgtactgggtgaacagtaattggaagcattctagaaggaactgtccattgtgaaatcttagttgcatactttagatgaaaaacaatgaattggagatacctctgttttagtcacagttgtgccatgtgtcagttctatgactgatggcaagacatcttccttgccccgtgtatttagtttatcaatgtaataaggctgttattctaactttattattatatatagattcgtaattattattcccttggccagtttaacagtgagaaaaaagttgttttcacacaattagctgtactttgtttctctctccccagtatgtcagccacctccagatgtcctgcatgctgagcgtacccaaagggacaaggacaacttttcacccgggcaggaagtgttctacagctgtgagcccggctacgacctcagaggggctgcgtctatgcgctgcacaccccagggagactggagccctgcagcccccacatgtgaaggtgactagactcttatctggcttgatatttttagcttgcgtctttattctccacatgccagtgatttctgttcatttttctttatctccagtgaaatcctgtgatgacttcatgggccaacttcttaatggccgtgtgctatttccagtaaatctccagcttggagcaaaagtggattttgtttgtgatgaagggtgagtatgagcttgcctgacctgctggacattgaaattggggttgggaatcagtctaaaaaggggagatttggtgtggcacacacacacacaccttcagagagatgaactttcgaaagtatacctaggaagaaaggaaagaaacatatagaactaataacatgagatatgaagaggaaactggaacatatattaactggcaagttcaaaggcaagtataactagtggttatgaatatataggtaacacattaagcaaaaaatatcagccagamacggtggctcacgtgtgtaatcccagcacctttgggaggttgaggcaggcagatcacctgaggtcaggagttggagaccagcctggacaacatggtgaaaccctgtctctactaaaaatacaaaagttagctgggtttggtggcatgtgcctgtaatcccagctactccggaggctgaggcaccagaatcacttgaacctgggaggcggagtttgcagtgagccgagatggcaccattgcactccagcgtgaacaatgagtgaaactccatctcaggaaaaaaatcatattttacaagcaaaagggaatatgagtaatttagagagtcccaggaaaaattgcaagtaatgaaaagcttattattaaaagctaggatcctttaagaatcatttcagtaaattctttaaaccatcaacagtgaaatttgtaataggactgaaaatgtaaaaatcagcatttttttaaaaattcagtcatatatcttctggctagtcatgggctctgggctctgagctggggtcgtgatggctgctgttaatattcccagcaaggtcattaccttgtttatgtccatctagtgctcttcacagcgtgcacatctctacacaggagctgaccggcatgggcaacaaagcacctgatcccataatgtaacacagaatcttggcagcctccaaatgccagcacccagtaagagttaggagggcatcagggtccaaaagactgagaattttcgacaattgcatacaaaaatcatgtcctctcttctttcctttttcccctagaatattcatgcttactcttcagcagcccaaactgcccttttgagccttcttcacgccatcacagatgtggagatgaaaggacaatctctgttctctcgccagctatttcccacttttccactccaaactgggagctgttttacttgctgttccagggtcagagttaggaaggcattacattagaagactgggtttctaataacaacaatgagtgatttatcaggttatcatggagtaatcagtgaaactccaagcctgggtcctgggtcaaggggatggcgcctatgtcatgaccacctttttcaattcaagcaggactatcatgtgaccaagctactacattttgccattctatattgttcccttctggaggctgtgatttttccagaataaggtagcctgtgcaactctgccatctgctggcctcagatcctcaaaatcctgaaattggggctgggccttagattgtgarctaagtgtcctcttggctgaaacagctcactattcactcctattttcttctttagatttcaattaaaaggcagctctgctagttattgtgtcttggctggaatggaaagcctttggaatagcagtgttccagtgtgtgaacgtgagtaataggagcaacatttcaggccaatctctccccttcatctgttcactatttgtcctatggcctccctcaatgtgattcttcaatattctagtcttaattatcgatttaaaaatagtttattttaataatgtttggttgtgaatcaatatgtacatcacctgtctttgcaaccatctgatctgtctctgtccttctgcattctctgttctagtgcgataaatcctttggtcttgtgctcctaggtcaggagagattagataatgtgaagctttaacaattttctttctttctctagttttttctttcttttttctcttccttccatccttcagttctttcttcccttcttctctccttctcccctttcttctttccttcctcccttctttctttttcattttgttctcccatcaaagtgcagtcagtctacaatttatatatatatgataatacacaaatattgaacatggctttatttaatcaatatttattgatcacatactttgtgcctgatgttcatctagccactggagttatatcaatgaacaagatggatgaattccctgtccccatgttgtttctacttaggtggggagagggacaagaaaaaaaataaattcaatgctatgagacaatagagcaaagcactgaggaatgaggcaaaaatggggagcaacattagacagggtgagcagtttgagactccttaaattctcaaaacatgtacctaaataatttatgctgagagattcataaataataagtcatttttttwaaatgagcctcatatgttcaataatcagtagactactgatttctcctagtctacccatgtataatttccccaatggaagatagaactttgcttcaattcttgattctaatgattggaaaacgtgtttctttagaaaatcatgaaattttactaaaatgtttatgttgttagaaatatacttggacatcttacagtgatttttagagtaaaattttggaagaacataacttatatagagattcttgctgtctaagaaatccagtgctccttgaagcagtatgacaagtgtctgttctactatcatgaatgaaagctcattaactggactactcaagctttctcttatttttcataactcttgctagttaaaatagtttcttccaaatgccagttctaatgaaaaatgccaattagaaatgaggaagagactgttctaaacaaatcattagatgctagaaaggagtaacaacttgaaacctgacccagagagtaaaaagagaaaataaatcatcaacagacctagacattttcaaaagcaaagccatctgaatccatttggagttttttttttttttttatcatggcctgaytatgtttcaattcactgtgacagggctattgttatcactgagattgatgatcaatatcaataagtaatcagtgaaaggtttcacctatttaagatgattagcacacatatatacatttgagaaatatttcctaagaatgtaggctccttcctcagcgctgtgtccccaggatcctgatgaagggctgacacaggataagtgctcaattaatatatattgactaaatgawtaaataacccttcaaaatggttatttttcttcttcaaatgttttgctacttcattaaagttgtaaagtttctactgtccaggaactgttactatccggaagattcaggatagacaaatctcttttgtactttgcaatacattttcattgacatctcatttaatccaactcttcaaagtcctaatgtctactgtcatctccttagcatattttcagcaacaccaatcatagcaccctgtaattgcagaatacctctggtgaaactcctgaatgaaacttagagcttttgtatgttttctagaaatcttttgtccaagtcctccagttattcctaatgggagacacacaggaaaacctctggaagtctttccctttggaaaagcagtaaattacacatgcgacccccacccagacagagggacgagcttcgacctcattggagagagcaccatccgctgcacaagtgaccctcaagggaatggggtttggagcagccctgcccctcgctgtggaattctgggttagtgctcatttccccacatccctaatgggttcagaatatctaacccagccnnnnnnnnnnnnnnnnnnnnnnnnnnnnnnnnnnnnnnnnnnnnnnnnnnnnnnnnnnnnnnnnnnnnnnnnnnnnnnnnnnnnnnnnnnnnnnnnnnnnnnnnnnnnnnnnnnnnnnnnnnnnnnnnnnnnnnnnnnnnnnnnnnnnnnnnnnnnnnnnnnnnnnnnnnnnnnnnnnnnnnnnnnnnnnnnnnnnnnnnnnnnnnnnnnnnnnnnnnnnnnnnnnnnnnnnnnnnnnnnnnnnnnnnnnnnnnnnnnnnnnnnnnnnnnnnnnnnnnnnnnnnnnnnnnnnnnnnnnnnnnnnnnnnnnnnnnnnnnnnnnnnnnnnnnnnnnnnnnnnnnnnnnnnnnnnnnnnnnnnnnnnnnnnnnnnnnnnnnnnnnnnnnnnnnnnnnnnnnnnnnnnnnnnnnnnnnnnnnnnnnnnnnnnnnnnnnnnnnnnnnnnnnnnnnnnnnnnnnnnnnnnnnnnnnnnnnnnnnnnnnnnnnnnnnnnnnnnnnnnnnnnnnnnnnnnnnnnnnnnnnnnnnnnnnnnnnnnnnnnnnnnnnnnnnnnnnnnnnnnnnnnnnnnnnnnnnnnnnnnnnnnnnnnnnnnnnnnnnnnnnnnnnnnnnnnnnnnnnnnnnnnnnnnnnnnnnnnnnnnnnnnnnnnnnnnnnnnnnnnnnnnnnnnnnnnnnnnnnnnnnnnnnnnnnnnnnnnnnnnnnnnnnnnnnnnnnnnnnnnnnnnnnnnnnnnnnnnnnnnnnnnnnnnnnnnnnnnnnnnnnnnnnnnnnnnnnnnnnnnnnnnnnnnnnnnnnnnnnnnnnnnnnnnnnnnnnnnnnnnnnnnnnnnnnnnnnnnnnnnnnnnnnnnnnnnnnnnnnnnnnnnnnnnnnnnnnnnnnnnnnnnnnnnnnnnnnnnnnnnnnnnnnnnnnnnnnnnnnnnnnnnnnnnnnnnnnnnnnnnnnnnnnnnnnnnnnnnnnnnnnnnnnnnnnnnnnnnnnnnnnnnnnnnnnnnnnnnnnnnnnnnnnnnnnnnnnnnnnnnnnnnnnnnnnnnnnnnnnnnnnnnnnnnnnnnnnnnnnnnnnnnnnnnnnnnnnnnnnnnnnnnnnnnnnnnnnnnnnnnnnnnnnnnnnnnnnnnnnnnnnnnnnnnnnnnnnnnnnnnnnnnnnnnnnnnnnnnnnnnnnnnnnnnnnnnnnnnnnnnnnnnnnnnnnnnnnnnnnnnnnnnnnnnnnnnnnnnnnnnnnnnnnnnnnnnnnnnnnnnnnnnnnnnnnnnnnnnnnnnnnnnnnnnnnnnnnnnnnnnnnnnnnnnnnnnnnnnnnnnnnnnnnnnnnnnnnnnnnnnnnnnnnnnnnnnnnnnnnnnnnnnnnnnnnnnnnnnnnnnnnnnnnnnnnnnnnnnnnnnnnnnnnnnnnnnnnnnnnnnnnnnnnnnnnnnnnnnnnnnnnnnnnnnnnnnnnnnnnnnnnnnnnnnnnnnnnnnnnnnnnnnnnnnnnnnnnnnnnnnnnnnnnnnnnnnnnnnnnnnnnnnnnnnnnnnnnnnnnnnnnnnnnnnnnnnnnnnnnnnnnnnnnnnnnnnnnnnnnnnnnnnnnnnnnnnnnnnnnnnnnnnnnnnnnnnnnnnnnnnnnnnnnnnnnnnnnnnnnnnnnnnnnnnnnnnnnnnnnnnnnnnnnnnnnnnnnnnnnnnnnnnnnnnnnnnnnnnnnnnnnnnnnnnnnnnnnnnnnnnnnnnnnnnnnnnnnnnnnnnnnnnnnnnnnnnnnnnnnnnnnnnnnnnnnnnnnnnnnnnnnnnnnnnnnnnnnnnnnnnnnnnnnnnnnnnnnnnnnnnnnnnnnnnnnnnnnnnnnnnnnnnnnnnnnnnnnnnnnnnnnnnnnnnnnnnnnnnnnnnnnnnnnnnnnnnnnnnnnnnnnnnnnnnnnnnnnnnnnnnnnnnnnnnnnnnnnnnnnnnnnnnnnnnnnnnnnnnnnnnnnnnnnnnnnnnnnnnnnnnnnnnnnnnnnnnnnnnnnnnnnnnnnnnnnnnnnnnnnnnnnnnnnnnnnnnnnnnnnnnnnnnnnnnnnnnnnnnnnnnnnnnnnnnnnnnnnnnnnnnnnnnnnnnnnnnnnnnnnnnnnnnnnnnnnnnnnnnnnnnnnnnnnnnnnnnnnnnnnnnnnnnnnnnnnnnnnnnnnnnnnnnnnnnnnnnnnnnnnnnnnnnnnnnnnnnnnnnnnnnnnnnnnnnnnnnnnnnnnnnnnnnnnnnnnnnnnnnnnnnnnnnnnnnnnnnnnnnnnnnnnnnnnnnnnnnnnnnnnnnnnnnnnnnnnnnnnnnnnnnnnnnnnnnnnnnnnnnnnnnnnnnnnnnnnnnnnnnnnnnnnnnnnnnnnnnnnnnnnnnnnnnnnnnnnnnnnnnnnnnnnnnnnnnnnnnnnnnnnnnnnnnnnnnnnnnnnnnnnnnnnnnnnnnnnnnnnnnnnnnnnnnnnnnnnnnnnnnnnnnnnnnnnnnnnnnnnnnnnnnnnnnnnnnnnnnnnnnnnnnnnnnnnnnnnnnnnnnnnnnnnnnnnnnnnnnnnnnnnnnnnnnnnnnnnnnnnnnnnnnnnnnnnnnnnnnnnnnnnnnnnnnnnnnnnnnnnnnnnnnnnnnnnnnnnnnnnnnnnnnnnnnnnnnnnnnnnnnnnnnnnnnnnnnnnnnnnnnnnnnnnnnnnnnnnnnnnnnnnnnnnnnnnnnnnnnnnnnnnnnnnnnnnnnnnnnnnnnnnnnnnnnnnnnnnnnnnnnnnnnnnnnnnnnnnnnnnnnnnnnnnnnnnnnnnnnnnnnnnnnnnnnnnnnnnnnnnnnnnnnnnnnnnnnnnnnnnnnnnnnnnnnnnnnnnnnnnnnnnnnnnnnnnnnnnnnnnnnnnnnnnnnnnnnnnnnnnnnnnnnnnnnnnnnnnnnnnnnnnnnnnnnnnnnnnnnnnnnnnnnnnnnnnnnnnnnnnnnnnnnnnnnnnnnnnnnnnnnnnnnnnnnnnnnnnnnnnnnnnnnnnnnnnnnnnnnnnnnnnnnnnnnnnnnnnnnnnnnnnnnnnnnnnnnnnnnnnnnnnnnnnnnnnnnnnnnnnnnnnnnnnnnnnnnnnnnnnnnnnnnnnnnnnnnnnnnnnnnnnnnnnnnnnnnnnnnnnnnnnnnnnnnnnnnnnnnnnnnnnnnnnnnnnnnnnnnnnnnnnnnnnnnnnnnnnnnnnnnnnnnnnnnnnnnnnnnnnnnnnnnnnnnnnnnnnnnnnnnnnnnnnnnnnnnnnnnnnnnnnnnnnnnnnnnnnnnnnnnnnnnnnnnnnnnnnnnnnnnnnnnnnnnnnnnnnnnnnnnnnnnnnnnnnnnnnnnnnnnnnnnnnnnnnnnnnnnnnnnnnnnnnnnnnnnnnnnnnnnnnnnnnnnnnnnnnnnnnnnnnnnnnnnnnnnnnnnnnnnnnnnnnnnnnnnnnnnnnnnnnnnnnnnnnnnnnnnnnnnnnnnnnnnnnnnnnnnnnnnnnnnnnnnnnnnnnnnnnnnnnnnnnnnnnnnnnnnnnnnnnnnnnnnnnnnnnnnnnnnnnnnnnnnnnnnnnnnnnnnnnnnnnnnnnnnnnnnnnnnnnnnnnnnnnnnnnnnnnnnnnnnnnnnnnnnnnnnnnnnnnnnnnnnnnnnnnnnnnnnnnnnnnnnnnnnnnnnnnnnnnnnnnnnnnnnnnnnnnnnnnnnnnnnnnnnnnnnnnnnnnnnnnnnnnnnnnnnnnnnnnnnnnnnnnnnnnnnnnnnnnnnnnnnnnnnnnnnnnnnnnnnnnnnnnnnnnnnnnnnnnnnnnnnnnnnnnnnnnnnnnnnnnnnnnnnnnnnnnnnnnnnnnnnnnnnnnnnnnnnnnnnnnnnnnnnnnnnnnnnnnnnnnnnnnnnnnnnnnnnnnnnnnnnnnnnnnnnnnnnnnnnnnnnnnnnnnnnnnnnnnnnnnnnnnnnnnnnnnnnnnnnnnnnnnnnnnnnnnnnnnnnnnnnnnnnnnnnnnnnnnnnnnnnnnnnnnnnnnnnnnnnnnnnnnnnnnnnnnnnnnnnnnnnnnnnnnnnnnnnnnnnnnnnnnnnnnnnnnnnnnnnnnnnnnnnnnnnnnnnnnnnnnnnnnnnnnnnnnnnnnnnnnnnnnnnnnnnnnnnnnnnnnnnnnnnnnnnnnnnnnnnnnnnnnnnnnnnnnnnnnnnnnnnnnnnnnnnnnnnnnnnnnnnnnnnnnnnnnnnnnnnnnnnnnnnnnnnnnnnnnnnnnnnnnnnnnnnnnnnnnnnnnnnnnnnnnnnnnnnnnnnnnnnnnnnnnnnnnnnnnnnnnnnnnnnnnnnnnnnnnnnnnnnnnnnnnnnnnnnnnnnnnnnnnnnnnnnnnnnnnnnnnnnnnnnnnnnnnnnnnnnnnnnnnnnnnnnnnnnnnnnnnnnnnnnnnnnnnnnnnnnnnnnnnnnnnnnnnnnnnnnnnnnnnnnnnnnnnnnnnnnnnnnnnnnnnnnnnnnnnnnntcatttgttgtgatatgtgttttattgtggtggtctggaactgaacctgcaatatatttgaggaatgtctgtaacacgaagtgggcggcttaatacaacagaagtttttggagttccattctagagactggaaatccaaaatcaaggttttgggagggccacgctccctctgaatcctgtagggaaggatccttcattgcatcttccagcttctggagccacaggccttccttggcatgtggcagcagaactccaatttctgtctctgtcctcatatggccatcttccctctgggtctgtgtcctcatatgctgttctctctgtgcatgtctgtttccaaagttttcccttttaataaggacaccagtcacactggattagggcctacyttcatgacctcaccttaacttgattgcgtctgcaaagatygtatttccaaataagrtcacatccacagggactggaggttaagacttcagcatacttggggggagacacaattcaacctataacagagcccctttgaaaatgtcaggcatcaggtgctcacagcacacggtccagctgttggtgctcacccttgctcagcacacggtggaggctctgcctcaatctcattcttcatgggaacagctaagccaggtagcgaatacgggttatgtttgtgtcaccacaacagacactgaaaggaagtttgtggtgtccagcacacttgccagcataggcctcacagaccacagcacctagaatctgacaaaaattagaataaatccgatgtctccttttctctcttttttttaagcatttttaaatrcaattggtaaatttcctgactgtaccctmctcatcttgcattgctgaataagtgaggaacctctctatggcatgaagcagaaaaccmttgagcttatgagaagaaacaggaaatacatgtaaaagagaccagtctgaaaaatcaggagaaattttacaaaagagatttactgccaagaaaccagggaaactttcagaacactctccttttcatatttgtaacaagwttcaattgtacaaatacttctgtgaaactagccatgaagtgtgtacatgaatgaatatatgtattcagtgtgtttatatatttcatttcatacatgtgatctatatcatatatatatatcacaatgaatattgcagaaaattaaagcaaagagtaagaagagttaaccaaatgttccctgaatgcagtgagaaaagatgaaaaggagaagacaggcaagcacagtggctcacatatgtaatcccaacacactgagaggctgaggcaagagtatcacttgagcccaggagctcaagaccagcctagacaacatgrcaaaaacccatctctacaaaaaagtataaaaattagctgggcatggcagcatatgcctgtagtcacagctaggcaggagactaaagtgggaggatcacctgagcccaggaggctgaggcttcagtgagccttgatggcaacctgcactccagcctggatgacagaatgagaccctgtctcaaaaaaggaaaaagagaagacatatgtaacacagtgtcaggattcaaaatacatgtagcaaaaattccagaagggtaagcaaataagcccatacctagccatcactagggaaacttctgtgtttcagggatagagaaaaaaactctgattccagaaataaaatgtgaaaatataatacccgcaaaagaaataagtttattgacaccacattgattctatacaacactaaattgtagaagatagcatttctcttgagccaagctaatattcacacctagaggctccagatacacattaaaggataagaaagacacaaaaattgtaccatttaagtatgtttcccaggtaattcataagcaaatttttaaaaaggagaatgatgaattccaaaggaaatctcaatgagataggatattggtaaaaagaaaaaacaacaataaaaaaatacacacaaaaactcggcaatgtaatcataatttactaataatctctctaaactcatagaacrtatcaataaaactagaaaatgtgagacagcaagaaaaggtaggctaaacttacattacagaaaagatgagtagactgactatatagagtttgactctaaaattgagaaaataggtttaaatakctgttgtgtgcatatccatgtgtgtaatatacatgyacatatataaaatgaaattcctcattagaaaaaataataagtttaatttccaaattattagaataactaaaacagctgaatctatctcttccatatagcaagtgagagggaaagaaaaggaaagacaaggaatgcatttgtctcttccaccagaaataagccccctcatttttgggtcaggtcattttattcattgctttctccacatcctcatcattgggcatcatgaaatcaatgaaaaaggcagtgaaagaatgatgatgaaagcaaatcaaatgtatcatttatctcaatacatttggtttaatcctcttgttgaaaaacaaagtctcttagacaagatcaaaagcaacaaatcttgtatttataaaaaacatgtctcaagtaaaatgacatagtattatacacacacacacacacacacacacacacacmcaaattaagtgaaaatgcaaacaaaaaaaggcaaaaataatatttagagaaagatagaatttaagaaaaaaattgtcaaactggtctacaaaataattgttttattttcgtgccagttgcagtccacagtgaagccaagatattaagaagcaatgtgggccaggagaagttagagcagaaatatctctttcaataatgaaagaataagaaaaagaartagaagagctggaaacaataggtaaagtttaggctaggccttagacttctcctgcattgtaatccttctggtttgccacatatgcatgctgtcaggaagttgatgaggtatgtacaggacaatgattttccattttttgcctttaggcaccgactcattggtcactcatctgctgaatgtatcctctcaggcaatactgcccattggagcacgaagccgccaatttgtcaacgtgagttgaaatctctttccccattcaccccaccattgaatcctagagttgtcctcctagaattacaaagaatggatctcatccctcttggaaatggtatccttctsatatttgaagaatctagtcatatccttaaaatggctcacagcattccaaacttccrccttcacctagaaatgcttttttttttcttatctcagtctaatgtattttaaactagtctttagctcatttaaccagcccccaatgtcctcttctgttggttgagcacctcgcagtttgaagagcattttgtttagtgaagtcaacaaatacaaagtcagtgaaagaaaccccatatcctctctgcaagctcttagtatcacatcagatattcaagccatgcagctctttcttccttcttattctttgtctaaacaggatcatgccatcttccctgtgagttgtttggaagatgagctttctacattttggggagcaaagacgaatgagcaattgcaagctaacagggaatataaaatgtgtataatcctgggtttagtgatggtgtgaggaaatcagcaatttcaaacccagttggtggcaggataagtgggaacaaactttgtagaaggccaataaactggctgggcactgccctacagtagagtaggacacagtattcagttcttccaagatcagacgagattgggcgcattcagggtggtatggctgtaaatcagtatccagttctttttattacttctgaatctgtaagtatcatgtttattatatgtaatattrtatatttgtgctttgtctttattagttcttccagagcttttgttcttattatttaataaagatgttatactgagccacgtgtggtgactcaaacttgtaatcccagcactttgggaggcctaggtgagcagatggctttagcccaggagtttgagaccagcctgtacaacatggtgaaatcatgtctctacaaaaaatacaaaaactaaacaggcacggtggcacatgcctgtagtcccaactactcgggagactgagaggtgggaggattgcttgagccagagaggtcgaggctgcaatgagccatgatcgtgccactgcactccagcccgggcagcagagccagaccttgtctcaaaaaaaaatgctatgctgtatgctttattatattaatatccaataccataaaggcaaatgccttctatatagagagaactagattaataatggtgagataacatagttaaattctcgtttagcaggagaaataaaaacatagactataggctaggcacagtggctcatgcctgtactcccagcacattaggaggctgaggtgggcagatcacttgaggtcaggagttcgagaccagcctggccaacatggtgaaaccccatctctactaaaaatacaaaagttagccgagtttggtggcgcatgcctgtaatcccagctactcaggaggctgaggcaggaaaatcgcttgaacctgggaggcgggggttgcagtgagctgagatcacgccactgcactccagygtggggaacagagtgaggatctgttaaaacaaacaaacaaacaaamaaaaaacacatggactctaataatacatggatacatttagtgaaataaggttaactgagtagagcagcactcataacattttaaaactataagaacatgtctgtacattagcaaatattagatgagaataatattgtcaatatttacttctggtaatttgaaattaaaaaacaaaactgttagcaaaatttacaataaagtataattattagaaaccaggctgggcacggtggctcacgcttataatcccagcactttgaaaggccgaggcaggcggattgtttgaggccaggagttcaagactagcctgcccaacatggccaaaccccatctctactaaaaatacaaaaataaaccagacatggtggtgcatgcctgtgatcccagctactcgggaggttgaggtgggaggattgcttgacctgggaagtagaggttgcagttagccatgattgtgccactgcactccagcctgggtgacagcaagactctgtcccaaggttttgttttggttaacttgctgtctcttttccaggaattccttgtgggctacccccaaccatcgccaatggagatttcattagcaccaacagagagaattttcactatggatcagtggtgacctaccgctgcaatcttggaagcagagggagaaaggtgtttgagcttgtgggtgagccctccatatactgcaccagcaatgacgatcaagtgggcatctggagcggccccgcccctcagtgcattatacctaacaaatgcacgcctccaaatgtggaaaatggaatattggtatctgacaacagaagcttattttccttaaatgaagttgtggagtttaggtgtcagcctggctttgtcatgaaaggaccccrccgtgtgaagtgccaggccctgaacaaatgggagccagagttaccaagctgctccaggggtgagtctgactgatgcctagaagggccctgccagtgacatgtgttgctgttggatcaggagatgagtatttgttaagggggaggtatgtatggtgaggagggtgggaaagtaagttttgggggaagaagcatgaaattaagaattgggggtgtgcatgcacccatgcatatgtgtcttcatttggaaagcaagaccttaattagccaagaaaaaagctattttggactcacctattatttgattctcagggcaaagtaccagctgcaatctctctcaagtatattgaaaaattatatggactttctctatgatcagctatgtgctaagcactttatatgcattttctcattcattatttacaacaacactttgaaattgtgctattgtattatccatttaatagtgacatcagcttgatctttcagaggttaaataaattagctaagtcacatgttctaagcgagacacccaggattttaaaatgcaagtgtatcagaccccagagtctgaatgttttggctcttgccatactttcatcagtatccattgctgaaagaaagagactggcttacaaagacagaaatcatagcctcagaatagacaaagaccttagagtttgtctataatggtctgcctcctacattttattttgattttattttatttaaaaactatttattagagttgaygtcccactctgttgcccaggctgaagtacagtgatacaatcatggctcactgcagcctcagattcctaggctcaagccatccacgtcctacattttatccctaggagtctaagtcaagagtgaaagtaacttgttcaaagtcagttaaatatttctaaattcatgtttaatgaggtatagattaggttgatgttaaaatgggttctgatgccctaagcatgaacgaacaggactataaataaaggcagatgttgagtcaaatactctccaaataatatgccctctcgtgacaaaggactgtcttatttaakggcttgtgtttttgatggctcatcttgtctactgatgccacaatagctggcttagcagctgtgtaggaggtgttatggttgatacatagggacagagaaggagcttacgattcttctaccaacccatgttagccttgtgcaaccactgagctgggaagatgaacagataaagggatataaagacggatgtactgaggcaggagatgggcagggcttgtgttctggtcacaatcctgctgaccaaaacaggctctggcccagacaggatgaagtgaaaaaacagcaggaaccagcagatggcgatgaaagcaattgctagctgccctcatagtcccatcagcaccatgacagtttacaaatgccatggcaacgacctagaagttaccgcccctttcctggaaagttctaaataactcgcccctcaatctgcattgatccaytccttaatttacatgtaacygaaatgggtttacagcagtataaacacagttgcctgccaggaacccttatgttgctgactctgggtgtgctgcctgtgagttagccctgctctgcaagaagcagtgcctttcactaacagattgctgtctagcaccactggctcatccttgaattctgtcctggatgaggcaagaacccttccagagtaagccccaatttaggggcatgcctgtcccgaaacagtatgactgtactttagtcattggtgtgcaatcagagaaatygggggaaatctgtaaaacagatttggtctcaggtgacagtctcattacctgaataacaatggtacaaatygggattaccttcctaggaaatatgtagatggagaatccaccaatactgataacttcacattggatagccagagctaggagaaaatacctcatgccctgtagatttacaagtgaatttggggccttgtgctagggagaattgggttctatttctctacctctgactagctatgaggtcttcaggaagcataggaaattcccccataactaacaagtactctggaactgtcctttccacagtgtgtcagccgcctccagaaatcctgcatggtgagcrtaccccaagccatcaggacaacttttcacctgggcaggaagtgttctacagctgtgagcctggctatgacctcagaggggctgcgtctctgcactgcacaccccagggagactggagccctgaagccccgagatgtgcaggtgcctcaactctctggcttccagatttctctctttaccccacacatggaggtcttactcctattttttcttttttttttttttcttcttctagtgaaatcctgtgatgacttcttgggtcaactccctcatggccgtgtgctatttccacttaatctccagcttggggcaaaggtgtcctttgtctgtgatgaagggtaagtgtgacccagaattcagatcagggactcagcactgcagagtgactcttgagcttaaggatcaatccaaaaagagggctgacctaggagaagaagaatccagggagattaacctctggaagtgtagctttaaaataaaggtagggactaagtggcactactatcaggagataaagagataaagaaaaaatggcgcatataactgagtgtcaagtacaaacagaaatacagtcaccagtccagaaaaggggaccaacctggtggaaaagaagtactagaggagactaatatctgaaacaatgattggaaagtgtggtatgaaccagctggatccatgaacagaagtttaaaaagcaaaaagctcaactcatttgatttctcacttatagaggctcagaagtaaaatcattttggaaaacgtgcagcttccagtaaggcacaaaggaaaaacaatggccgaaatacaaaagatcttgaaaaaaaaagtgtgtatatatatgtatacatacgtatacatatggacacgtatatgtatacgtatacatgtacatgtgtatacatatgtgtatacatggacacgtatatgtakacgtatacatatggacacgtatatgtakacgtatacatatggacacgtatatgtakacgtatacatatggacacgtatatgtatacgtatacatatggacacgtatatgtatacgtatacatgtacatgtgtatatgtatacgtatacrtgtccatatgtatacgtatatgtatacatatgtatatatacatatgtatatacatatatatggaacatatgtatatatacatatgtatatacatatatacatggaacattagatgtatgaataaataataatttgcagacatgaagagataaataaatattctaggggttgttaagaaaagtttgatatataagagaaagttgtatataagataaaataacatgcaaagattatttcacaaaacttttaatcaaataaatagtggaatttggaataggaacgaaagagtaagtagaaatattctaaattccaattacatgtgattgacagctctgccagctattattgctttgtcctcactgaaagctacactttttccaaaatgatttggcttctgagcccgtcaatgagaaactaagtgagttgagtgttttcacctgtgctttagcttgagcagtaaaatgttaattaacttaggaattctcagggaggaggttgagatctgtcacgaagggaagagagaaatggtgcattcatccagccactactgctttgttctttaggtttcgcttaaagggcagttccgttagtcattgtgtcttggttggaatgagaagcctttggaataacagtgttcctgtgtgtgaacgtgagtagatggaatacttgttcagtctggatctttctgtttttttcttaatatagtttgccccatgggattatctattgtttgtcccgctgtttgtgcccgcttttgatagaaattgttctttgttggaatagatacaagcaatgttttgggraaaaataaacatgagaatcatgtgttttgggtaccatcctataaatatttatgaggagagtctgtgctataaatagagagaaatgcttcatagaaataaatgtatggcaagatgctaggctaaatttttctcttctttcctgtcaaaagtaatagtcatacttcaacttttcagttcttccctcaatcatccatttagtcatatactcattctttcaacagaaaattatttgagcacctactatgtgccaagcaatcttctgggaactggggatatacctataaacaagacagataagtccatgtttaagtttttgtgcaaggataaagacaaaaatcaaagacatgaatagaaatgttcaaatgatactaagtgttattaagaaaatgctcttaattgagtcagtgctgtcaattgagaatgtagctgaggacccaaaaggcaagtgtagcccagcaaacctctgggtgtagctgagggttcaaaatgggaggctgttgcagcaatctaatcagagatgttggcccaggatagcaattgggaaaggtgatgatgagaagtgatcaaattctggatatattttgaaggtgcagatgacaggatttggtgatggttagcttagatagagggtgtgaaagaaagagaagaaacatagccagtttccaggtttttggccagagcaaccgccagggtagaatttcccttagctgaaatgcaggggactgcatgaagtttgggaatgggggaaatcaaaagttaagcttgggacataactttagtgttcctcttagatatccagatggatatgttggagagtcccaggctgcccatagatakgtagaagccatcattgtatctgctatgcttgaaatcaggactgaaagagatcttcacctagggagtgagtgctgctagagaacagatgcatggactgagcctggatgtccaggattaagagttgcaaaggtgagaaggaatcagcaaaggggattatgatgaagcagccactgcagtaagagaaaacacaggagggtgaggtgccctggaagccaagtatggaaattattttaagggattagactaatcaactgtgtcaaattctatagagaggtcaaattaggtgagaacagaaaattgatctttgggtttagcaacttggaggtaacaagtggaagtttcagtggagtgctggcaaacactgattggaatgaattctagggagaatgaatgggaggaactgtaacagatcatagacaatattttagaggagttttcatgtaaagagagtagaaataggactatagctgaagagggaaatgacagcaagaggtttgcttttgatttttaagagggcagaaaatagtgtgttaaaaacagaaacactactatgtcccatctatccatttacttcttcactaaatcaatcagggtattgcttccccttctgatcatagctattaaaaatacatgtttacaatagaattttgctcatatgaatactttgccttaaatcatttcaatgtcttgtattgatttatatgatgaaaatgataatttcatcttacattgttggaagtcagctatttgacaatcttaacttccctggaatagttaagaagtatgaaagaaaagaaaaagaaaataccctcatgaacccaacatatacctgaaatcgcttactagagtgtaaacattggttaagctattttaacctttgattagtttatctatarttcttttaagctgtaatatcctcttcccaaattcaaagcaaattagaaaagggaaggagtgtccccaaatagaggcattccaaggaataaatgtgtttctttaatgaaaaaaataaataaataaacccttaaaaaccaatgagtatctcaaaaaaccgtaacattcttgagccttttgaaacacatacaggagtacatagcatttttttttcattgtgacagcattactgcaatctttcatctgtattttgaaaatcatagcctggcatcatcaagaaaaattaaatcactgatatacaaataataaatgtataatatattttagaaagatgtctctaggatgaagactcttgatgtcaaagatcatatttatcctgtgctttaaacagtacttgacatacagcagatattcaaaaacatgcttgttgaattaatggatgattcccctttaatgtgactgtgaagatttttatttactttaaaggaatatactctttattattcagaaatattaactatctgaaaaatttaggatgcttaatttgggaaaggcttttgtaataaacattgatttagttgtcatttcatttagctccatcttagcagaggcctaatacatttattttgcagtttctactttccttaagaagaaaagtacgcttaattggcaacacagtcacagtatgacaactgtagaatcrccttggattatactttaaaattttttatggaattgagagctcttgttttctttctagatatcttttgtccaaatcctccagctatccttaatgggagacacacaggaactccctctggagatattccctatggaaaagaaatatcttacacatgtgacccccacccagacagagggatgaccttcaacctcattggggagagcaccatccgctgcacaagtgaccctcatgggaatggggtttggagcagccctgcccctcgctgtgaactttctgttcgtgctggtcagtatccrcttccacatatcctaaatgggttcagaatatgtggacccaatccctcatgtttctgtaataagactatggtatttgtttgtgagcttaactttgtcataagtgtaaatgtcaaaattacataccatagctaaaacagatgggtttcagcagcgccaaggtatgtttgaatctataagatgaaaactcttcttgctggtggagtggaagagggtgggaaaaagggactgagggaggggtggagggaaggcagtaaggcacagttatgtaaatcaggaagaaaaatgtattcactggagacgacatgaaaacawctgcctctgaacactaaccagtatctgtataattgacagtctccataagttcatgaggggtacatgggcatgcaaagttcaaaattggaaatgtggatattatttagctaaggttttaaactagtgttctgctgcatgggctaagtaaccaaaaagactctctttgtcttgacttaaagtttgtccacttgtcatcttgcctccaggctgtcttaatctttgtacttgaactgttccactcagggggtaagaagcaaggaaagagtagcscaaagaaaagagtaggaaaaggaagaggctatttcttcctaaggaggggaagaagttgcctggtccttcagggcaaacattaggccttttccagagcagaaactggagtagattagggatgtggcaccagccttggaatattccattatccacagggaagccctgagagacaagagccagccaaggtgaaaagactaaacctgatgaaaggcatttaacctttctttgacctttactctccaactgagtggtacccatcagaatgcagtaaatttttttaatgtaaatgcctagaccccagtgcaggcttaatgaacagatggaggaagccttctccaaaaaggaggtaatggagttcagactctatttgaaaatatgcagcacatggctgggcacagtagctcacacctataatcccagcactttggaggccgaggtgagaggattgtttgaggccaggagttcaagaccaacctggccaacacagcaagctcctaactctacaaaaaataagactgaaaaattgtaaaaactgtaaaacaaaaaaagtaaaaatatgcagcacacaatatactctctcagaaagaagacatagcttcttacagaaggctgatggcttagtctgttttgttctggttctttttttgttttgttttgtgtgtgtgtgtgtgtgtgtgtgctttttttgagagagagggtcttactcttttgcccaggtggagtagagtggtgcaatcatagtttactgcagccttgacctccctggctcaagcaagcctcccatctcagcctgccaagtaggtgggaccacaggtgcatgccaccacacccagctaattcttgtattttatgtagaccggttttcatcatgttgcccaggctggtcttgaactcctgggctaaagcaatccacctgccttggcctcccaaagtgctgggactacaaggcgtgagccaccatgcccagcctattttgttctatctttaaatgcctggtttagcatcagaagaaaaacactgtattagtttcctagggctgctgtaacaaattaccacaaactaggtggcttaaaacaaaagaaacttattatttcacagttttgtaggctgaaattgagatgttggcagaggtattttcccatcttctaaggctctggaaaataaccaattctttacttcttccatctgctgctggttcctgggattccttggcattccttggtttgtggatgcatcattcaaatccctgcctccatcatagccttttcccctgtgtctctatatgtcaaatccctccactttttccctgatagggacaccagtcattggatttagggcccactctaaataaaagatgatctaatctcaagaacctaatcttaattctatctgaaaaaccattattccaaataagtttctattctgaggttttaggtagagatatcttttgggagaacatcattcaactcactacaaggggtacctgctatgaaaggccagagaggcagcttatgatgggcaccctgagaatggagtatggagagagatgataaaatatgtcttgctactcakgagtgaattagcacaaacacatgaagatttgagtggttaactgaggatataggcactccgataggaggtcagaatgtgaaactacaagctgaagttcttgctttggtgaaataagggaagaaagatcagaaagctgagtggtcttccaaatagtaaaaaaaatcctgctgagtagatgcattgaagagcttcatcccaaggtaacatcaaggagaagaaaatcttttgctattcttgtaagtctctttgtttctgtgatccacctatcagcttaattgaagagaaagaggmggtagggtggaagtctctctgctaactttgatattcctgtggtttttctctccaggtcactgtaaaaccccagagcagtttccatttgccagtcctwygatcccaattaatgactttgagtttccagtcgggacatctttgaattatgaatgccgtcctgggtattttgggaaaatgttctctatctcctgcctagaaaacttggtctggtcaagtgttgaagacaactgyagacgtgagtaacccctccctgggaactacttcatgtctgttaaagcataggtgggaccgggcttggtggctcacgcctgtaatcccatcactttgggaggccaaggctggcagatagcttgaactcaggagttcgcaaccagcctgggcaacatggccaaaccccacgtctacaaacaacaacaacaaaaacaacgtaggtgggatttgattcaatttgctcaaattttggaagcaagatgtctatatttgcccaagatattttgataaaggaaaggatggtcttgtacatcaccccttcttcttgcttgtagttcctgaaccttgactagatgctcatttcatgagaatggctctcacaaaagaattagagagaaaatttacattcactgtagatcatccttgatggctgacaccattaaatgaatgaaacaggggtacaaaagaaatttatgtgagttgcagtgaactgtgcttggctaactaaaaataggggagacatcccaaattttgaggcctttgattttggctggcggaatgagagtacaacactttagccataaatgacttgttttgtttttgttttgtttctgctgttgctgttgtgttttttgtttgtttgtttgtttgtttctgagatggagccttactctgtcacccaggccggagtgtagtggcgcgatcttggctgcaacctcctgggttcgagcaagtctccctgcctcagcctctcgagtaactgggattacaggcacccactcccatgcccagctaatttttgtattttttagtagagatggggttttgccacgttggccaggctggtcttgaactcctgacctcaggtgatctgccggcctcggcctcccaaagtgctaggattacaggcgagagcccatacataacctttattaggaggtgcaagatagtctttttcaaagttgtgttcgtagctacatgattctgaagttgtctgccaagtttcctcaaagcagtcaattccatgaaacaattggaactgtatatgctgtttagtatgccacactccagtctgaaccttacaaaggtaagttgaactctatatttaatcccaaattctgcttcttcccctaggaaaatcatgtggacctccaccagaacccttcaatggaatggtgcatataaacacagatacacagtttggatcaacagttaattattcttgtaatgaagggtgagttgagaataccatctcttgaatatgagttccagaacagcagagccaacttctgacccagtctcagatagacaaactaaactattgctccctttactttaaaagcaagcaataggacttatagatggagatgatacgttggacatagccatatgatcaaaggaatacaaaaaagaaggtacaatatgtattgtattgtaaaccagaggagggcaacatgttcctgtcaaaggtgrtacatgtgaaacctggtcaggcattcattggatgaaaaggagcagcttacaaataaggaaaaggaaaaaaggtagttgaaccatgtaaacctccttaactgagatcagtaggtaatacagttgagttggaggaccctgaagcagagtttgggagggtaaacattaattgtaacagcagctctggaagagtatgcatcaaagtgcacacagagaggagacattatggggttcttgctcttgacttctccttgggacaagtagccacaccaaaagccattgcctcaactgagaaggggcttttaaaaactctggagtrgacctccatcaaactccagcagacctgcagcagaggggcctgactgttagaagataaactaacaaacataaaggaatagcrtcaacattaacaaaaaggacgtccacatgaaaaccccatccaaaggtcaccaacatcaaagaccaatgatagataaatccacgaagatgaggaaaaaccagcacaaaaaggctgaaaattcccgaaaccagaatgcctcttctcctccaaaggatcacaactccttgccagcaagagaacaaaactgggtggagaatgagtgagttggacagattgacagaagtaggcttcagaaggtgggtaataacaaactcctctgagctaaaggagcatgttctaacccaatgcaaggaagcgaagaaccttgaaaaacaggttagaggaattactaactagaataaccagtttagaaaagaacataaatgacctgatggagctgaaaaacacagcacaagaacttcatgaagcatacacaagtatcaatagccgaatcgatcaagtgaaacaaaggwtatcagagattgaagatcaacttaatgaaataaagcwtgaagacaaaaaaagaatgaaaaggaatgaacaaagcctccaagaaatatgggactatgtgaaaagaccaaacctacgtttgattggtgtacctgaaagtgacggggagaatrgaaccaagttggaaaacactcttcaagatattatccaggagaactgccccaacctagcaagacagtccagcattcaaattcaggaaatacagagaacrccacaaagatactccttgagaagagcaaccccaagacacgtaattgtcagattcaccaaggttgaaatgaaggaaaaaaatgttaagggcagccagagagaaaggtcgggttacctacaaagggaagcccatcagactaacagtgaatctctctgcagaaaccctacaagccagaagagagtgggggccaatattcaacattcttaaagaaaagaattttcaacccagaatttcatatctagccaaactaagcttcataagtgaaggagaaataaaatcctttacagacaagcaaatgctgagggattttgtcaccaccagacttgccttacaagggctcctgaaggaagcactaaacatggaaaggaataactggtaccagccactgcaaaaacataccaaattgtraagaccatcaacaatatgaagaaaccacatcaactaatgggcaaaataacaaatcagcatcataatgacaggatcaaatttacacataacaattctaacattaaatgtaaattggctaaatgcccccagttaaaagacactgactggcaaattggataaagagtcaagacccattggtgtgctgtattcaggagacccatctcatgtgcaaagacacacataggcgcaaaataaagggatggaggaatatttwccaagcaaatggaaagcaaataaaagcaggggttacagtcctagtctctgataaaacatactttaaaccaacgaagatcaaaagaracaagagcattacataatggcaaaggatgcaacaagaagagctaactatcctaaatatatatgcacccaatacaggagcacccagattcataaagcaagttctgaaagatctataaagagacttagattcccacacaataatagtgggagactttaacaccccactgtcagtattagacaggtcaacgagacagaaaattaacaaggatattcaggacctgaactcagctctggaccaagcagacctaatagacatctatagaactctccaccccaaatcagcagaatatacattcttctcagcaccacatagcaattattctaaaattgaccacataattggaagtaaagcactcctcaaaatgcaaaagaatggaaatcataacaaacagtctctcagaccacagtacaatcaaattagaactcaggattaagaaactctctcaaaactgcacaactacatggaaactgaacagcctgctctgaatgactactgggtaaataacgaaatgaaagcagaaataagtaagttctttgaaaccgatgaaaacaaagacacaatgtaccagaatctctgggacacagccaaagagtgtttagagcactaaatttatagcactaaatgcccacaggagaaagcagaaaagatctaaaatcgacgccctgacatcgcaattaaagaactagagaagcaagagcaaacaaattcaaaagctagcagaagagaagaaataactaagawcagagcagaactgaaggagatagagaaacaaaaaacccttcaaaaaatcaatgaatccaggagctggttttttgaaaagattaacaaaatagaccactagccagactaataaagaaaaagagagaagaatcaaatagacacaataaaaaatgataaaggggatatcaccactgatcccacagaaatacaaactaccatcagagaatactataaacacctctacgcaaataaactagaaaatctagaagaaatggataaattcctggatacatacaacctcccaagactaaaacaggaagaagtcgaatccctgaataggccaaaaacaagttctgaaattgaggaagtaattaatagcctaccaaccaaaaaaagcccaggaacagatggattcatagctgaatcctaccagaggtacaaagaggagctggtaccattccttctaaactattccaaacaatagaaaaagagggactcctccctaactcattttatgaggccagcatcatcctgataccaaaacctggcagagacacaataaaaaaggaaaatttcaggccaatatccctgatgaacattgatgcaaaaatcctcaataaaatactggcaaacraaattcagcagcacatcaaaaagcttatccacaacgatcaagctggcttcatccctgagatacaaggctggttcaacatacgcaaatcaataaacgtaatccatcacattaacagaaccaatgataaaaaccacatgattatctcaatagatgcagacaagggcttcgataaaattcaacagcccttcatgctaaaaactctcaataaactaggtattgatggaatatgtcccaaaataataggagctatttataacaaacccaccactaatatcatactgaatgggcaaawgctggaagcatgcgctttgaaaaccagcacaagacaaggatgccctctctcaccactcctattcaacatagtattggaagctctggccagggcaatcaggcaagaraaaggaataaagggtattcaaataggaagagaggaagtcaaattgtctctgtttgcatatgacatgactgtatatttagaaaaccccattatctcagcttaaaatatccgtaatctgataagcaacttcagcaaagtctcaggatacaaaatcaatgcaaaaatcacaagcattcctatacaccartaatagacaaacagmgagccaaatcatgagtgaactcccattctaaattcctgcaaagtgaataaactaccttggaatacaacttacaagggaagtgaaggacatcttcaaggagaactacaaaccactgctcaaggaagtaagcgaggacacaaacaaatgaaaaaaacatttcacgattgtggataggaagaatcaatatcatgaaaatggccatactgcccaaggtaatttatacagtcaatgctatccccatcaaattaccaatggctttcttcacagaattacaaaaaaaaaaaaaaaaaaaactactttaaacttcatatggaaccaaaaaatagcccatatagccaagacaatcctaagcaaaaagaacaaagctggaggcaccacgctacatgacttcaaactatactataaggctacagtaagcaaaacagcatcgtactggtaccaaaacagatatatagaccaatggaacagaacagaggcctcagaaataatgccacacatctacaaccatctgatctttgatgaacctgacaaaaacaagcaatggggaaaggaktccctatttaataaatggtgttgggaaaactggctagccagatgcagaaaactgaagctggaccccttcctttacaycttatacaaaaactaactcaagatgtattaaagacttaaatgtaagacctaaaactataaaaaccctagaagaaaacctaggcaataccattcaggacataggcatgggcaaagacttcattactaaaacaccaaaagcaatggtaacaaaaaccaaaattgacaaatgggatctaatgaaactaaagagcttctgcacagcaagagaaactatcatcagagtgaacagacaacctacagaatgggagaaaatttttgcaatccatccatatgacaaaggactaatatccagaatctacaaggaacttaaacaaatttacaagaaaaaacaaccctatcgaaaagagggcaaaggatatgaacagacatttctcaaaagaagacatttatgcagccaacaaacatgaaaaaaagctcatcatcactggtcattagagaaatgcaaatcaaaaccacattgagataccatcttgggccagttagaatggcaatcactaaaaagtcaggaaacaacagatgctggagaggatgtggagaaatagaaatgcttttacactgttggtgggagtgtaaattcgttcaaccattgtggatgacagtgtggtgattcctcaaggatctagaaccagaaataccatttgacccagcaatcccattactgagyatatacccaaaggattataaatcatccttctataaagacacatgcacacgtatgtttattgcagcactgttcacaatagcaaagacttggaaccaacccaaatgcccatcaatgatagactggataaagaaaatgtggcacatatacaccatggaatactatgcagccataaaaaaggatgagttcatgtcctttgcagggacatttatgaagctagaaacyatcattctcagcaaactaacacaagaacagaaaaccaaccaccgcatgttctcattcctaagtgggagttgaacaatgagaacacatggacacaccgaggggaacatcacacagtggggcccgtcagagggtaggagtccaggggagggatagcattaggagaaatagccaatgtagatgatgggttgatggtgcagcaaaccaccatgacatgtgtatacctatgtaacaaacctgcacgtcctgcacatgtatcccagaatttaaagtatgataataaaaaaaagactgtgtactcatttttggttgccatgataaattcagagaggaaaaacatgatatatattaaattttactgcaacaactaactgccccttgtcatcagcctattctgtcactagagtgagtcagtattcctcttttctgactgtctgagcctggacgatttaaactgcttttcacacaacctcttgcccaaccttttctcacctcccattgtgaatgaacatagatttccctatggtaaacaaaacaaaatatcaccaaatctaaggcaagataaagaaattgaagataaaagaaaccaacccaagagatcagagaaatattcatctgcacaacagcttcctccaataaacaggggacaatctttaaaaatctctcatatgtgtttgtaacatagaatcgatggaactatatgaggcatttataagatttaatgatctgatatcagaaaagttgagatttgaatgaaacacatgggagtcggaaaaggagtgatgactggtagattggagcctgcccccaacccccggaaaaaaaaaaaaaaaacaccaaagggataatgaagacaagattgaattctccagaattcatcaaggaccagacttgaaatgacacatatatacacacaaacacactacacacaaacacacagggatataatatagaaattccagaaaaaataaaagaaagcagaatgaatagaagcattaattagcacataatggaagacaatttctcaggctataaagaaaaatactaagttgatccttgaaggcttactagacaaatcaagattaacaacaatgggccccggccctacatggaagaaaattatgccatccaaatataaaaaaatactgccactctccagaaataacaaaaaagaagaaattcatcttagcaccaagcttccgttctgtaacactaagtagtagaagttagtgtttgagaggaaatattgtacaataaaatttctgtactcggccaagctgccattcatctgcaaggcacagatgcatcgtcttaaataagaaggaaccccaaacatacaccagttagatatactgcctacaaaaagaaaaactcccacaaagctgtgggagtttttctttttgaagaagaaatcaaaattccaaatggtgttgtatcaaagaaatattaatgaggcacaaaactagttaaatggggtcactaaaactgttttatttaatatrgaaataaaatatcaaagcaggactaattcttgaaagataattcatgtaatatgaaaagaagaagaaacttgatataaaaaatagattttatcacttcagctaggaagttagagatgaagtaagaaaaaccatcataaacttatcatatgtaggggacacatattcttgacataaaaaataaggagaaaatggtacttcacaccagtataaaatctatatatctatatctatatatatctatatctatatctatatatatatatawaatcaaattttaaaagataatcagaagggcgaaaccacttggtccataaaacaaaagaggggtgagagaaacaagagctagcaagctttctgtctctcttttgggaaactagcattattacgttaaagtgaattaatacatgtattttaatgcctcagtttttctttctaatataataaatattaacagatataaactccattggtaaaatcactttgaggtccttaatacttcttaaagtggccgggcgctgtggctcatgcctgtaatcccagcactttgggaggctgaggcgggcagaacacctgaggtcgggagttcaagaccagcctggccaacatggagaaaccctgtctctactaaaaaatacaaaattagccaggtgtggtggcgcatgcctgtaatcccagctactcgggaggctgaggcaggagaatcacttgaaccygggaggcggaggttgcagtgagccgagatggtgccactgcaccccagcctgggcaacaagagcraaactctgtctcaaaaaataataataataataataacaataacaataacaaaaatgtttaagagtgaaaagaattcttgagaccaaaaaagtttaagaactagggcttgatgatgttcaagcaaagataggaaaaggctattgcaagtacggtacaaagcacagggggaaggtttcataagtatatatataatatatatataatataacataaaattcatatatattataaaaataataaatatgatataaatttgatatraaatattatataaatctgatttttaacatattttgattttatactggtgtaaagtactattttctctttattttttacatcaagaatatgtatcccctacatagtataagtttatcatagtttttcttacttcattcctaacttcctagttgtagtgataaaatctattattttatatcaataaaaatattgatataaattttatttacatgatatacaatatttaaatataacatattttatattacaaaatatactactatgtattacaaaaaaaaaaacaaactccatttagcagagcaagaatggagtttgttttgtacagtgctgagttccaacccatagaattgttaaataaataaaaaggaaagaacactataagatcaaactcatcagttataatagtaaatgtgaatgattccaatccccccttttgaaagacaaaggcttctaaatatggtcagaatcctatttacagtarcaycaaaaagaataaaatacttaggaatcaatttaatcaaggaggcacaagacctgtgcactraaaactcagtaactgaaaatgagcaaatgatgtgatagacatgtctccaagggaaatatacaaatgcccaataaacacatcaaaagatgttcaacatcaytagtcattagggaagtgcaagtcaacctgactttgtactaggatgttttgtattaggatggttataatatttttaaaaaataggaaataaaaggtgttggcgaggatgtggagaaattagaacgcttatacattgctggtggaaatgtaaaatggtgtagcactgtggaaaacagtttgatgattcctgaaaaagttaaacatagaattaccatataaccagcaattctgctcctaggcatatacctaaagaaattgaaaacaaggactgaagcagatgctcaaataccaatgtccgtagcagctttgttcaaaatagccaaaaggtagaaacaacccaagtatctacgagcagatgaatggataaatgaaatggagcttatccattccatggaatattcttcagctatacaaaggaatagagttctgatacatgctacaagatgcataaactttaaaaacattatgctaagtgaaatgagccagacacaaaaggataaatactgtattccacttttatgaggtgccaaaaataagaaaatttattggactaaaaatagattagagataaccagtggaaggagagaatagggagttacaactcaatacatccagtttctcattgggatggtgaaaatttttggaactaagcagtgataatggttgtataatgttgtgaatgtcattgatgccactgaattatacccttaaaatggttttaatggcaaattttatgttgtatctcttttaaaacaataagaaagaaaaaaatttttaaatatatcatgtgatattaggaaagaaaaaaacagataacagtataagaaaaataagaatttaaaacatatcaaataagatttaaaaattttgtttaagatattgatacttggtccagtgcacaataaagacaagaactttttttttttttcttttgagatggagtctcgctctgtcaccaggctggagtgcagtggcactatctcggttcactgcaacctccgcctccagggttcaagccattatcctgcctcagcctgccgagtagctgggactacaggcatgcgccaccacgctgagctcatttctgtatttatagtagagacagggtttcaccatgttggccaggatggtcttgatctcttgacctcgtgatctgcctgcctcggcctcccaaagtgctgggattacaggtgggagccaccgcgcctggcctgaagacaagaacttttgaacaagagagcgctaactaacgtattgaaatacataaaacaaatactgatatatagaagagctcattcagctgyttcaaagacagagctctgtaacacatgtactcttacctaaagaactgtctcccaccactggaaaggaggtcttctctgaccaaatacacagcatcttggagttggccagcattaacttggatcatctggctggccaggaaaggagtgctcagggagaaagaggatggtcaccatcccaaccagattggccattagatctatgtatcaacagagtgacatacgggagaattaaaattctagtatgcaaaaatacrccgtatgttaacagaaaatagactgcagggaaatttgtattaggtaaaaccgagagaaagttaagagcatacaacagtagataagcaatagacaacccgatataaaaatgaggaaagaatatgcacaggcaattcacaaaaggaaacataaaaatggccttaaaaattgctaaaataaatatttaagcaaaaaagctcarcttcactatggtttggggaaatgcaaattaaagcaacaatatgtcatgttttcacagtcacattaataaaagtttaaaagacggaagtagaggtaaataggaatttgaggaaaaggagccctctcatagtggttcattggaatgtgaattgctgcagctttcaaaaaaaaatcttacactatccacaaacaatgaaagcatagatatcttcttagctactaatcccactcctaggaaaaggagtattaattacaataggttctttattgcagtattgtttatataagcaaaaagagcaaacaaccttgacatccttctattagcagtaggttgaataaatcataagacgtctactatgaactattttgcagcaatcaagaagacttaattagatctctgtttagtgatttgaatgggtgaccatgttgtgatgtcaacagaaaaaaataatttgcagaaaagcatatagagtttgttctcaatttggaaaaataatgacaaatttggaggagatatcctatacacatatgtgtgtttgattgggtttggaaaaatcaggaccacctgagatggaggtgggagtgacaaaatatacatggtatactaagtgaatatataggttatacaattacgttgttaaatttctgaaaacaagtgcaacttaagcatataactaaggagtagatgttaacctggacaaatgaaacatagattgttttgagcaagagacrgcaaaattttttgtcaagagccagatagcaaaattttcaattttgcagaccatgcaatctctattgcaattactcagttctgccattgcagtggaaaaatagccctagacaaatgaatgtgtgattgtattttgataaaacttcatttacaaatacgtgctatagaacaaatttggcctgtgagccatagggtgacaatctccggttagatgaagggattgagagcattatttttcttcaattcttgtcattatgcaaagtcagagaattttctaaaataaataaaaatacaaattggcaaaataataatagttgaaaacttcagattgggcaaataagtgaacaaataatcacatgttgaggaataaggctgctttgattcttgtgtgttcaactttgaaacctttatcacagttataaaaaccatttataaaagtgatataactccacagagtatacctcaataaatttgcacatagaagaaatcaaaatgggtatattttctcatcgcaatacaccaaaaactaggaattaataagcaaatgatacattaaaaattcaaagttttagaaaacggagtaccttagatcttgatcaaagagaaatttaaaaacagccattgcagattacctggagaataacaatcgctaaygatcctcaagtgcatgtgcctcaagcattcttctaagtcctttacttgaattgatttacttagtctttaaaagaccctttgaaatggatatcatgcatatccctcattgtatagaagagaaaactgagacagacaggttaactaatttgtccaaattcatgtgacaggttgaggttagaattagaatatcgccagtcagcttcaacaacctgtaatggtaagccttacattatttatcttcttaattaggaatgctgaaacatatattactcataaaaatttctggggtgctgatgccaaaactgtcctcagagaaatttttcaatcctttttgttacttgacaggaaaaaattcaaataaatgaacaaaacatttcttaacaatttttaaattattaaaaacatatataaaaggctgctggagtaaggaattaataaagtaatgaacaaagaaaaaatcatagaaattataaagaaatctaaaagcagattctttaaagtgaccaattataaaacaaacagactgggtcaattgtcatttcacaaaataacaattctataaatatacaagaatgagaaagaagacataagcctgttgatattgaagagatttaatacttgataaaaatattatatcttctctattctaataaaattaaaactatccatgaaatgtaccatgtcagaagaaaaatacaatttaccaggtgtagtttaaaataggcagaattgctgataaacccatatctgtttgagtccatattttcaattcttttaggtatatacccagaagtggaattcctgggggatatggtaattctgtttaacttttcaaagaattgccagactattttccacagctgctgtaccattttacatccccatcagcartgcacaaatgttccaatttctctacatcctcaccaacacttgtcatttttctggtttaaaaaaaattattattataccaccctaaaaggggctgaagtcagtttgatttacattttcctaatgactaatgatgtggagcatcttttcttgtgtttattggccatttgtatgtcttttttggaaaaatgtctattctcatcctttgtccatttcgtaattgggttgtttgtttcattgttattgagttacaggagtcctttatatgttctaagtattaaatccttatcagatagggttttcacatattttctatcattctgtgggttgtctttttaatctcttggtggtatcttttgttcttgacttggactgcaggacacttcagttcctcactacatgggcttctccaaaggacagctggcctctcccagaatgagcatctcaaaaagagaagaaaacattgcagtgctttttgtggttagcctctgaagttgcacactatatcatttccactttattctaatcattagaatcaagtcacaaagcacagcccacattcaaaaagagaggaattgggctccatcacttgaagggacatgtataaaataatttgtggacatatttaaaaccaccacaaagaagcacctttaaaaaaagacaatggcccagttttgtaactcttttttaacttcaagaaatagataatccaagtattaatattatttaaactgttatggaacatagaaataaaattatagccataattaaagtttgccaaagattacaaatgaaaataaaataaaatatatctctggctcatttgctaatataaatactaaaaatcttaaattgactattaaataaaaccaatattaaaagaattatgcaaggggaacaagtaaggttattccagaaatggttccaaattaggaaacccacaaacttacaatattaaagagtacaacttttcttaaatgtcatataaatatactctctaatgccaaaaaacacaatgaatggttaaaatctaaaagcatgcttgaatataattaaagttcaaaggaaaagaacactcggcatccttcctattattcaaagtagttgtggaaattcaaaccagtaaaatgacagccccctgtatttagagagatatacatatagatatagatagagagagagagaaggcaaatttattattaactgatggttgtttacctgaaaacccgaaggaattatttgaaaggttattagaataggaaatggtagtgagatatcgagtaaaaaataaatacttataaattaattactttctttatgtaggtaacaaccaaatagaatataaggaggaaaaataccattcacaacagaaacaaaatcatctagaaagaaatttaacaggaaatatataggacttataagcagaagatttaaaagagggggacatagaaaaatacttcaagaaatggaagatataatattttatttaaaagatttaatgttgtggtgatgttaattatccctgaattagtatgcaaatttaatgtaatcagtttcaatgacattcttttttttaatttgacaagatgtctgtaaatgtcatgagacccaccaacagaatattctgagataataacaagaagggtgtttgataccagatcagaggtgggtttgatacccacctctcagtgtctggtaaccacctttctactctctacttctacgagttcaactattttagatttcacatgtaagaaagatcatgcggtattagttcttctgtccctagcttattttggaaggtattttaaggcacaaatatgttgtagtgtaattatgttgtaatttttcctgacctgatgtcccacgtctgtaaaattcttttattgaagcctaggctctttccctaggactccctgtctggaatcataaatatcttacttctgtacttaacagaattgttctgtctgcatatagtccccactttttctccaagtagtttctcaaacaaatgcacttcctttcctgaaaagatgagtaagattttaacagctttaaatctttatatatagatatattttaagccaaacgactacactgtacatggttttatagccctctttaatacttacgaactatattgtataattattctaattattatatattactctacaacaccatttttagtggttgcattttggttattacttggatagtccataacctacctaacaaagtccttaatgtctggaattaaagtggtttcgcatttcaactgttagcaaaaacactacaatgcacgatcctgcacacgtgaaaagaaatgagatgaggacttcactaacttcaaagacagcttaaggattcagatcttcacatgtacacaagagacaagatttgcagatttgagtgaaaggctatgcacgattttaagcctttcagtacatattgccaaagtgccctccactaaactttgaccatgacctacggagtgagtcacaacagtgactctttctttgagtttatattactgctaggttttgtcaatttgccaatctaatgggcaaaaacggcattttatttgcattttaaagtgtatttatcatgtttataaggaagctaaacttttcatatgttcatttgactatttccatttttcgtttgtaaattatttgttcataattctttaccatttttctacttgggtgtttgcctttttataattgatgtataagagttgtttttattatttttcctctgtggtttgtcttcaaatttgtatgtagaaaggtttatttgtaattattcagttttatcagttttgttcatagtagaatttttcctcaatgtatgtctatagaagcctcaaatcagaaacacgtttgcctaaatcacctagttcttttatggttttatttttgacatttaatctttgatacacacggattttgctttgatgaatgtcatgaggcagagatctagcttagcttttcagatatttgccctatcaatgaataattcagttttccgtgtcttgaaatgccatctttatcactgccaatttcttacaaaaacttgtatctatttcttgggctttcccccattttgctctagggatctgtgtctctattcctgcatcatttcaattattttacattttaaatgcattttaacatcccttctgtttttgtgccttaaaataccttccaaaataagctaggcacagaaaaactaatgccacatgatcttacttccatgtgaaatctaaaacagttgaactcatagaagtagagagtagaaaggtggttaccaggcactgagaggtggggagctgagatttggtcaaagggcgcagggtttcagttagacaggaggagtaagtttcagagatctattccacagcatggtgactatagttaataataatgtgtatttcmaaattgctggccgggcacagtgtctcatgcctatagctctttgggaggctgaggcatacgaattgcttaagcctagaagttagaaactaggctgggcaaaatggcaaaaccctgtctctaccaataaatacaaaaattagccaggcatggcagcgcatacctgtagtcccagctactcgggaggctaaggtgggagaatggtttgaacctgggaggcagaggttgcagtaagccaagatcacatcactgcactccagcctgggtgatagatccagaccctgtcaaaaaaaaaaaaaagaaagaaagaaaagaaaaagaaagggaaaaaaaattgctagaagagtagattttaaatattctcaccacacacacacacacacacacacacacacacacaaaacaaatatgagaggtgacggacatgttaattagcttaatttaatcatttgcaacagaaacatatatcaaaacaccacattttaccctataaatatatacaattattgtttgttcataaaaataaaatcagattttaaaaaatattcactgtgtttttttcagccatacataggctggaaccttcttcacattttggctccaacaatctagcttagtcacagcgagcacatctaaaacaacctctaggaggccaaaagtcagaggactcccatgatcctgtgctcttagacaacttttaaatgtatgataggagacaggcagaggaaaacacaggtaataatgggattatccttttctttcctttctccagtggttctcaacttgtttaattgcagcaatttttaagattttttttcttggcacacttgaaaagattgtataccatagcctaaacaggctagcaataagtaaaattcaatcagtacctaaaacgtaaaagagactcactgtgtctacaaaaacattgacggtcattgccatagtcacacagttccctttagctttctgtcactgtttcgggaagagctggtatatcagttaggatttccagctgtaaaagacagaagaaataaaataacaggatctcaaacatagatagtagtttacttctgtctcaggttaaaaatcacgaaagtaggcagtccagggtttatacgatgactccataatccacagaaacctgggttccttccactttgctactctgacctcttcaaaatgagagcccatcttatctcatggtctaaactccagccagtatagaggacacagggaagaagggaaggccaattcctttaaagacactttccagaagttgcacaagacactccacttacatcctctggccagaagttagtaacatggctatgcccggctgtaaggaaaggtgagaagtgaaacctttattgcaggtggccaatggcccagttaaaaatagagggttccattactaatgaaggagaggaaagtggatactagggatggcaccagtagtctttgctacaaatggttactgccctgatcacatttcttacataatcaagaggaaaagttcttaactgttgcagttactgcctcatcattatatggcattccattttaccctttaatttttacttggtcaagtttaggcctgctgtacaccagaacacatgaatagctttgctcagcattctttgtgacgttgctcacagtaacattatggatacctaataaattttttaaaagacaaaatgttctacgttttgtggcctactctggatggctttawggtaaagtgggtgagtatccctaccctttacatttcaagtgtaggggtgtttagctgtctcttctggctctcatttactgactcttctgggtaaatccattgttctttcttttatacaagagactatctgagcacccaaaacttgaaagtctctaagctaggtgctatagtgttaaatatttcagtaagatattttccctgcttaatccaggagcttgtcatttccttgctggaagtacacatggataaaataactgcaaggtttctgaaagacttaagtacaaaaatgtcctgcaaagaaaaagggaaatatctcattcagttgtgagggattaggaataaaaatgaattggagaggtcaaaatgtaagcttgtcctcaaaaagaaaggactaatttgcagatggagatggggtttcttccttccgaggtctgccatggtgtaatctgtcctgtaatgtctaatgtctacctgctattattttctaaatggtgagttaaatgggaaatatgtgtagcgtataaccattttctatcmtttgctttaggtttcgactcattggttccccatctactacttgtctcgtctcaggcaataatgtcacatgggataagaaggcacctatttgtgagagtaagttgaaatacttttctccacaaattcctctgtgtgatcctgacttgcccctggagtacaaagaataaattgaatccttcttgcacaaagtagtctctcagatatttgaaaataggagtcagatgcttcatggtcttcctggcttttctttatcttaaaaggtgatttatctgaaactgtgggcttgaacctaggcaaaataccctactttcccattataatagtaaatatttccagtatagagagtgttgtccttaatgagtacattttaaaggcgttagacaaaattagatctgtctttgccaactcttactatctatcaggttacaattccacaaagtaggctactcactttcttgttattctaatccaaataataaaaagaactcttcttccagttcttagcaattttcctaagcctctgatcattttgagttctaatcctccttcaattcttttaggcccatgtcttcagttgtatttgttctcgattagctgaccctccatttttcccataagatatttttcaatgaatctccaaaactttaaaaccatggaagaatgattgcaaattggcaaagtgttatagctgtgaagaagtcgtcatcgcacacagagttgatggcagcaaaagtaggcacagacttccagaaagctaatgaccaatataaacaaaagtaaagtaaataccctctgactgacaattccatttcccagaatttagcccaagaaaataatcatgaaatagtcccatgattttggtccagagatactcaatgcaataatatttgtgatagtggaaaatgttaaacaacctaaatgttcagcatggtttgaaaatagctagtagaagaaataaggcatattttaatggctatcagtttttcggaaaggtaaaaaagtgcaccaggaggaattaaaggttgagatgcctcatccaagtggaaaaagtacatctatgtagctacatgactgattattattcagccaccaaatatggtagtatagaaaatatatccatccatacatatgcatgtatccacatatgtatctaagaggatataattaaattgttacaaatagttatctttgaaccattttcactttcttctttctctttgtccatattttataaatttcctacaatgaatgtgttcattgtagtcactaatattcttcccccccaaattaacattgacttttaaacattaaatgaatgagaatgtatacaaggtgcctcccatatctgccaagaacttgaaattctatgaaataattcaaattatcaaagaattatcagtttactatacraagttttcaaggcatggcaccttttgtagggggttatcttttataaaaaaatttccacttctacatttataggtcagtgatcatttaattgagtcaatactggttatgtgtgtatatgtgtgtagtcacttagccaatatgtgaatattattatcttaygatagaacacagtattcatttatcattttattgcccttaaatctgccattatttcatttctcatgccttatcttttgtgtttccttttctctctttttcttcataaataatgccagaagtggtatatttaaactgcaaagaggttattttaataacctataggaaaaaatagtccagcaatagataagtaccttaacaatctgtgataaaatcacatgtattatccacttaaaattataaatatataaacccaaaaaaacatggattttttttgtgaaatatgagcagaacccatatcatacacacctaaatttcaactaggtaaaaatgtctgattattagcaaatattttaagaaaataacagtattgtaattccatttagaaaatcattggattatttgcatttggtatttaaattcatagtaaaataattcattattaaaaaataagctgttttaccatactcttccttctctcagtcatatcttgtgagccacctccaaccatatccaatggagacttctacagcaacaatagaacatcttttcacartggaacggtggtaacttaccagtgccacactggaccagatggagaacagctgtttgagcttrtgggagaacggtcaatatattgcaccagcaaagatgatcaagttggtgtttggagcagccctccccctcggtgtatttctactaatraatgcacagctccagaagttgaaaatgcaattrgagtaccaggaaacaggagtttctttwccctcactgagatcrtcagatttagatgtcagcccgggtttgtcatggtagggtcccacactgtgcagtgccagaccaatggcagatgggggcccaagctgccacactgctccaggggtgagtgtgacccatcaagactttgctgggtgtgagggtacgtatagatgataggagttgttgaaattaaggaagaagtgtataaggactatgaaattggcataaacataatagtagcttcactgtctgttatctctgttaataattgtctcaaagtaatggcttattctctcatctatagtagacatattttagatgcatttttgaatttaacatttacagcaaatatatgaagtagctactattggtatccccattttactttgagagaactgagtcttagtgatattaaagaacttttccaaggctctgactccagagcctaatcataatgtacagtggaatgtatcatgaacaataatgtgtaatagtgatgatcgtatctctatccctggagtggggcagtaggcaagtgagccatgaggaccaaaatgagagcatcaaatcaaaaaggccttggacttcaacttcaactttttctcattataattgaaaagactgaagctcagaaaaagtgttttgctcaaatccaaacaaatatatatatatgtatatacacacacacacatatatacttgatatataattatatattgttcagattgaggctcaaattcattctttgaggttttttgattgtttgtttgtttgtatgtttgtttgagagaaggtctcgctctgttgcccaggctggagtacagttgtacaatcatagttcactgaagcctctaactcctgggctcaagtaagacctctgcctcagtctcacaggtagctggaactccaggtgctcactaccacacctggctaatttttatttatttttagagacagagtcttgctatgttgcccaggctgatcttgagctcccgtcctcaagcaatcctcctgcctcagcctcccaaagtactgggatttcaggcctgagccaccatgcctagtttcaaatgcattctgatgccctgagaacacaccaattgtcctgtggatggaggcagccaacatttcggttaaaatacggtctaagcaatatgttctatcactaaaaagtctgtagcttttttttctttgagggggggttgttctttttgtttatttttaatttattaatctttaatttttgtgggtacatagtaggtgtatatatttatgggtatatgaaatgttttgatacaggcatgcaatgtaaaataatcatggagaatgaggtatccatgcccttaagcatttatcctttgtgttacaaataatccaattacactctttcatttttaaatgtacaattaagttattactaactatagtcaccctgtcatgctatcaaatactacatcttattcattctttctttttttttttgtacccattaactgtccccacctcccctccctaccctcaccccctatccccacgattttgttcttgatgcctcctcttttcttagctgaaatgactggcttaaaacatggagtgggaagaattaggactggtcacagggacagaaaggaagctaacagttcagccctgtgctgactgaaagagggtcagggagtgtggaaaatgaagaatacgtgaaggtgtctgttagatgagaccttggcaacagtactccttgctgttgccttacgcatgagcttgagggactgcctctgtaggaagtggaagagtggccaaaccacccgcactcacgactctgtgctccataaccagtagttgaaagcaagaggaatatgctgccttatagtctttggaacatgtttcagtagaaaaaacacagacaaggtgttggagagactttgattctagtcacagttctgcttggtttccttagcttccttgttagtgagatgtggctactgaactaccaatcttctcttttaatagctgcactctgcaatgacgatttttaagccctctggtaagcataagatatarcaaaggaaattgccccatatctaacaagtgctctggaactgtcctttccacagtgtgtcagccgcctccagaaatcctgcatggtgagcataccctaagccatcaggacaacttttcacctgggcaggaagtgttctacagctgtgagcccagctatgacctcagaggggctgcgtctctgcactgcacgccccagggagactggagccctgaagcccctagatgtacaggtgccttgactctctggcttccagattgctctgttttccccttcacatggaggacttactcctgttgttttattttttcttctagtgaaatcctgtgatgacttcctgggccaactccctcatggccgtgtgctacttccacttaatctccagcttggggcaaaggtgtcctttgtttgcgatgaagggtgagtgtgacccamcgttgagaccaaggactcagtgtggagaatcactctcttgagatcaggggttaatccaattaaggagctgacctagtagataagaagtacccagagagattaatttatggaagggtagttttgaaataagrgtagggactaagtggcaccactttcagaaggcaatgagaaaatggcacatacagctcaatgtcaggtacaaacctaaatacagtcactgatcttgagtacacagttggaacttgaaatgaatgggtacgtatttatttggaggcaaaagaacataattttataagaggtatgctagaaaataaatgatgaataagacaaaaattgtttgccccataagaagtaaggtagaggttgtcttaagaaacttaaaaccaatcaatagtggaatctgtaatagtgcatggataagtgtgttttaacccaataatatatcttcaggtcaggaatggccagtgtaattcttttaatgcaggatttttctcagccactttgccagccagtgacttctggacagcaatgcccctgcccaggccttgcttgggcccaggctcaccgcaggaaacaccccagatacttagcccactgggcggcgtctggctggtgctctgactgggaccctggggccaccatgactgcacactcagcccctggtgggaggggatgtgtgagtgagtgagtgtggggtccagctggccactccaagcacctgcacaggaatgggctctgagcagtgctggcggctggaccaggcatgtcacactgaagggaacgtggtggtgcccaaacaggggtgcccatgaccccaaagcccagaggaggtgttacagcacactaatggctcttagcatttgataatgcctgcagcccaacagatggcagtgtgcttaacagctctgtcaatcctgtcgccccacatctcctgtcgcccagctctggcttgatccgctgctgcttcctttcgcgtggtacagctgccctcccacagcagagggcggagggccacagtgttacaggcttctttgtacctgcgtttggtgggtcctgagttgttgtcccgcatccaagaagaacaaggttatactgacaatagaagggtgaggagggtggagaagagttttattgagtgacraaacagcttctcagcggagacgagacacgagggtggaccccagatgaagtcagggggtcattctctctctcagcgtggctggttctggggcttttatggacacagaatggggagcctgtgctgattggtttgtgactatgcaaaaaagactaaaacaaagacaccactcaaaggtgggcacaacagtgtaaaaaaccaattagggaagctcaggtatatgtaaactaaatgaacagtgaggatcaatcagaggaaagcacaccaaatgggaagagaggttctcaarccagtccatggatttacctggaacttgtagctaggctttaaactgtcttcagcttgaaggtcgggtttcaccgggatctgccccatctgcctaggatttgtctgcctcctgcttctatcagtttcaagtggtattattagttgtttatgtgtatccattactcttggtggtgtgcactatgagtctggagggataactagattgggcaattaagcagttatttttaatgatttccaaagaatcttcggcatttacaaagtccaccacctaataatgatttccaatttcagaatgatttcagatttcagaaggcaagcaggattcaataagttgggcattttggggtgcaaagactcttcccccctcccttctttttttcttagagcacgtggttcagcatgcttctgtgagcctcctctggcctgttacagttgtagtagcaagaagaacagtgcccgttctctttctagatgttcctggctttgcttaccaaatcgagagctgttctgcctcatgacccactaatgagaataagtgggatgtcagagagccatcagtgaaagatgacacctgaaggttatggctcttgtgcccatggagaagtatggttctgtgttcatgccttctgtaggtgatgctgggctatgaagtttatatggcaattatgcacatcagctctaattgctttgccagtcacagggtaccatggttctttagaataaattggcctttgagtttctgtcagctactgaagaattcagatccctaatgaactaagacttttagctgggcctgaacctaagacctaaatgatagtcgaggaggaaatggtagtgaggaagctgagcatctattagcgaagaaatcaagggagagatgggaattgctcacacatttgctaccactttttttttctttaggttccgattaaaaggcaggtctgctagtcattgtgtcttggctggaatgaaagccctttggaatagcagtgttccagtgtgtgaacgtgagtagaaagaactatgtagtttggatagctctccttattttcgttttccagcatgtttttccgcatggcatcacctgttgtctagatctttacttaactaaattatggataaaaatacttctttgttggaagaatttcaagaagggtcttgtaggtcttctctgacatgtgtttttgttactaatctgcaaatcacttagtttaatgactgtttaattttgtggggaatgtgtggcaagaaactagatgacataaaggtgcagcacgttttagtcagtcatttatttttagttttcttatcaaggaggaatctttcttaaatttttatttttatttttattttctgagacactgtcacccaggacagagtggagtggtgcaatcacagctcactgcagcctcaacctcctgggctcaaatgaccctcgcacctcagcctcccagtagttgggactacaggtgcatgccaccacacctggctaatttttgtactttttgtagagatagaatctcgccatattgccccagctggtctcaaactcctgggctcaagctatcctcccaccttggcctccaaaagtgttaggattacaagtgcgagccaccatgcccagccaaatttttatgttcttttatcccctcgcatatcataaacaatttagtcagcttgttttttagcctgcagtatttaatgacatagggcttcccatgtgccaggactttccatgtgtagaaaaagcratgaatagtgaatgaatagtgaagacacctccctactttcctgggatgtattttcttgttgggaagcagactatgaacaaggaaataaataagtaaacaaaattctaaaaattataacatataaaatggtagttaaatagggatgttatggagaaaataaaacagagttatatgataaattagtacgatggaaggagctgggatgatgaatcagtgtctgaaatgatgaggtgtcctaagtttccaaaccatccgcttaaataaaatatgccaaaattcagaaaaaattcagaaactcttagataaaagtacatgtttgacataccaagacattactgattgattctattctgtctactaaagcaaggcaagaattttttaaaccttgttttcctgattattagaaaatgtttattttaatttgtattgtgttaaaataacttatagaaatcaatttggataccttatggtgagtattatggtgaagaacattcaatacctgaggaaactcaagtattcaacaaactcaaccttacagagacacatagagctgaaaataaatatataaataaacttaggaaaacacaaacaggtaaaattcaagcatgagaagtcaatcattgtttgatgtactaggtcttttatatacacataattctgataaatttgggtatctcttcctaaattcatrtcaaactagaagcatcaattgcttttagggaaggaactgttctaagcagactaaaaggaggaagaaatggtggctaataattggaagaaatcaaaaaaggctctttggcaccatttaatctgagtaaaaacagccttactggtgtctgatgacaccactggaaatttggtattggtcctgatggtaatggtcttgaatcacyaagaaacatttacattgctaaagatgatagctcatgtttattaaagttcatagatttccttgaaacttatggtctctgatgaccaaaactttgtctgtcttgaacctcattgtcaactcaggaatcttactatgcctgagttaaagtagacaaccaaatgggtgtttttaaaaaaaataaaaacaattactttccaaattcattgtgaacataggtacctgagtggtccaggaacactgtctttgggcttttgcaataaactgtaatttaggtctcacttcagttagttgcctctcaacaaaagccttacagatttaaattccgtctaccttagttatattctttctaaaagttatattctttttaagcgcacagtcacaggtcactattgtttcagtcatcttaagtgaaattctaatagaacttaaagctcttgttttctttctagaaatcttttgtccaaatcctccagctatccttaatgggagacacacaggaactccctttggagatattccctatggaaaagaaatatcttacgcatgcgacacccacccagacagagggatgaccttcaacctcattggggagagctccatccgctgcacaagtgaccstcaagggaatggggtttggagcagccctgcccctcgctgtgaactttctgttcctgctggttagtacctgcttccacatatcctaaatgggttcagaatatctaggtaagaacctccatatttctatagtgacagtcatttttgcttgtgaaaatggctttgctgtaactgtcagagacagaactacctcccaagtgaatgacaaaygggttatagataggcacgctgtctcaattgttggtattctgatggtccttcctatggggtgaagagtgtgggatggtaaggagagaagggggtggacagtgaagagaattgatgaggtccagatttagtagggaatgttttcaaagtactgaaaacaaatgctaaagaaaatactcttttattccacctctactactacgagttatctttatcctggagagatggatgtgctgtgcaaaaagtacacattgatgatgtaatttacttcagaactgataacgctataaaagtaatttgagaaactcagatgtagggatttatactttttatgttgtttccaagggtttgttcaagccactgactatgtttgtttgatccttcacctcaacattaacaaagggaactcaggaggccctggagaagcagagtttaaaattgtactcttagcctaatgggtgcagcaaaccaatatggcacatgtatacctatgtatcaaacctgcacattgtgcatatgtaccctagaacttaaagtatatatatatatatatatatatatgtgtgtgtgtgtgtgtgtgtgtgtgtgtgtgtatgtgtgtatatatatatgtgtatatatatgtgtgtgtgtgtatatatatatatatatatatagagagagagagagagagagagagagagagagagagagagagattgtactcttagcctccatagctcattcctttgatatattagtctggctttaaacgacagtacctgacaactgtaggcacatgtgtggctgtgactgcccacaccagttccatcttccagtaaggacagaacagcactgaatcggtagcttgtcgatccctgtggtactcccccatctgatctagtttgaagttagagactgtagaggatagtgtttaaatgtcaagaggtctaggtttagagaacccgtctttcactgatcaaataggagggagtggcttatgacctggctggttgaggtcttcatgtacctctaatagccagagatattggatgtgttcatgtattcatatgtctatgtttaactgagtgtcttttcttgtgtttgtgtgggaacttgttcttagcctgcccacatccacccargatccaaaacgggcattacattggaggacacgtatctctatatcttcctgggatgacaatcagctacatttgtgaccccggctacctgttagtgggaaagrgcttcattttctgtacagaccagggaatctggagccaattggatcattattgcaaaggtgacttatttcttggtattccttattcttgctgggttgtatggaatgcatgaggcttgtaaggctgagagacattgaaatgagcttaatgaaagggataatatttttttcttctcggcaactgctttcttttcatttacataaaattatttcatcttattaactgtcctctttgcatggtcgatagcagtgcttctccatccagagcattaacaaaatcaccttgttaaaaagattctcaaactccattccatggcctcygattctgttttaaagtggggtcaaaagtctatttttaacaaactcatcagaatgctctgatgcaggaagaccacagaccacacttcaagaaataccactttgccttcttggtttgtatctaggaaaaaaatattgtaggcttaattttgagactattacaactgaaaagaagtctgtgcttgaagatgaaggatgtactgatggctgggcagaaaaagaaagtaaaacaaaggataagttaaacaaaataaagtagtctgggtgcggtggctcacacctgtaatcccagcactttgggaggctgaggcgggaagatcatgtcaagagatcgagaccatcctggccaacatggtgaaaccccgtttctactaaaaatacaaaaattagctgggtggtggtgcgcgcctatagtcccagctactcgtgaggctgaggcatgagaatcacttgaacccagaggcagaggttgcagtgagctgagatcacgccactgcactccagcctggcaacagagcaagactccgtctcaaaaaaaaaaaaaaaagaaaaagaaaagaaaagaaagtaaattaattagaaagatgtattaaattcaggctgggcacggtggctcaggcctgtaatcccagcactttgggaggccaaggtgggcagatcacctcaggtcaggagttcgagaccagcctggccaacatggtgaaaccccgtctctaccaaaaatacaaaaattaatcaggcatggtggtacatgcctgtcgtcccacctacccgggaggctgaagcaggagaattgcttgaacccaggaggtagaggttgctgtgagcccagatcgcgccactgcactcctgcctgggtgacacagtgagactcaaaaaaaaaaaaaaaaagaaaaagaaaaagaaagaaagataaattttaaattcacaatcatgatttactaacttctttgttctatgtgcagaaattggccagaattatgcatttaataaagagcagagtgccagtatttgttgtgaagccagacagaattaacatggtactcctgttccctcacagmgtgaccccagtggctccagggctagatcaccgttagcctaattcctaatctttccacagctttccagttgcagagctgttaatcaacagtgaatgcacagtacattccatattctattactttacattaagaaatgggagtcaggaaatgttaaatcataaggtttttggaggaggaagattagtaacatgtttaaaaacatgcttcctcttagccaagggcaaaataggttttggctattttctcctattctcgcagttaaaacggacaatcaacaataaaatatcaatttmtttctgattkgtctaatttcagaagtaaattgtagcttcccactgtttatgaatggaatctcgaaggagttagaaatgaaaaaagtatatcactatggagattatgtgactttgaagtgtgaagatgggtatactctggaaggcagtccctggagccagtgccaggcggatgacagatgggaccctcctctggccaaatgtacctctcgtaagtgcaagtgcaaggaatgtgggatcttcccggtcatggttattgctcattcattcatccatattggcatcaagtgtagtgtgatgtttatggcatatgctatgagctatagagtacaatatgagcatccacctattccaaaactcccatagtgagagtaaggccagacttcctcttctcatacttctcactgcagctctgcaccttttttgtctatatcactttgtggttgcatgagccacacagtaatgatttatttacagcctacgagccttacaagaaatgttttcagcatgagttagggagcaccttccaagctgcagagagcagccggcctgtctccctcactactggaggggacaggattttaagctagcacagctggatagagcagatttagaaattacgtatcattgagctctgtagaagagtagccctctgctggcaactggaaggtactgtaagatagaaaactacccacatcatggagcagatgagcaaagttaataatgaacagcctttcttaatccaagttagtgctacactttccyttctccccatctcttatgactcttctaatacatggttctacaccaagattgttcaagatccagttttacaattaatcctgtaaatatgctaatatgactcgcagataatatttctaaattatcagcttgacactcccttaatatcaaattatatttgcttttttggcaaaaatctcactggataacttactaaatgcttttagagtattctgaagatctggctgggactgacagaaaattcaggtcattggagaaccaaccgtatcaaatattagaacaaaatataaagcaataatacaaaagtcactttgcaccaggataagaagagacatacaaataagtggaacaaaattgatattaataaaataaaggggccaggtatggtggctcatgcctgtaatcccagcactttgggaggccgaggcggatggatcacctgaggtcaggagtttaagaccagcctggccaacatggtgaaaccccatctgtactaaaaaataaaaaaattagctggtcgtggtggcagatgcctgtaatcccagctactcaggaggctgaggcaggagagtcgcttgaacacgggaggtggaggttacagtgagccgagatcgctccattgcactctggtctcggtgacaagagcaaaacattttttaaaaattgtccattaaattaacaataaaaaggttgttaggtgaacacccaatacaaagcaaggatgtgatgaaactgatattgttgtgtgttgaaggtactattgtaaatttgcaaaaactcttatgaaaaacaattatgaaatgtatgtggaaaataatacaactattcctgccagttagccctcctagaaatttaatctaaggaaataatgtaaaatattaaaatattctatgcattttattaagggtttcatgagacagaaacctagaaacaagctaaatgcacaatagaagtcattgaatacactatgatgcatctactagattatgttagtttgcctttgttgtaacttatatttctagtatataattatgtgaaaacacacatataaggaaatgtaccagaacagaatgtatcaaaacattttttgggtatgaggattggggtgacttttttctttagttctgtattataaattttcttctgtaattgtattaataataatttttaaaagtcttctctgagtgcagaaggtaaaatgagagtatgtgaatgaaaccaatggctttttgcattagaaaaaatattagactgagtcctgaagaaaaatcaggatgacttgtcactggctgagaggtcctgttcaatcatgttgcatgccagagtgatgttttgtgacttttgtcttccttttaggtrcacatgatgctctcatagttggtaagttttatgaaagttttgctgaggaattctggcatctataacagtaagtacctacctataatgaatgaaatgtaaaaagagagatcaaaatgtcttgaggtgtaaagagatcaaaatatcttcagttgtaagttcaactagaaagaaaataatgataagttaggccacaatatggtgaaactggcatcgtcatatgcatactaaataaccttcatcaaaggctctttactatctttgaaccattacaaatgaataatcattcatcagtgtcaaaaattctttatttgaatgtggtgggagaatgcaacttcttctttcagttgtaacctggagtatgcttccagatggtgatcctgctcatttgcacaaatagaaagccataagaccagtcttctgagcccatatctgtgatttgcctaaataagaatagttttgtaataaagtttgcttccaagggaatactgtggcatattactcttacatccctttttacgcatctggacactgagacacagagagttaacgtaacttgtccaagaccacagaatggggtagcctgggtctacttatctgtggagactgtgcactttaacaatcaataaatggacaaaatgacctaaatatgtaattcaacaagagagagaattccagtattttcacaatgaaatgcctgtgtgttaagtcttaggcaagagacatgggcagggccatggagagctggtggccagctgccccatcacggttctcacttacttttggaaaagctgacattggactaaacgttacaaaacggctcagctcacaccttaactttaataaccctgtgggagtgagactaatgctatagaaacccagagtaaagcagaatgtatagttacatctttaaaaaaaaaaaagcattggcaatctgtagtgggactggatactaagatagaatttaaaacctgtaagttatattttccatgcatttaattaccttgttttactgcctaggcactttatctggtacgatcttctttattttactcatcattttcctctcttggataattctaaagcacagaaaagggtaagtatagccatattatcccaagaaatgtaaactgtacttaccccctcttggaagtcaaaagaaagtaaaagacaaacaaacccattgctacataaacagatgtggtaattcttataaagaaagtccttgacacacagtatagacaaagaggtattcacactaaaggaagtatataggatactaagaacaattaaaaaataataataataacaaaaaaaagaccatttggccaggtatggtgactcatgcctgtaatttcagcactttgggaggccaaggtgggcagatcactagaggccaggggttcgagaccaacttgggcaacatggtaaaaccctgtctctactaaacatacacaaaattagctgggcgaggtgggacacacaactgtaataccagctactcgggaggttgaagcatgagaattgcttgaacccaggaggcagaggttgtagtgagccaagactgtgccattgcactccagcctgggtgacagagtgagactacatctcaaaacacacacacaaacacacacacacacacacacacacacacacacacagcattttaagaaggaattgagttttacagaaagagaaagtaggcagaaggggtttttaaatagttgttcatgaggctgtttgatatcctagttttgctaagacattgcagacactgacctctaagcccagatcctatcatagcactagaagttagattgggtcacttatggcacacatatcatatggcacacataggctgccagtggggaagaattgaaactttccattgggtattttaatatataaacaaatattttgtaaacaccattaactttttttttttttttttttttttttttaagaccgagtcttgctctgtcacccaggctggagtgcagtggcacgatcttggctcactgcaacctctgcctcccagattcaagcgattctcatgcctcagcctcctgagtagctgggactacagccatacgccactacaccaggctattttttgtatttttagtacagaaagggttttgccatcttggccaggctggtcttgaattcctgacctcaagtgatccacccgcctcagcctcccaaagtgctgggattacaggtgtgagccactgggcccagccatcattaattttttaaatttgaaagaaaaaaaacttgcaaagactaagatctgaataaagaaacgtctttgacagggaagagaacctacacagcttttgtactggttgattgaattataacaacctcaatgaggccagaatcaataatatcaatgttatatggttgatgagcaagttctatacccatagaaaaactgaatttgtaacttttaagtgaacggttttctatagcaaatattctaaacaagtacagtttcctacaacaagctttacagaaactgaagttttgatatttcacaaagatgccaatatactttttaaaaagtagtttgtcatagtagatcttgctgtaaagaacctagacaggaactcaatttcatggaaaaatactgaattggtagatatttaaatttaaatatccatccttcctaactaatgttctctatattttacggcttgacatatattctttgctcttttccattataaaaagaaaaggtaagtagctgggcactttaccttaacaaagtacttgtgtcaatacatttttcctcttaaagtttctcattaagtaccatataattagtgagttaattttttaaaaaattactactacgtctgaattaaaggagttggggcttctaattttctgtatctatatcagtctgtagttaaaaccacacaggggaaatgattatcccttcttcttggaagtattcaagatactttaatatcttgaagatatttgattatctccacccttctaactatgtcattcttcattacttatggtccattccttgttaatcaactagagggtcacactcccaagcctaactattgatttgtttcacctacataatttaagatcatttcctcatattaatcaccttcaggcataaacatgactcaataaccatttcataaaattatttctttggaaatgattgtcttgtaaagtctaagcaacctgagaccatataccatttcttcatgttttccatctcgtaaaacctgcctcctatttttttcatattctttaaagtgtaatgtccatggcacaaccattctctctctgaccagtggctaccagaaatgtggcagaaagaaagatcatgatccttgttagacttaaaggtcagggaggtaaacctcccaaacatctatgtaacccacactaaaacctattctatatgtgtaatccaggaaagtttttaaacattttctaaacttttacttttgacctgtttcacttcttgggattgtaactgcctgatgtgttcttcctgcctgtcatacagacaaaaccagttccctgagataatggcatattgcagtaaagaaagagatgaattaatacaaggccagtcacgtggaagaactggagttatcactcaactcagtctccccaagaacacaggggctagggtttttatagatcatttggtaggaagggagctagggaatgggtactactgattggttggggatgggggtgtgggaaatgttcctcatgtgctgtgtccacctctggttgggggccacaggaccagttgagtcatgagtcacargtccaggtagagtcagtcagttgccaaatgcaaaaacctgaaaaacatctcagaagaccaatcttatattctacatagtgatgttatctataggagcaattagggaagtcacaaatctctgagcagtaatggattataaaacctatgcctatattttagcagagttcaggtccctctcctaatcctaatctcttggcctttcattaggtttcaggtcctgagcaaggagagagctagttttaggaagagactgttattatccttgctccaaagttacattataaactaaattcctttcatggttagcttggcctacacccaggaatgagcaaagccggcccacctgtgaggctagaagcaagatgaagtcagccatgttagatttctttcactctcagaatctttgcaaaggtggtttcagcatagtgagtgcatttatctaacaaaacaccactgattttcatgttagaaataacacatagctaaaactgggaaaaagaagtaataaacttaaataatcagaaggcagaggtcccttctttcggaaggagttgggctgattaatcatgcagtcatacctccttgagtgggtgtggccaataagctaagtcattgtggctatgtgaggagggctgattattccttatctggagctcaagctttcctcacagaaagacaagggcataaagggcctcatggcaaagaagaaggaagccatgtgggaaacacagactatgagtggagagtatcgtagtggtcaccaagtcagaagagccatttatcctggagctaaaaaagactgacagatatagaatagtgtagaacaagatggcctgctctatgggagagccacagtcacaccaggcctagagaggtgcaggctgacttctacctcaaacactggagacaattcagaagctgcataagcagtctgaagacttactaagaaactaaaatgaggctgggtgcgatggctcaggcctgtaatccctgcactttgggaggctgaggcgggtgggtcacctgaggtcaggagttggagatcagcctggccaagatggcaaaaccctgtctctactaaaaatacaaaaattagcctggtgtagtggcacatgcctgtagtcccagctactcaggaggctgaggcaggagaattgcttgaacccaggaggtggaggttgcagtgagttgagattgtgccactgcactccagcctgggcaacaaaggcaaaactccatctgaaaaamataaataaataaattaaatwaaataaaacaagaaaagaaactaaagtgatagagaaatagaaggaatacacacacagaaatgatctcaccttctttaaaatgctcctcaaggaggtctactttaactatcctagtaaagatgacatgaccccacccccacattccyagtctctcttatcctgctttatttttttcatagccttattctcttttattataattaattaaataattacattccatgtttattctctctctccctccatgaagtcggggatttttgtcctatcttcaccaatggatacacaacaaatctaaactgtccctgggacaaagagagtctcaataaatatttatcaaatgaatgagtgagctacacaccactaacagtgttaccacaaggggaaatttctgccgtaattctctaccaagttgaacagtgcgtctttaacttgtcctaaacttactccaggtttcaaggctgctccttgttctaatataccaactgtctcagtctgttggtatatatacttgggcagttataacagaaactccatagactgggtggattcaataagcatttaagctgggtgcagtggtacctgcctatagtcccagctatctgggaggctgaggcaggagtactgcttgagccaatgagtttaaggccagcctgggcaatatggtaagaccatgtccctaaaaaacattatgtcatttctaaaaaccaagcatttttttctcatagttctagtgggtagagagtccaaggtcaaggcaactgcaaattcagtgtctggtggggatcgctttctagttaatagacttcaatcttttctccgtgttctcaaatcagagaaaaggagtaaaggagctctcctggtctcttttctaagggcactagtcccattcacaagggctctgctctcatgatctaattacttctcaaaggtctcacctttgagatcctatagtaattagatcctataaattttcaacatataaatttggaaagatacaaacattcagtccattgtaccaacactgcatttggtaagcacatatgcttaaacgatatcacacttgatttcatgtgccttctcaatcctcagctttccctgattaagaatacctaattactctgcccatttcctcygcaccctccaccttggcctttccactcactattactactatctcctgccttcttggtctctactattctcctcaccatccctgctccctggactatgatcccctgtgagcagggaccacctatatccacccaaagcaatttttatttaatgattttttaatctctacttgtacagcagtcaaaattaataataagagtagaaatggttaatgtatctacaaaaagagttaacatgtttatttataggtttatttaccatttattatcttctttggtcctcaaagcaactctgtgaggtaggtaggcccaatcatattgttatcccaaagcataaaacactctaggttcaaagaaattcagtggcttgtttaaagccagtaggaagttgttaggaattaggcctttagtccagattatttaactggaaatcttgaactctttgtgctagtattttgacaatgttagttgccatttctgaatctgactctatattactgaaattcagtatccagaactgtacatagtacaaacctaaagtattttccttttttctttcaatattctttttctccctatattttactgagtttgttttagctactttggtatattgaaccagtatctttctagagaaccgtatgcaatctctactttttttactctttattctgagtcattaggctataaaaaattaaggtatttctttaagggcatctttccatattgagatttcctggcgtttcacacagacttggcaagttcttcctgtgatttaatctcactgccttgttatttcactagttaaaaatatgcgcctgcacgttttgatatttcactgtgtatttacaacaataatttgtgataatgttaaataagataggtcataagataggtcatgcactcatcagtgaggaataatactggttagacttcttcattcagagcccattattgcctcttgttactgcctcgtacccactcccatttctacacaaaacagccttgtmcacagtcaaaatttcaaagtttccattgttgtgatgtttagaatgataaaatacttaaggccatcctctgtgaagtctccctgaattttcctatgttcacattaaccaccagtaactaaccaaatagctcttcattcaacatatactcaccgagatcatattctccaaaaccccatgtaccactcatcacccaagaccaccttcagaacactactcatcttaccacttaaccaccactccttggaaggtcataccacctggctatataccactccactcttcctcatccatggatctcaagtgtgccttccctgtcctgtgaaaactctgccccctgaagcagtctgcctctttttctcaaatgatgctgtcattctaatttccataagatggtaaagaataactgagtgatgaggaaacagtggtacatgttgaagtgagttaactcttcaagcttccattctaaaayccctaataccaactcatacataaaatctccaggtactggtactgttttatcatttcattgataaaagatgaagtgtttattaacccccaaagaggcagtgtaccataccaagtgagggtgagggctttgcaaccgctaaggcctgtgttcacrgtcactcactctctatgagaccctgagcaagatacttatcctcagtaaatttcattttccttgcctgtgaaatggagataataatagttmctaccttacttaacatagtgcctcatttatgatgcatgtcagaaaatgttagctattatttacacatgattgttattactgatattaaaaagtgagtaaatatttctttttactgttagttcttaaataccttcatgacagctactgctgctcccctaaccgtggatattgcttgtacagaaaacagaacacatatcttcactataggagaaaaaggaagcctcgtgtaacactgcagtgcaaagtcattcatgttgtgcagcttaagtgtcaaaatctcgatgtaaatcctatttactaatcaaaattatgtcagaaatagtgaaatgtrttaaggcatggacatctgcctataaacaatttagagtactctgacagaaaatataggatgattttagtattattttctaatctaagtttttgcttagtattaaaagatgagatttggttatgattttcctttcagacgtcttgcaaagatatcaggaacttaaggcaaataataccttaaatttcaaaatgcaaattactaatttctttcaaaacagatacttaaatgattaagacagtttttctatttttttctctgccaattagcaataatgcacatgaaaaccctaaagaagtggctatccatttacattctcaaggaggcagcagcgttcatccccgaactctgcaaacaaatgaagaaaatagcaggtacctatatacatactgaattcaaaatgttttcaacaactcaaatatcaaaaatggaaacaggacttgaatatgatattgcactaggtaggtcattgataccaaagaatttagaaagtacttcaggagttggaaacttcttttttttttattggattattattgtcatttccamtgttttggggtgatgactctataagttagtacagtcacagtcactactttttcaaagcattcctataatttcctgtatttatgctatgaaactttgmgaagtagtatgcttttttcttgtggaacccaagaatttgctgcctgcttgtacctccaagtcttccagcttcccttaaatgcacagagtcactttaatgtcctctagagactttcactttacctccccagccaccaacccccttgatttctgacttccactgaattctctacttcatttggcctctttgactgctccttcttttggtcctcattcccttgggcttattaaatacctaacctttcattctacctattcaaagcaggcttactgcaagctgttgtgcagtacacattgctaaagatttggggtgaaaagggaaattataccattatcaaaagtggtatgtatcaatattagaaatcactgaactgaaaagtaactagtacaccagggacctgaaaactaccacctgtgagccaaatccagctggccacttgtttttgtgaataaagttttactggggcacagccacacccaatcgtttgtctactgtctctggctcccttttatactacaacagcagagctgagtagttgcaacagagaccccaaaagccaaaagtatttactatctggccctttagtggaagactttgctaacccctgaactatatcatactatgagaaatttctcactggctagttccccttttaacctgggctttccatcctcttcccaggcctctctctctcattggatactcctctcttttgttcaaatctttactgcattctcagggtatgcagtaaatacaggcattcagactctcgggcttcttgcaaattcaaaactccatttttctttaaaattcagagcaatttatttggctctggcttactttggctatgcccaagaatcctaaaatgtcctacccataggtgtttggaacattttcaggaataagatcaccatatgccctagaacagaattaggccagtcctgtagaaagcagaagcaaaagcaccacaatcattactgaatttcctttctttatgtcctacctctttctcatatacctgtgcattaatctaaatttggcatgttacacctacatacatcagaaatcctaaattcaacagaggacagtggaaggggccccaggaaaagtaaaggaagtggaaaaggtattttatagttaaccaaaacataagtagaagcaattcaaacttttctaaacaaaaaattacagattatgtcctattttctcctataatagaaatgaatttgcaatgccctgtttattatctgtcttcctagttgctttgcttctagcttatttgtcattactgtttatgaaaacaaatgaaatatgcattgcttttttaaaattcagaattgatattttactttttgaagctttaatgtttatctggcctgatccttctcaaatgggcatatgtatacactgggggatacatggctaatgctaatataccaaggggatataaaaatcataagatgaaaatggcatggtttcctagagaatatatttttctaatattactccaatagttcaaataaaaattgtattatttcaacatgaacacaaacacatttataagggaggaaaagacaaataaataatgcaggaagtttaagataaaataagacggctgggcgctgtggctcacgcctgtaatcccagcactttgggcggccgaggcgagtggatcatgagtcaggagatcgaggccattctggctaacacggtgaaatcccttctctactaaatacacacacacacacacaaaatttagccaggcgtggtggtgggcgcctgtagtcccagctactcgggaggctgaggcaggagaatggcgtgagcccgggaggcggagcttgcagtgagccgagatcgcgccactgtactccagcctgggtgacagagcaagactccgtctcaaaaaaaaaaaaaaaaaaaaaaaaaaaagataaaataagacagaaaatattgtgctttcagggatgctttagactatgtctccaaagttcttgcgtgaggcattcattttcctttactatcagagtgctatgggggaaaagtcaggcagaactgattcagggccagctgtgtggccactcatttacaaacagacgaaataacagcagactggaagaacaacaaccatttttacaagagttcattttaaaaatattccacaatgataaattatttgatttagcctcattcctgtcagattacctgcctaaaacacttttccgcctttctttctatctaaattccctgaacccagctccagctctgaattcaatcaaccaagatgctctcccaaacaactctagtccaaaatgatatctctctttgaaactcacatttcctgactacaccatttaaaaaataaactaatttattttaacagtaatatctcatcattgttaaaaacaagaaataggggaaaatataaaaaatataaaaattacctgcaataatctctatctagtagtattcttaagcttctttgcatattrttagacatttgcatatacaccttgagattatattgattgcacaatattgaatcctgctttttttaccaaatgacaaacatttctcccatcattataacagtacataacctatagtaattgacatttcctgtgttgttttttgcctgttaactctattgcattcatgtagttgcttatttattcttcaaacattcttagccacttacaatgtgccatacattgtgcttatgtgtgttttcttttccatgctaaattaacytctgatgaatagagacaattttttaaagatctccccaatctctgagtataatcaaatgagaaatgttcagtaatcaactgagcacgttaatcaattgagaaatttttcatgcacgtccctgtgaagagatcaccaaacaggctttgtgtgagcaacatggctgtttatttcacctgggtgcaggcgggctgagtctgaaaagagtcagcgaagggagataggggtggggccgttttataagatttgggcaggtaaaggaaaattacagtcaacggggctttgttctctggcgggcagaagtgggggtcgcaaggtgctcagtgggggagctttttgagccaggatgagccaggaaaaggactttcacaaggtaatgtcatcacttaaggcaaggaccggccatttacatttcttttgtggtggaatgtcatcagtaaaggcggggcagggcattttcacttcttttgtgattcttcagttacttcaggccatctgggtgtatacgtgcaagtcacaggggatgcgatggcttggcttgggttcagaggcctgacaaaattaatttatgaaaatttcatttatcctcaactttttggaaatactcttacatcaaagtacacctcaaattgtgtacactgactactgatcacttttcggtaggtataaagtccttaaaaattttgtttcaactttcccttttaagattagaattttgaccacagtgttccatgggaacaaagtgaatcatctgtggcaaaatatgctagtcaagaagtgagttagaatctgtgccaagcgttaagaccttgtgcacccaggttctggggcggagtaaagaggcaggctccaaagacatagctgtgtgttggacatgagagtatttggaggaatacaggtaacaggtgatgctgggaagtcytgtgaaatggaasgagaacraagatgaggaatctggtggcmgtaataaccggggaacagatgagctggaggcctcatcaggaggggtgtcccttggtggaaggacaccattcccggccttaaaaggagasgctycagcacggctggggaagcacgtggataccttgtactaaatccactactgcagctcattcttaactgtaagtagaagaggaggacatgctttctgaagctgacccctccaagatgaccagttcctatttctgtcccctgctaccaccatggtgtagaacaacagaatcaaaaaaacattttttctgttatgggtgacctgtacgttttctagaatggaaggaggctgtttagtagctcaactctgagaacactttttctttggacaaaattaaaaaaggaaaaggtcaagttaatcattaatctctctgttttctactaatgtctccattttcgccatactttctatgtcctacatagcagccatcacagagggcaataaacacttctaatgaccgtgtaatttatatggaatgctgaaggggtgggttggccctccacacctgtggatgtttctcattaggtggaactagagacttggaaaagaaagagacacagagacaaagtatagagaaagaaaaaagggggcccaggggaccggtgttcagcatacggaggatccaccggcctctgagttcccttagtatttattgatcattaatgggtgtttctcggagagggggatgtggcagggtcataggataatagtggagagaagttcagcaggtaaacacgtgaacaaaggtctcggcatcataaacaaggtaaagaattaactgctgtgctttagatatgtatacacataaatatctcaatgccttaaagagcagtattgctgcctgcatgtcccacctccagccctaaggcggttttcccctaactcagtagatggaatatacaatcgggttttacaccgagacattccattgcccagggatgagcaggagacagatgccttcctcttgtctcaacagcaacgaggcgttccttcctcttttactaatcttcctcagcgcagaccctttacgggtgtcaggctgggggaaggtcaggtctttcccttcccatgaggccatatctcaggctatcacatggggaaaaaccttggacaatacctggatttcctagacagaggtccctgctgccttctgcagtgttttgtgtccctgggtacttgagattagggagtggtgatgactcttaacaagcatgctgccttcaagcatttgtttaacaaagcacatctgcacagcccttaatccatttaaccctgagttgacacagcacatgtttcaggaagcacagggttgggggtagggttacagatcaacagcatctcaaggcagaagaatttttcttagtacagaacaaaatggagtctcctatgtctacttctttctacacagacacagtaacaatctgatctttcttttccccacatttcccccttttcgacaaaaccgccatcatcatcatggctgtttctcgatggttgctgtctctttggagctgttgggtacacctgcagactaacaacagacaaaacaggcacacaaggattaatatgaaatttataatcgtagtacttccgatggtcttaacccaagtgacagggttaagatttgcgaggccatcagcaactcctgcgattgcctcagttcctggcaccaaatttaaatgggcttttgatgtttcaaaaatttgttcctttaatttggaaatgtctaaagtgagattatcttctgttccctgtagatggcatctgaccatgtcccagtgatgctcagactcattataaacttggggtgtaatacaaaaatctgagatattccagtcacactgtaactggaaacgatggtctaagttcataagcctgtctcccatccaaatgacagtttgtctaagatcattaatttggtttgccaatttttgatcaataccagattgtgaattccacaatcttgtagaatttttttgccaatcattaacaaagtttactgactgaacagaagagtgcaatgcaactcctgccatagcagccgtagctgtgactgcaattaatcccataatcactgtaattaaagtaaaaatgaatcttttggatctatttaaaatggcttttaatacttcagtcaaaatatggacggatggcaaggcctcccacggttggtccatggacatagaaatccacacggcttctcttgccctcaccagcagaatacactgttgccaattaaaagttgaataaatgcaagtaaacaatctgcaattttcacagcttatagtttgagagtctggtttaataactatatttcctacaactagcatataagggggctttacacaggtttggaaaggaactgttagactggaatttaggttgatagtataaaatagcttacgatctcgtttctaaagtttgatttctagaccaaattctaatgcagtatgaggccacagtaagcctccataattctggatgttcaggaccagaaacaggacttattatttttggtcttggggtagagattcctttttctccctattcccaagggtagaaagactgtaattttttagcttatgtttgtctaaactttctgttaagtcgctatcaacagctrgactcacttgtgcactgggacacgactgagtttgtcctgtgcaattgtggtagaattgacctcgaggtgcccaatctataatagttccgaattcactgttttgtaatatcaccgcactattggccacacattcttcccaaactaaaacttctgtattttttgatcctttgggaatttccttggggcaaggtttccctttaggtctaaattttaatgatctttgataagaaaagtcttgtaaataatttacccgtggcctgagtgacatcccgcttaccatgtgataagtgaatctactgatgggactgacagtaggtacttctaccaaccaattttggactgcaggcattaaacatcctggtgctctccctaggcagataggaggataatgatacccaatggaaatatttatcatcatcccttcttcctcaggtttggcagggcaatgatcatctgtggggccaggtacccatacactatcattaacatatacttcaataggattatccatccatgtgactggtgtttccatctccgcggtggcgcttttctttgcatctccgatgggttcatcgtagatcttcaaatgtctagtgggtatccaaacaggaagctgattttctcctggtgaaacacaagcaaaacctctcccccacgtcaccaccttccctatttcccatgtcttatttttattatctttccaccaaatcagttttccttcatgtgggctgttctttttaccagtaaaatgttgttctgcagaagtagtagtctgatttctataaatgtttaaaaaatttaaagtatagagtgctagattaagttgcatctgaggagtggtacattccttactgtctcccccttctttttgcttaactgagttttgagtgttctattagttctttcaactatggcctgtctgtgggaattatagggaattcctgttgtatgtgaaactttccactgatgtaagaatttttggaaagctttactacagtatcctggtccattgtcagttttgatctttttctggaactcccattacagcaaaacaagataataaatgttttttaacatgggaagtactgtctcgattatctggccctaaacaatgtaaaatcacagtactttgatacacttctgaggctgtgcctacgctgacaagccctgtaacagcctttagtttaggccaatttttggccactgatttaaagcaatgatagagacatctgctccagtgtctactaacccttcaaactgttttccttgaataatggccttacacgcaggtctgttctctgagacccgacttgcccaatatgcagcctttcctgttggatcagtgcttccaaaccctcctgttctttttatctcactatttccaaccttaatataaggcaggagtaataattgcgcaatcctgtctcctggactggcactccaaggaattgaagagctaataaccaattgaatttcgccattatagtctgaatcaaccacatcagtacgaatttgaactcccttcagacttagacttgatctacctaagattagtcctacagtcccctcaggcagtgggccatatacccctgtggagattttttgtgggggctcccctggaagcagagagactgcctttatagtacataaatccacagctgcactgccgcttgtggcgggggacaattgttgtactgtggtaactggctcattccctgaggcacttgggacagtgggggttgttgtccctgaaaaccctgaggaacaaagggctgaattgggaatgccccagtttgttgcggggcctgaggctggcccctttgctcattttcccgacaatggttgcccatttctatcaaatttagaatgacattgactagcccagtgttttccttgtttacatcttggacataagtcaggtggctcttttttatttgagactgggcaattcttttttagatgaccaatttgatcacaattataacatttccctccaaatgttctaacttgtcctcctaaagcaactcctgttattgtggaataaagtttagaaaatatccaaagcttatcagcctgtaaattctgggtagttcagttgtctaccatgctgttaattaaatgaaaacatcctgttatttcagggtccttccttgacaaagtactatacagctgaagaacatctcgaatayarttttggtgggaaaggagccaattgatttcaacagaatcagatctgagcttcataaagtctttgaagtgacttcacagagacgcagacatgtgcacttgaagatgctgccccttcccyggtacctagcaaagctcctgcctctttgtgtgcgtcactgtgaaaccccyacccttctgcctcgtgctaaacgcacacagtatctagtcaggggaaaagactgcatttaggagatagaaaatagtttggattacttaaaggaataaggtgttgcctggaatttctggtttgtaaggtggtcactgttcttttttaaaatatttgtaatatggaatgggctcagtaagaagagcttggaaaatgcagaaagttatgaaaaataagtcacttataattatgctacctactgataaccactcctaatattttgattcattttctgcctatcttctttcacatatgtgtttttttacatacgtacttttcccccttagtttgtttccttttattttatagagcagaaccctagtcttttaaacagtttagagtgaaatatatgctatatcagtttttactttctctagggagaaaaattaatttactagaaaggcatgaaatgatcatgggaagagtggttaagactactgaagagaaatatttggaaaataagatttcgatatcttctttttttttgagatggagtctggctctgtctcccaggctggagtgcagtggcgtaatctcggctcactgcaagctccgcctcccgggttgacaccattttcctgcctcagcctcctgagtagttgggaytaccagtagatgggactacaggcacctgccaacacgcccggctaatttttttgtatttttagtagagacggggtttcaccatgttagccaggatggtctggatctcctgacctcgtgatccaccygcctcggcctcccaaagtgctgcgattacaggcatgagccaccgcgcctggccgctttcgatattttctaaactttaattcaaaagcactttgtgctgtgttctatataaaaaacataataaaaattgaaatgaaagaataattgttattataaaagtactagcttacttttgtatggattcagaatatactaaattaactttttaaaacacaacttttaaaaaatgtatcaaaataataaacgtgttctgatatttttaaaataagtgaccttgtgttctttaaccagtccacatctttagagaacaaaaatgtgttatgatattatgggccatgctaatgacctctagaaaacatcagaatatttctggatatttaataatagctttatatatgactaatgctcatttctatgtaattctgtttaatagttgctttaaaggtgaattttgccacatttactttgacagcagtataaggagtgagatagacatgaacctgaatttcaatttaaaatcatggaagagagggaaaaaaaaccagcttaagaaaaatcaactgataaactgcaagaaaaaaatgcaacttacatcacaaaagctaattgctttattatttagagagtacttaaaaattaaagaccaaacttctctccacccaacaaaaatgggcaaaggacatacagctaggtcaccaagaaagaagggcaaataggtggtgagtacatgtaaagatacttgataggacttttgcttagttgaatctttagcaaatctcttttatttcttgggattttgaagaagtaatttttaaaggaggactagaaactaagtgattgggaattggcctttttagaattaaaatttcccattacaagaaaaaaaaatcctgtgttcttttttttttccagaatggagtaggtcagtgagcaatgtgattaataaatatttcaatgtctgtgacttttgatttattttggagacagggtcttgctctgttacccaggctggagtgcagtggtgctatctaggcttactgcaacctcacctgtcactttttaattgcaagaaagctgaaaggtttttttctattatatcagttataatgagaaatactgtatatactaactatgagtaaaatactatattgcctaacttgtattattaagcaattctgctaacctgtgaccttacattttcatctgaaaagcaggggctggacaccaattgccctatgaagctattgctagtcctaacattctttgttttgtttgcttttttggcacacttaagtgtgtactatgaagtttatgatgctttaatgaaattttctgtctctaccattgtaatgagaaaggaataaaatactttattttgcaaatctacttatggaatatagttctgtacctgattgttttcataatccctgtgttgatgtgtaatgccacagacatgctcttgatagtaacaggaaagaaaatcagacacagctaaacataaaggtcagttggctggcaggtgcttagcaggtgtaaatagaggcccattcatgctgctccacttgctcctgaaaagcataatgtaaatacagtatactaattaggaggcaaagaaccatctaacatggttcttttttttttttttttttttttttgagataaagtcttgctctgtcaccaggctggagtgcagtggcgcgatcttgactcactgcaacctccgcctcccaggttcaagcaattcccctgcctcagcctcctgagtagctgggactacaggtgtgcgccaccacgcccagctaattttttgtattttagtacagacggggtttcaccatgttggccaggatggtctagatctcctgacctcgtgatctgcccacctcggcctcccaaagtgctgggattacaggcatgagccaccgcgcccagccctaacatcaaattttaaaagagttggccacagtttaatgacatccctgcacaccagcctccacccatactgcccttcataagccccttaaaggagatcccatagttctaaaccgggtccacaaacacacatatcctcattctctccttttcttctctttggcagtttgacaaaatctttagggggaattggaggaaacattaatctcctaaatcaacttcattcaaagctttggcttcaagttctacccgttaaggcctcaggaagttcattgtcgacattgaactcagtcactaaaatgacctcaaggctaagggatagaccacagctccacttcacaagtaagcttgcaacacctgatttaggaaagtttgctgtgcagacagttgtagctcatccattttacagaccgatctcgatttgtttcctagggtctaaaattatttaaatcaaaatctctcagaaatttctggacatttaataaattcatgctggaggagaactggcagagatatgttaaatgcacttgaccacaagaaccatttatttcatccaatatttaccagctattcattgtacacttactacagattttggcactggagatattataagaaagctctaaccctgacttatggaacttatcccaaaaaataggaaacaaggctcagaaccattcaaatgaagcttcagttaactcaaataaaaattagttttataaatttaatgtgaaagtcttcgagtatattaagaatggcttgattaaccccagggatggaaattttactgattgaaagaaagtttcaataaaataccgatcttcgaatctaatctgacacctgaaactaggaaatcaaacactagccatattttttcttctattctttataataatttttctcatgagaaaaaggtatctttcttccaagcctgaaaataaatggagaatttttaatatctattgatgtggagaaaaataaatagactatctgctttcacaaataagtgctggcattgagccacagaacatgtctgtcatattgctctttcacaccatacattaacaggaataataatttctcctcattgagtttcctatttactatccccttaattatacctcctttaattactgtcatagagtgtctgaattttataatccaagatactaagatgtttatttgatataccaccagactcaatgtcttgtattctatgccaaaaatttgaaaatgtttgggaagaggaaattccgtggtttggtgaacccagaaagtcttcagtacatctcagttatagaactgtattaaatacatttaaactctataattccataagacccattttaggtttatacactaagcatccaattcctcactatcctctcatacaaaccctgtgtaatacaagttctactcccataattctatgaacaaaacaacaattgatacatagatttgatttttaaaatacattttctttaccttattctaagtgtaacatagggtcaacatagaaaaagaaaactgaaaagcacaaggaaagtgaaatatctataatcttaaccattgttaattttgttgtgttccaaattagtgtatgtatatatatatatatatatatatatagcatttttgttttaataaaaggactgccaaaatgcacatgccaatttggactctgctttttccacttacaatgatatcatagtttctcacatttggtattcttttgcaatacttgctgcatagaattccatcacacaaaggtaactgccagaaattccttattacttttgctagacacttagggtttacattttttacaaaaattataaatctttgatcacagctctgatgatttctctgggaactgagagcctaacacaagtcatttccactttaagacttttaacattctgaaaagttatgttacaaacagagtgctggtccccctgcaacatgctcactcacattggctgacattttaattctttgccaatctgaggggaagagatgtcaactttttttgtttgctcttttaatgccagtcatgttcccttttttttcccccttttaccagtcatactggcttactcagaaccctacaaatcaatcctgctcattcttaattttccaacattgttcctgagattgtttcaccagaaaagttctcccccttatccacttcgcctaacaatttctacccatcccaatcctcctgcatttattgcttccaggaatttggcacttaggacacccttgtccttacattgttcatgcatgtatatttcgtcttcaataaaacatttagttgctcaagggcaagggtcccatagagtctcaatatgctaacggcctggtgttgcttaataatttagattctgacgggtcctctccagggaggggagcaaagggcaaattatcttaggggctgggagtgcagaagccaaacctttgagactgtgaaaagaagacggcgccgagacgattcagtagcaggcattcaagcaagaaaaactcaaatattgttcccaataatgcctgactaatgccaaataccaagtaagggcccaggcagtcctgacagcctgcagtgccccaggataaaactaaccctgaggggtgctagcccacgataaccccctgccagggctctggacacgccctgtctcctcgaaggccaacgggctgcccctgcgcgccgaggccccgccccgcggcccgccgattggccccagccgccccggcgctaagactcaatttcacactacgcgcccaggccacgcccacctgtcatgcggccctggaaactgtgagtttggggattgttgtgtccactaaccggactcagaagggacttccctgctcggctggctttcggtttctctgctcacctccggataaatcacggggtctcccgcgccgctcatggcgcctcccgtccgtctcgagcgtccctttccttcccggcgctttcctgggttgcttctggcggccctggtgttgctgctgtcctccttctccggtaggaccccggggtggattcgcgcgtccgcggcgaggctagagctctgctcagtcagtcgggcaggaggcgcggggcgaagctcactgcacgtcgtgcctgcttgggatagagagcgaggccagggttctccgaggggtgccgtgctcagatcccgggggtatgtggcgggggatgcgggaaccacgcagaagcttgtttggtggcatcgtgtgcgcggccgacatttacgcaggatctggctgcgttcccaaaagaagcgtgaatcgtgttttcgggattgagcccagtcagcaaggggagggcttactgggcgccccaggtgagggcttgctctggagtgcacaggtgcgtgggattgttgctagagcccgtgctgtgcccgtggtgagagtttgccctgtgttcccttggtgccttggtgagtagggtgttcattagggcttggacagtacccgcggtaagggttgcagtgcgtctgctgtgccccatgggctgggctggcctgggctgggctgggcgagcaggggcctggccaggtgttgctgggagcgtgctgtgcgcaagtggcctgtgtgcggagttcactgtgggcaagacagctcactgtttgctttgagtggagcgagcgcggactctgcggctagggagggcatgttgagtgagagcaggctctcagtgcctggggttagagaggtggtaagggcgcaccatgcttttagtgccttctgtgaacagtgtccgtgttgcctgagatcgtattggtcttgaattttaagtggctgcttttttggggggtgggtgggccatcgagtcatcttcctgttcccaaccaatatagacagtatctgattccattgcctagtggctttttgacattgttttccttcttttcattagtttgagtcatatttgagagatgtgaagcaacctaaaaaacactggtagccaaacctagtgagaaattagtatcctaacaaaggaaggcagataatgttaatcttgttttcccctacagctcataaactgaagcttaaggcctatcccactgttttgtatttcattgaatggaatcaatatttttaaaaatgcatgctaggccaggcccagttgctcacacctgtgatcccagcactttgggaggcccaagttgggtgattgcttaagcccaggagttcaagatcagcctggacaacatgtcaaaaccccatgtctacaaaaaataaaaaaattagatgggcatggtggtgtatgcccgtggtcccaactactccagaggctgaggtgggaggatcgcttga

SEQ ID NO: 8748 - DNA, 43975 bp, Homo sapiens
tttcctactgcagagggaggaggcaagacttctacccgtagccagatggggaggcatgggcacaggaacggctcttgggtgaagtggagggaggaagaggaggactgaaggcgaaggccacgtcaggagtgatgggataccccacaaaggcctccctgagaagcgctagagacaaagatgagtgcctcctcatctggaagatgaaaagatgtctttgcctgcatgggctgccgtcacaaagtcccaggggctagggggcttcaacaacagaaatttctttctttacaactctggaagctggaagtctgagattaaggcaccagcaggatttgttccttccaaggcccctctccttggctcacaggtggctgccttctccctgtcttcacctggtcttccctctgtgcatgtctctatcctgatctcctctttttaatttttgtgtaaggacgtagtcatattgggttggggcccactctagtgacctcattctaactcagtcccctctttaaaagccctatctccagatatagtcacattctggggtattgaaggtaaggacttcagtatatgcattttgggggcacaattcagccagaacaggaggacggtggggatgtccacatgaagaggttcaggcagaattcctttaggaggggaagatgtctctctgtgggacaagggtggcatggagcagcccctgggggaaggagaaggggacagtttgcatactggtattctgcctaccccagggtggacactcactcagcgtttgctgaatgaacagggcaaggccagcagtgctgatggtcccaggcatgtagctggtctgagttcatagaaggaccacagcgccctgccatgtgccaaaccaggacaccagagtgaaggccagaagctcacatggaagcagcttagttccctggtaacctcgagatgctgatgagacagagcagagcagagggaaccctctccctccatatcccatcctccaaaatgtgtcccttgatgtggatgggtagacaggattcctgccctggcagccagacccctgccttgggtctgcacctcctctccctccttcctctccccgtcatccctaaatcttgtcctcgagccactgccaccctgtgtaaaccctcatgcccagtcttgcgggtgccatcccttctctttgaagctgaatggaccaaacatacccattgagtgttgggtggggacatctctggaaagtcagcacctggaccagctccacccctctctgaggacaccttctttccctttcagaacaaagaacagccaccatgcagctcttcctcctcttgtgcctggtgcttctcagccctcagggggcctcccttcaccgccaccacccccgggagatgaagaagagagtcgaggacctccatgtaggtgccacggtggcccccagcagcagaagggactttacctttgacctctacagggccttggcttccgctgcccccagccagagcatcttcttctcccctgtgagcatctccatgagcctggccatgctctccctgggggctgggtccagcacaaagatgcagatcctggagggcctgggcctcaacctccagaaaagctcagagaaggagctgcacagaggctttcagcagctccttcaggaactcaaccagcccagagatggcttccagctgagcctcggcaatgcccttttcaccgacctggtggtagacctgcaggacaccttcgtaagtgccatgaagacgctgtacctggcagacactttccctaccaactttagggactctgcaggggccatgaagcagatcaatgattatgtggcaaagcaaacgaagggcaagattgtggacttgcttaagaacctcgatagcaatgcggtcgtgatcatggtgaattacatcttctttaaaggtaaggcccttgggcccaaacctgcactttctttggcttttctgctgcttttatctaaagaatacccaattccctcacatacataaaagacggggagtacgttaagttcttttgggtgcctgttgagaaaaattaagtaaacaagcagccagagaaggtaagatgaatgccttcttgctgtggatgggattagtgaggctgagatgctgtttcctccacggaggaagagctggttgctgtcttcgggcccctggggacatctgaagccccagctttctacaggctctgaagtatgaacccattgtggccaccatggcaaagacaccaacaccttagccactcagggcaggacacagaccccagaagggcttaaagggcatttcccagtcccccgtatccctcagatcttggcccctctgccctcatagaggccaagactccctcagacaaatgcttgttcctctgaaatgcctcctcctgactcctcagcaagagctgacctctgcttatctccccgacactccttgtaagcattcctgctcgcctctgcagctcctgccagttgctgaccctggggaaagcaagagtggatagagaggagaagagaggagaggagagggtgggaagggttgcgaaggaaggtaaattgttaacacctccccttcctatggtcacagatcatgagtatctttggccatttgggtggctataacaaaataccataaactgggtggcttagcaacaacaaacatatatttctcatagttctggaggctgagaagtccaggatcaaggcactggcagatgcagtgcccattccttggttcatagagagtgccttcttagtatatccttgctggaaggaggaaggcagctctctgtggtctcttttgtaaggacaccgatcctgttcatgacagctccacccccatgacctaatcaactcccaaaggccccctgtcctaataccaccaccttgggggttaggtttcaacatatgaacaatgtggggacacaaacattgagaccacagcagtgagtgtcgaacttggactctgagatttcctatcccctggtgcagggcagtccccattacaccagattgctgagggcagctgggaaataagctaaggacggtattgactggggtcttccttcgataacgattaagaagttggaaacaggccaggcatggtggctcacgcctataatcccaacattttaggaggccgagatgggcagatcacctgaggtcaggagttcgagatcagcctggccaacatagtgaaaccccgtctctactaaaaaatacagaaattagccaggcatggtggtgggcgcctgtaattccagctacttgggaggctgaggcaggagaatcacttgaacctgggaggtgggggctgtagtgagccaaaattgcgccactgcactccagcatgggtcacagagcgagactccatctcaaaaagaagaaaaaaagaaaaaaaagaaaaaaagaaataaaataaaataaaaagaagttggaaacaatcacttgtagcgttttgttcagaagttcccataggaaggtcagagaagggtcattgaagacttcccaatgggaaaaaccattcatttccaggatccatactaacttctttctaaaatttaaatcaaaatattggaatgaaagtgcaaacagagaagttcacccagatatcaggtagcattcacagccagccacatttttcaccctcttcacttggagatttggtcttgagtaaaacgttagagaatcagagaacatcaggggtccagggcctctgaagatgtgaaaaccaacctccttgttttgcaaatgtggaaggaaaagtcccacgaaaagtccaagaatgtgcccaatgttataaagagacttgccttcatattcaagaggttcaacagtcactgctctggggctgccataaagatggtctccgctggctatctttactgtcttcactccttttatttgcagctgagaatttctaattctgacacaaaattctttttcatttttcccttttttcatctttagctaagtgggagacaagcttcaaccacaaaggcacccaagagcaagacttctacgtgacctcggagactgtggtgcgggtacccatgatgagccgcgaggatcagtatcactacctcctggaccggaacctctcctgcagggtggtgggggtcccctaccaaggcaatgccacggctttgttcattctccccagtgagggaaagatgcagcaggtggagaatggactgagtgagaaaacgctgaggaagtggcttaagatgttcaaaaagaggtactttcagactaccccagggccagcctaaacccacacagccccagggagacacacacgccctaccagggccacacagcactggtgggaaggactcacccagccaaggagctgcctccaggcccagaggcatcctgtgacatccaagtcctgggggcctagcccagttggagggacaagagctggaaactgggttccttagggtggtgccagagtgggcagagacctctgggcagcccacgtccaagtccagagcaaggggaggctcatcctagaaaagaggccagaggagccataaccaccattgttccttgggttaaggagtccttttttaaaaccatcaaaactaagaatccagtgcattatgaatccaaggggtgaggctcagtgtgccaatgccccagaacagtctaagaaagctccttttccctttccaggcagctcgagctttaccttcccaaattctccattgagggctcctatcagctggagaaagtcctccccagtctggggatcagtaacgtcttcacctcccatgctgatctgtccggcatcagcaaccactcaaatatccaggtgtctgaggtgggttcagaagctcctatgcatctgcttcccaagatctattctgttctattctttctattctactctaccccatttcattccattccattccactcaactccactccactccactccactccagttcactctattcaattccactccactccactccagttcactttattcaattccactccactccactccagttcactctattcagttccactccactccactccactccagttcactctattccattccactccattccactcctccactcctctcatccactccactctactcctccactccacatctccactccactcctccactccactcctccactccactcatccactccactcctccactccactcctccactccactcctccactccactccactcatccactccactcttccattccactccattccactcctccactccactcttccactccactccattccactcctccactccactccactctattctattctattccattccattctactctattctattccattccattgcagtcaactccactccactctctactattctattccactcctctcccctccactccattccattgcagtccactccactgcactccactcctttattctgttctgttctattctattctattctattctattctattctattctattctattctattctattctattctctccctctccctctcttttcccacaagtagtgaaagtttcactttgtgtcttatccttcatgtaatgggaagccatatccaccactgttccttgagttaaggagtcctgttttaaacaatcaaaactaagaaggcacttcctagctatgtgatctccaaaaaatacttgactctctgagcttcctttctctcttctataaaattgaagaattacaccttgctcaaagatgccatgagaattcaatgacagacacatgcgaagtcaccccccagcacagtgcctggggcagagtagctgctccattgttccatttcctacttgctccatggctcagttgaacagatacttagaggttgatgcccataggcagaagctttgccatttgctatgatgacttcacctgcccctggtggcctggtgatgcctggtgtctcccctgcagatggtgcacaaagctgtggtggaggtggacgagtcgggaaccagagcagcggcagccacggggacaatmttcactttcaggtcrgcccgcctgaactctcagaggctagtgttcaacaggccctttctgatgttcattgtggataacaacatcctcttccttggcaaagtgaaccgcccctgaggtggggcttctcctgaaatctacaggcctcagggtgrgagatgaagggggctawgctatggcccwtctgtatgctggtagctagtgatttacacaggtttagttgactaatgaggyattacaaataatattactctatgatgattgcttccacccacacractgcaacatacaggtgccttggggaaatgtggagaacattcaatcttgccgtcactattcatcartgaagattarcactgagatccagagaggctggatgacttgctcaagttcaccagcatggtagtggcaaagagaggtccagagtcctggcccttgatgcccagctcagtgccacaaagctcartaggagggatgttccagtggatgagggccaccaggaagcacaggtccaaggctggtcccacacttatcagcagcaacaactstcagttcatcctgcatgggaaaaatgttggaatgggagtctgaaatggggctactgtttcagtcctaaygtgctgtgtgacattgggacaacactttccctctctggacctcagtttccctctgtatacaaggatcagattcttgctgtgacccaagaactcctgaaatcatatagaaargctggggtgggccctgtcattcrtggttgatttcaatacactcaagtgccattcatcctttaagaaaaacatctggatatcaaggtggaaatggcccatttaatgattgattatatcattttgtggatatagttataatctgatgggcctggctgggagtggaagaagggaagccttttgcaaatagtagagtrtcagttgcaggtgccaatgrctaactttttgaattctatgttggcattaacaataaagcattttgcaaacactggttataactgtctttatggaggcagctctgggaatggtgacattgatagcttaccatgctccaggccgggtgcctggcccttcacctggatggtcgcatttgcccctcataagactcccatgaagaaaggcaccactrttatcccatctgttattcacagatgggaaaggcaaggcttgaagtggttaggtggcttacccagtcacatatcttctaagtggtgcagccagaatttggcggggggagtgcgaccaagaaccctacactcagtcctgtgctctgtgctrtggaggagagatgaccaggagcagaaacttcattcagggrcatctcaggcaccagctcccccatgagccagctaagttccctccctcccttcaccaagcaccatgtgtttcctcatgtgccraatgaagaggattagatactcaagaatggaatgagtgggtgagtgagtccttcgctgcacccaagtctgattttctgtgcgcctgctcaccccaccctgcatgttctaagcatgcttccataaggctgtgccccaccctctgattctagagtctggactgtatcagaggtgagtgcctactagaggtaacaaggtcaggaccccaaaccttgtccatcccccraagtactgagcccccaccatgcaccagcccatgccagatgctttgcacttgtgatatcacccatcccttgacaacccagcaagttctattattgttcccattttacaggcaataacataagtgctttcccagggtcccacgctggtgacagtgagggcccagggtctgagagcccagatcgcacatgtgcgggctggtggcaggggagatggcagcaaccagactcagacatttctctgcagttgtgctgtgggctcagggtggctctttaygaaggggccccttcrtggggtcatgcactcctgtgtgytttcccttgcatcatgccttgcctgtcttggcaaatatttctctggagtttacccagccagtccaaggtcacagggaagccctgtctgtgtctcacacagaaggtyaacgtccagcactgtccaaactttactcagcaaacagtcacaaagcagctcctgtgtggggggtcaggggtgggctcactgtggtctctgctgcatgtcacacattgaagcactgtgctgggrgtcatcrcaggctgtttaactcaattgtcacatgagcctgggtrcacaaaatggtagagcagctcagagagagatggacagacagcatgaacctctgaggagtcaggttttcttggatgaagggacactaagatggctttggagcgtgagaaggacytcacctagcaaatgtgggaaaggagtgagacctccaggcagagggactggctggagacgagcgtgatgtggtgagccatggagtgtatgggtccccacagaacttcagtctgggcctgcacagggcatgtggaggagacaaggaggagggaggtggccgtgccggcggttcagtgacagagatcctaaatgggaggccaatcctaaatgggatgatctctttcatccyaatttcagggtagtttggtcatccrcgccacattccaagtgtcccctgggccctttctctccctcacccycctgtctgcacatgagtagatgcctccaygcagccctcccaggacgctcacctctatccacagatgcttctccaaaacccaccaggccctcccatggaacgagctcacctacagggtaaaatcaggtcacggtcacatatagcctgactactcccctcaggaccctcattcacagccactgtattaatttgctggggctgccaaaacaaagtgtcctcatctgggaggctgcagtagatttgctgaaattgatttgctagcgttgctgaaattgattcaagcttgattctggagcttgaatcgaagatcaaggcaagtgcagggctggtttccctgaggcctctccccttggtttgcaggtggctctcctctccctatgtcttcacatggtcctcctctgcatgtgcctgagttctaacttcctctcctctcctcatctmcaccagtcttatagaattagggccccccartgacctcattctaacttaataacctctttaaagkctctatctccaaatacagtcacattttgaaatattgagggttaggacttcagtgtatgaattttgggaggaygcaactcagccaggctcactcttatcattacagctgcactagtgccatgcctggttcccagtggacaccccaggaacagccatccatccagagtgatattctgtgacatcccctacactccacagctcatcacatcacactcgtctccagtcggtctgtctgcctggaagtcccacacctgttcccacatccactgtctgggaggtccttttcatgcttcaaagccagctcagtgtcctcctttgtacaaaaaaatgtcctgacctctcagaacttcattctttctctctttctgtcgatctttgtctgaactcctctatcattttgtgcacccaggaacgtgtgacaattgagttgaacaggctgcaaaaacgaaaaagaagaaagaaatgctgagttaaacaggctgcaatgacccccagcacggtgcttcaatgcatgaaacgcatcaatgacttgcagcagaggccacactcagcccccctctgccctttgagtttttgcagctcttgccaagatcattcttkttcttagaaagcccaccattattttcctytctagccatatggattctaaaagttcctcttgtgagctgtaatcagaatgcagagaagtaatacaaggttagggcccaggactcyttctcccacctctccctgcagagactcagatttttttaaaaaatgaccttggtcttcrggggaagaacttcccaccacagtgaacagccatgcccagcctacacttgactgtgcggcttacttagctcatccatccaaaggctattcctgggttgcctagtggaaatccaggcatggagctagtgcaagcacaatgataagagtgagcctggcagacactgaccccagcaataatcaggtaaacaaataaacagaactacaaactatgatgacaasaattcatccatccacagatattcactgaatggccactgtgtgcctggcactgttccaagtgctgaagaaaaatgaagaaaacaaaaatccctgcccttatagaggagacattataatgtgacaagataacataatgaaaaagaatgaagaataaaatagaaaagtaaaatggattgcatgtcacttgatgacaagtactgtggaatgaggcygtcatctaaayggagcacagaaagtggaacatggcgacatctcagccaaaagacccggcagacaccatcttggccaagggatcgaggttggcatcgccagctgtgagcagtgctgacatcttattatcttcgatatggcgtcatgagcaggctgcctcctcttggtgggatcttcccccaaacccagaacctcagtctaatcacaagaaaatgacagccaatcccaagttcagggacatttggcaaaatagcccaccactcctacttaaaagtgtcgaggtcttgaaaggcaagraaaccctgggaaatcgtctttggccrgaggaaactmagcagacatgacgactaaatgcaatgtagaatcctcggacagaaaaggacattagtrggacagctggtgaaacccaagtaagtccaggctgtaccaatgtccacttcccagttctgaggaacatgctgtggtctgtccacatttacattaggagaagcagggagagcgtatatgggacytctctgtattgtttttataacttttctgtaaatccaaaactgtcttaaaatagtttttttaaattatactttaagttmtggggtacaggtgcagaatatgcaggtttgttacataggtatacatgtaccatggtggtttgctgcaccccctttttttaagaaaatgtttcaaaaagaaaaacagccaagtaggggagggcacacgagtggggttgggaattgcaaaggcagaagcaggagaccagttaaggaagaaaacggggcactaagagagacaatcaggaggacctgctgcagccagggccctgaggggctccctgaggtggtgccattgaagcggagttctgagggacaatcaggtgtagacactgtgagtctcagaagtgggaaaaggggagtgctgtgcacaaaattgagagacggtgcctgtggcagcagctgaggagggaaagagaaggtggggtgggaggcccatcccttccttggccacaaggacactgagtagggtgctgagatgggagtaacagtaataataacaggcagcacttggaggctgcgtcccgtgtgtctggcactcgcctaagccctttgtgcacattggctgagttaatgcagaggtgaactgagaggcacctggggtaggggctgggggacaggaagcaggtgacatctccagtcctctccagcgtccttagagcaggtctacagtactgatccttctctgccacccttctccaagaccaccttggtgggagtaaggggctctaaggtgacaacacacacaggagccacagacacaagacacaagacacttttgactcccaggagaacctagtatgggcatccacacacccttcctgatggtgactttttatgtagacatgcagagtgcagttaaccagctgttcctgcacacatctggattgctactcacacatctgtgcacacacacacacagcctcctggagcactgtggcttctgggtggctaacacagctaccacctctggttgtgctgagctgagcacccattgcctgctggggtggggagagggcaggcactttccctgcgcgaccccgtttaaccctctctgccccactgatgtggtccctgttgtccccgatgcacagaggaagaacctgtgtcaggacccccagagcggtgtctccactaagcagaagtctctgtttctctcctggcctctcccagaggggctgctctgaagcatgtggatttgatcaggataatcaaggtaaatgatccttatcttgatccatcacaaatgttaaggtacaaggctgtggagatggagagtgggtggagtctctgctgcccggtatcctaagctgggtgatcgcaagcagacacacacatgaccacctcttgggccatgcagggggaatgaatgtaatgaggccgatgttacagggttattgaaggctcaggggagaccaggccaaaaaaaaaaaaaaaaaaaaagctatgacctgagacctccctatagcagtgtttctcaaactctgattaacgttacttgaggagcttgttaaaaatacatactcctggccctgatcagataaatcagaatatttgacacagagtctttaagctccccctcgggattcaaatgcacacagatttttggtgctttgccgcctacagtacaagagagggcaggactgtcctgttcagtgcactgtgaccyggacgctcaggcccacggaactcccctactccccctgctccctgcggtgccacccacctagctttcrtgcctgagggtggtcctcagactcctcctagaacaggcccagaggctcttagctatgtaagtattcattcctccaatcactgcagagcactcaccaggtaacaagcacgcacacccaggcgagttccccatgctcgtccccacgttgatatctcagactctacaagtcttcagctgctgcctaggactctgtaagtccttgagcttgggacccctaccacacacaagcgctgggcgtgccccacaggcggggaagtgctggccatatacacccagtgaagtgggaattccagataatgagtaactttttagcaaagtacccatgccctttgaattgtgaggtgtttttgtttgctaaatctgacaattctacctgtagggaacagggatgattgagaagcagctgctccgatggccagaagccaacagccttccctgcagagatgcgggaagtcccagggacagcaggaaagtccaggcactgcactggcagtgggattggggcttgggtcagaagagggtcagggccacaaggaaggaccctgggaggcttcctgctacataatatgagggccgggagcataacaaaggattgccttatccatgattgcatcatcaaactgaagcctgagacagaacattctgtgaggtggccttgttcactgcagaggagctgactcacacagttttgtctgggaagttgcaacctgtgccaggagtagccagcctgggagtaacaaagaggcttttctactgcaggttttcctagagctcctctccctccctcccctggccaaaggtgagctctgcagggagggtccggctctaggggactttgctcctgggcatcctagctgcagagattggtggggcttgtccagaaaggggggtcttctggacctggggatgatgcagttgggcctcagggtactgggaggccagtaggggtgcttcaaactggccagtaacctgaaggactcatattcttaaggatatcctggtggccacgtagaaaacagtcaggtggggtgagggtggaagtaaggaccagctcagaggtcactgagggtgcagccagacaggctgggacccacgtgggcagcagaggtggagagtagggatgtggagggggagacccagccccacgctgggggccctgaggggaggtggaggctgagccaggagaagaggcaccacccactcacttcctgcttgctgaatgactgtgaggagcaggagaaggagcaaaagagcaagtgaggaagtcaagggggttatttgggggcaatgctccatgtgagggtagctaaggacaggtgccaaggaggcccctgtgtcaaaatcccaggtcaaaatgttagttaccagagacctctgataaagacagagccacaggtaaaacgcagcggcacaacccctcgaccctaaaatcagaagcctatctgtgtcctggcaaggagagaagcacgagtgatcatccacaccgccaggacgcaagcccgttatttctgatgcaaaacccaggctccctccagggctggcacagaggactgccagaggagtcagggggcctccaccttccccagctgcgcaacctcagagggtgtctccttatctctggggtcactgtgtcttcatggccaggctgggcacaggtcagctgggagtggagctgtgtttgcagggaaggaacgagggtggacgtcgaagccaacctgcctggttcagaatcctggctcagcttggcacttaccagcagtggtggtgaggccttgggaatgagctccgcctccctgtacttccgtttcctcatatctaaaattgagggagtaatgggacccgcctcagtgggtgttcatgtggattccatgtgctcttaagcataaagaacagagcagctatgatgaccatcatctatgtcactgggcctccggaagtgagggaaggagaggcagatttgcttaagtagaaggaaggcggaggaaggtagtaaggcgtcagccatgtggcacagattgtattatgagatttactggttttcttacttcgtcctcaaatttccctccttacccacttcccatgattcctgagagtcaagaggacgggagctgtggaatgtgttagtcatctactgctgcagagtaaatagcccatgattatctcacggagttcctgagggtcaggaatccaggattgctgttggccagggcaatcccagaaggctcacttgtggggctgttggtagaaggtctcagttcctccctatgtgggctactcacagggctgctcaaatgtgacttrgagagagagagagagagagagagagagagagagagaggcttgtttgtttagtgtccaggaccgagagaggatatagagagaaagcacaaaagagagagagaaaaaaagagaaaggcagagagagagatagagacagagacacagacagttgttgaatgtccaggaccaagagagagacaaaagacagaaagcacaaaatagaggggaaaagagaaagacagagagagtaagggacagagagagggggacacagagagagaacccatggcagaagcagcagtcttttttttttgagacagagtctcactctgtcgcccaggctggagtgcagtggcgtgatctcggctcactgcaagctctgcctcccaggttcacaccattctcctgcctcagcctcccaagtagctgggactacaggcgcccgccaacacgcccagctaattttttgtatttttagtagagacggggtttcactgtgttagccaggatggtctcgatctcctgacctcgtgatctgcccgcctcggcctcccaaagtgctgagattacaggtctgagccaccacgcctggccagaagcatcagtctttttataacccaatctcggaaatgacaccccaccccttctgccttagaaagaagtcactaagtccagtccaatgtgagagaaagtaattaagctctatctcttcaaggaagtggtatcagacatttgtggacacatttgtaaaatgaccagagcgttagaacctcagaatccagcagactaattgccctcatagtagattattaatgttttaaaaaatggatggactagctgaaggaataaatgaacgagtgagtgagcaggatatttctgtctcatttcacatgcagaaaaggcactgaggctcagaggaattaggacatgtgtgaggttctctaggcagtaaggggtgggggctggcctggtttgccagaactcggagatgcagcatgcagcgtgcagcagttctgaaatggaagccagggatggcaagctacagcagccactccctcccggagggagaacggacccaacaccaaggaggaagggatgactcagcagccctcaaaacagagtcaggagttctccctgcttttgccaaaccctctgcaggcacctcttatccatacagggacgcagccaaaggcctagctgtgctgaaggaaatttgcaaatcctgcctcaaatctgcagccagtatctcccccagcagcctccaaaccaggccagcacgaacccagccagagagcagcataggtgttgggcaaaaacaggctattgactccatccttttctaacagagaccagagtcctctggccttccacagagaaggtggggccttctcagggttctctggatctgctggtgtcagtcagtatctatttcttcttcctaagaattcttttttttttttttgagatggagtttttgctctgttgcccaggctggaatgcaatggcacaatctcagctcactgaaacctctgcctgccgggttcaagggattctcctgcctcaacctcccgagtaactgggattacaggcacccaccaccacacagggctaatttttgtatttttagtagagacaaggtttcaccatgttggccaggctggtctcaaactcttgatctcaggtgatccacctgcctcagcctcccaaagtgctagaattacaggcatgagccactgagcccagcctcctaagaattcttaaaggagctacggttgacaaaagagtttcagagaggtaaagttatggccctaaagtcacccagcaagtagatgtggcaaagccatgttgcaaaagaagccctggtgggtgacactctttggatggcccctgcctctccggaaggcaccagcgttggtttctctcygcctcaccttcccatgcaggtgggymcgtttgtgcttgggctcctgctggttatgccccagaagcacactcttccctatctgcagtcccagcccatgtgtggacacaacccatttcctagggtgttccttagcccactgcaccaagtcagcatttaggaatcaagagtggcaccacaaaggcaatagctgtgaagaccacaagcagcatcacagtgatcaagcttgcagaattccattgtctgatggactctgtgtgtaccaaggtgactgcaatccagggacagtgagagtcactaggccttggactaagcatctgcttgtcccaggtcccaggctgaacatttgatgtgaatctttagtctcttcacttttgagacaggcactacagccacactcacacaggtcccaaaggccagtgccacccactacctctgccatctccactcctgcattccaccagattccctgacctttagaaatagtctcctggaggccaggcctgctggctcaagcctgtaattccagctctttgagaggctgaggtgggcggattacctgaggtcaaaagtttgagatcagcctggccaatatggtgaaaccccgtctctaccaaaaatacaaaaattagccaggtgtggtggcagtcacctgtaatcccagctactcaggaggctgaggcaggagaattgcttgaacccaggaagtagagatagtagagattggagtgaactgagatcatgccattgcactccagcctgggcaacagagtgagactccatctcaaaaagaaaaaaaaaagaaaagaaatagtcccctggagcccctggccctgacctcccaaaagccagagtgaactttcaatctcaccgtaggctgaccccctgtgtccattttaagycagaggactatacccatccacagtcaaagaagagggtggtgaccratgtggacaaagctcccattcagctgagaccccaatcagtaaagaaaatctttccctacacagatctacagacaaccaaagccttaaaaaggcatcaaccctaaagcctgtgaaaatgtgattttctctcctgtgttcaagaatggaaatgccttccttcatttttaaagaaggagcaggggatggtggtgagagtctggatttggcattggattggtctttcctaaactccaacagctcctgcatttaacagctaggggtatgtgggcaaatcacatgattagacataggaagctttttcctccttcctactccccttcctggaggttgacacagaccaaagcttggtaagaaaacttaggataaaagaaggggcagaggycgggcaaggtggctcatgcctgtagtcycagcactttgagtggccaaggtgcgtggatcaattgagcccaggtgattgagaccagcctgggcaacatggtgaaaccatgtctctgcaaaaaattacaaaaattagctgggcatggtggtgtgcacctgtaatcccaactactcgggaggctgarsggggaggatcacttgagcccaggatgttgaagctgcacatgaggtgagattgcaccactgcactccagcttgggctacagagtgagtccctatctcaaaaaaaaaaagagggcagagatttttttcaacatcatcagagatgggagctatacaagatatacaaagagaggagacagtcagccatggcaatgtcaaaatactcgttagccagcacatgttctgcctagggaattttctgcacctactgggaggtatggggaaaggacacagggtttagcaggatcaagaggttgtgggggatgcagagtacaggacagcaatccccagatggccttggccttggctctccttcctccaactcttagctctcaggataactgtagaatatgctaagaatgcagtgccctgagacaaggagaaaatatcaggaacaatctgagctttgtcttcattcctcctaaaacttgtttcagccatccaagtgacttctgagatataaaacccagggaggggtgtttttgaggccccttagctgtggtgcaaagtgaggcacatgcaaacaagaccccatctgccggggcagctttcctgagccttgggggactggttcaccatggatcctaggcgtctgttgattcttgctgcctatatctgtaatgaagttggtttgcgtggcttgcatagtattctgtcacatcaaactcatactctagcaactgggtttgtgtaaaacctcctcccacatccaggaaattaagcagaaattagcaagatgcttagagtcctctctgaggagcgaggcaggtgcacagtgttggggacatgttgggagtcctccccccagattgataaccattgcatgggactctgcttcccagagagaagaaagagaagatttcaatcaggaaggggctccctgcaatttcaagtagggcaggatggagttgagaggtgggatggaagcaatgaaattaacttgcatttcaaacctctgggggcaacgcataggcttgaagctataatgtgagcctgagctaaaacagtaagggtgtttattcagtattctggactccatatgtatctgatcacttcacagctgcttaaggagattgtccaggggtcggctaactagacccactggccaaacccaggcccaaaacagacagcttttaaatatttcacaagctaagcttcatacatttttaaaagattatgaggaagaaggaagaaaaggagaaagacaaagaggagtcrggggagaagaggagacagagatcatatgcgaccatcaaagtctaaagcacttactatttggcccattacagaaaaaagtttgcagatccctggaatgtagtccctgctcccttccattaaggccactgccccaaaactgcagagacagtgtcaccctgagagtgggagcattatttgttttgctcgttgctggatgcccagtgcctaggatcatgcctggcacataaaatcactctgtaaatatttgtggaataaaggaaaaaataaatgaatgaacaatgtatagaaaagcacttggtaacctataaagtccaagtataggacaaataaaaatacatactttatttatttattttaatttttttttgagatggactcttgctctgttgcccagcctggagtacagtggtacgatctcagcccactgccacctctgcctctcgggttcaagagattctcctgcctcagcctcctgagtagctgggactacaggcatgtgccatcatgcctggctaatttttttgtatttttattagagatggggttttgccatgttggctgggctggtcttgaagccctgacctcaggtgatccrcctgccttggcctcccaaagtgctgggattacaggcatgagccactgcccccrgcctacatactattttaaatccactgcacctgttcttattctggagtggatgctgaattctgcccttggacaaggccctcagtgtgttctgggagagcctggcttgaagccacattatgaagaggcagggcagatcccaacccaggaagctggagacagaggaaatctaaaggcaggaacctcctacagaggttgctcttctgcttagcctaagaagcagagcttctcaggctttctggtgcacacagatcaccttggggttattattagtatccaaattctaaattagcatgcctgggctgggccccaagaattagcatttctaacaagctcttctgtgttgctgcagctactggtccctgaatcacatgtgctgtacagcaaggatgtcaaagctctcttcctcaaaggcaggagcatctcctcagaccctagtatcctcctcatttcctctttgcttcctttkgtcgggttccaaaaaacagtagaagtgccctggattctgatgagagaacattctcaagggattgctgactcgggaggcaaacaggctccagcgatcctgcagcccacgggctggtggggagatgacccacagggggctgttccaaaaaggaagagcagtgggcctggaagagtatgatttggccttagtgttgcttcacttttctgtcttaattgccctgtggtttcatctggtcatgggagtccacgatgacatgtgccatcyttgtatgaatggtgcttgcagaaccgaaggaagggcctgtaccaatgcctggggaaaagcagaccaatgaagacttgtaagagcccagaaaagaggctgggagaaggtcaggaatggggtaaacgtggccttggggcatcygcctggagctccaggtgaccagtggcacccagaacaattcttgaccctctgcaggtcctccaaagcatcctcagtaggacctgcagaaggtcaaaaattttctgctttcacgttggatggaggtcaagactaagtcagctcaactgtaaagaaaatgatgcttttccctttgaaaactggtacaagacaaggatgtcctctctcaccactcctattcaacatagtatgggaagttctggccagggcaatcaggcaagagaaagaaataaagggtattcaattaggaaaaaaggaagtcaagtctctatttgcagatgacatgattgtatatttagaaatccccattgtctcagcccaaaatctccttaagccaataagcaacttcatcaaaatcttaggatacaaaatcaatgtgcaaaaatcacacgcattcctatacaacaataacagacaaacagagagccaaatcatgagtgagctcccattcacaattgctacaaagagaataaaatacctaggaatccaacttacaagggatgtgaaggacctcttcaaggagaactacaaaccactactcaacgaaataaaagaggacacaaacaaatggaagaacattccatgctcatggataataagaatcaatatcatgaaaatggccatactgcccaaagtaatttatagatgcaatgctatctccatcaagctaccactgactttcttcacagaattggaaaaaactactttaaatttcatatggaaccaaaaaagagcctgcatagccaagacaatcctaagccaaaagaaccaagctggaggtataacactacctgacttcaaactatattacaaggcttcagtaaccaaaacagtatggtactggtaccaaaacagatatatagaacaatggaacagaacagaggcctcagaaataacaccacacatctacaaccatctgatctttgacaaacctgacaaaaacaagaaatgggaaaaggattccctatttaataaatggtgctgggaaaactggctagccatatgtagaaagctgaagctggatcccttccttacaccttatacaaaaattaactcaagatggattaaagacttaaatgtaagacctaaaaccataaaaaccctagaagaaaacttaggcaataccattcaggacataggcataggcaaagacttcatgactaaaacaccaaaagcaatggcaacaaaagccaaaattgacaaatgggatctaattaaactaaagagcttctgcacagcaaaagaaactatcatcagagtgaacaggtaacctacagaatgggagaaaatttttgcaatctatccatctgacaaagggctaatatccagaatctacaaggaacttaagcaaatttacaagaaaaaaacaaacaatcccatcaaaaagtgggcgaaggagatgaacagacacttctcaaatgaagacatttatgaagccaacagacatatgaaaaaatgctcatcatcactggtccttagagaaatgcaaatcaaaaccacaatgagataccatctcataccagttagaatggggatcattaaaaagtcaggaaacaacagatgctggagagtatgcagagaaatagaaatgcttttacactgttggtgggtctgtaaattagttcaacctttgtggaagacagtgtggcaattcctcaaggatgtagaactagaaatacaatttgacccagcaatcccattactggatatatacccaaaggattatacatcatgctactataaagacacatgcacacatatgtttattgtggcaccattcacaatagcaaagacttggaaccaacccaaatgtccaccaataatagactggataaagaaaatatggcacatatamaccatggaatactatgcagccataaaaaaggatgagttcrtgtccttttcagggacatggatgaagctggaaaccatcattctcagcaaactaatacaggaacaggaaaccaaacaccacatgttctcactcataagtgggagctgaacaacgaaaacatatggacacagggaggggactatcacacattggggcctgttggggggttgggkgctggcagagggatagcattaggagaaatacctaatgtaaatgacaagttgatgggtgcagcaaaccaatatggcacatgtatacctatgtaaaaaacctgcacgttgtgcacatgtaccccacaacttaaagtataatttaagaaaagaaagaaagaaggaaaatgatgctctgaggccggagaacttgagaacactcagataatgctctgaggcaagatgactagtcatccccaatgtccactctctttgtctctctcatggtaatggaactctgaatttttagctgggaggtggctacctagaatcttgactgcactgcacagcctcctttgtagctaggtatggccatgggacaaaactccaggcaacacaacacaagtgggaatgacaggcaatgttcaaggcattcctttcaaaagaaagggtgtgcccttcccttcccctgtggccctttctatggactggaaggtggacatagcagtgagccatcttagcctagacaaacagacgtggaggggcagctgagcaaccasacaggaggacgtggtttctgacaacgtggaggcaccatatcaacccactgcctccagctggacctgcaggagagggaaatgaacttcagtctcattttagcaactatttctttaggattctgtgtaacttaaacatatgtattggccaggtacagtggctcacacctgtaattccagcactttgggaggctgaggtgggaggatcccttgaggccaggatttcaagactagcctggacaacacaatgaaaccctgcctctacaaaaaaataaaaatttaaaaattagccaggcatggcgttgtgcacctatggttccagctactcagaaggctgaggcggcaggatatcttgagtcgaggcggcaggatatcttgagtccaggagtcagagtcttcagtaagcaaygagcaatgattgcgccactacattccagcctgggtgacaaagcgagyctctctctctctctctctctctctctmwatatatatatatatatataatatatatataaaaatatataatatattatatatgtgtatacgtatatatgtatatatatacacacacacacatagagagagatatatatataaagacacacacacmcacacacacacacacacacacacacacacattcaattccaaaactgggagcctgaaagtcatttaagaaagatgggcccagacagttattggtcatcttagtgccttacagtcaacaaatatgtaagtcctctaaagatgcagcactatcgcaacagacaaacaaaaaatcctgtcctcgtagagtgtacatttaatatcatttcatttcatcttgattaccactctgtcagggaatattgccttgcatcttagacatgaggaaattaagctgtagagatttcccatgatttgtttgaagtgagtcagttggtgagtcagacatcagagattcaagccaggtcagctcatgccagagctagaacctcgccactggtctggtggcctccaaagcatgccctctagagaggcctgtcagggctaccccggatggggactgtgaccatgaggaatcaagaggaaggatttttttttttttgagacagagtctctctgtgttgcccaggctggagtgcagtggcgtgatcttggctcactgcaacctctgcctcctgggttcaagcgattctcctgcctcagcctcgcctcccaagtagctgggttacaggcatgcgccatgatgccctgctagtttgtttgttttttttttttttgtatttttagtaaagatggggtttcgccatgttggccaagctggtcatggactcctgacctcaggtggtctgcccacgtcagcctcccaagatgctgggattaccagcatgagccactagtcccgcccaggattttttttttcctttttcatgagccaaagaaagaccccagactagctaagagagaggcccaaggatacctgaaggccggggaggagggacaaccacttgttggggtgaaccaatcgcagaggctcagcaggacagaggccaaggctgaggaggcccccacagagaaacagagcctgaggacaaggggttcctcacaacacctgtgctccccgaaagctcccctccacacccctctctaggtgccctactctctggggttggtgaaggggtgccaaaaatgcaaactgatccacagaaaaatagagtcctgtattttaaaaatatatctaggtttgtatatggacattcacatcacacagacacacagacacacatgcagccacacacacacacacacacagagacaccaaagaaaagtgctttagaaatacaccaaaatgtggctgggtgcggtggctcatgcctgtaatcccagcactttgggaggctgaggtgggcagatcacgaggtcaggagttcragaccagtccgaccaacaaggtgaaaccctgtctctacgaaaaatacaaaaattagctgggcgtggtggtgtgtgcctgtagtcccagctactcgggaggctgaggcagaaagttgcttgaacccgggagtcagaggttgcagtgagctgagatcacgccactgcactccagcctgggcaacaaagcaagactctgtctcaaaataaaaataaaaaataaaaagaaataaaaaagaaatataccaaaatgttagctggggtcttctctgggtagtaaagtgctgggggatattttccaaagtccttctttacattctctgagtttttccatgttcttcaatgagtatttaataagcagataaaaactaatacaacaaaggattttttctgtgtgcttttttgacctttggaggaagagattagagctagtcccataaccaggttatttgagtaggtctaacaagcccgtattaccagaaattatcatctggtcatttccagtccgagaacagaacacttggttgtcctggcatttcccaagcagkgggaggagttctctgcaggaataaataagcctcagcattcatgaaaatccactactccagacagacggctttggaatccaccagctacatccagctccctgaggcaggtaatccatgatgttttacatyctgggagcggaggaatctgtttttccaggagagttttaggcagcagcctggagtgtgtggagtgtgaggggtaagcagaggccaggaggaggtgtactcaggtgttaggggccaggggtctgttcttggctgccactgattccctgtgccttttttagaggcatcctctgtgtctgggttttcacacctgcaaagggtggaggtgccctggggcctctatggtcatttctgccttgatacttacagattcggattygagtcagctgtgcatctgaccctcagggaagaggtgctgtccccttgcctggagcagggtgcagctctcagaacatgtggcagatgtgattattgcagcaggtccctctgagcagaggccacaggcctcaccatgatttcagggtctccatggggctgcctcgggagctccacttccccaaaaggacccctggccaagtcgacagatgggctgtgtctctgtccagcaacagaaaagacaaactgctgggaaacagccagccctccaacttgcccaaacagaaaagacaagcctttgcccctgaaataattctggagaaaaatattgtctaacatttatccagagaaatgattgcatcagcctgagagtgaacagttgaagcaaacaaggtgcctctgtccctgggcttggccaaaggcatttccactggcctcccctccttcccctccttcccctccttcccctccttcccttcctttccttccttcccttccttccactctctcttccccttttcttctcctctctctacccctctcccctcccctcccttccaatcgcctctcttccccactcttctccccagcacccaagctgccccttttctcttctgaattctaggactgagtgggcggaggctgaaggtgaataatcttgtttgctgcggtcaccggcttggaactcagcccttccagggtctcttgtgcagtagctcatggctcttctctggcttgtagtttcaggaaaggggtagtatgggaggtggtgactgctcggtacgtctaatatgaaccaggtgccttcatcatttatctcacctgagccacttaacaggttgtgcagagacggaaacaggttgagagatgtacagtcacctgcttgccagtacacagcaatcaaaagtggccaaaataaaatcccagtccaagtctgggagactccaaagccctctctgccttctccccactaagaggcccttccaggcttatggtgracacaracaccacgtggcaacctggcaggggcagagaagaacatttgcctttctttggtcttgctgccaaccattatcagggccatcgaggctccagacactgtaccagggactttcatttccctctctcagtcgaccctcactgccacccagcatcacatcgtggaggcctgtggaggccacaccacgtgacatctagaggctgggagagtcactgtggcctctatctctgcccagggctccttcatccctgggttctactttggtggcagttgggagaatgaaggaagggagcccctgctttctaatcccctaggatgagatctgctcaccaagcaggagaggagcaggcattctgattggactgaacctcggaccccccatcagcttacagaccgaggagccaggcaaacctggctgcccactgggctcctttacctgtttgctgtatgatcttgggcaagccccctcaccgctctgtgcccggcttttccactgcaagaaaatggcaacaattatggtacctacctcaaagggtgaaatgaagcagagtgatgtgtgtcgggtgccccagagagyacctacctgagggaggctccaaarctagcaagaggcagcaggacagggaccaggacgcaggctgggtggagggcagtgggaggtggtcggggctccatctggccctctgagacttaaaggagctttgcttttcagagttgagaatggagaraatgttacctctcctgrctctggggctcttrgcggctgggttctgccctgctgtcctctgccaccctaacagcccacttgacgaggagaatctgacccaggagaaccaagaccgagggacacacgtggacctcggattagcctccgccaacgtggacttcgctttcagyctgtacaagcagttagtcctgaaggcccctgataagaatgtcatcttctccccacygagcatctccaccgccttggccttyctgtctctgggggcccataataccaccctgacagagattctcaaaggcctcaagttcaacctcacggagacttctgaggcagaaattcaccagagcttccagcacctcctgcgcaccctcaatcagtccagcgatgagctgcagctgagtatgggaaatgccatgtttgtcaaagagcaactcagtctgctggacaggttcacggaggatgccaagaggctgtatggctccgaggcctttgccactgactttcaggactcagctgcagctaagaagctcatcaacgactacgtgaagaatggaactagggggaaaatcacagatctgatcaaggaccttgactcrcagacaatgatggtcctggtgaattacatcttctttaaaggtgagtgtgcctggcttggggttcagaagaggtggatctcagggccatttctgtcctgactcaacaatggtgttattaggcaaaccactgtagaggagagtgcccacagcatgggggcagcataagcatcaaggccccaccctgcccataggcatcgccgtctcctgtggggtttttccaaattacagtttgtccttggaagacataattcagtggagcccatcagcctctggtctgagtcagtgtggtgcttttcactctgatttaaacttgtccggcaaacagaaagaaggagctctcctttcaaaccactccagggcgcrtaggagctagagctccctccttgcaggggtgctgctagactaggccaggaagtccctctgtctggatgcacctggggctcctgccctgcacatgtgggaggagcacattccagccaggggccttggtgtctggaggtggccaggtggggctggggccatcttcacagggcaagataatccccaaggagcctggccacttccaagattctatgattctactctgctatcatctttaattattttaaaaaatatgtcactgacacataacaaatgagggcagaaatggcattgttcccatctggggaagagcctcaagggtgggcagtatacaaaacatgaccctttgccagattctaactggtccagtgmccaatcccattgatagaaactcaaccaatgcaaacctcagcctgcaagctccgaaggggcagagtgcaagccggtagcttttgcctcctggagcccayagtccagatggggacaaaaaaagagatagggacacaaagagtgatcactgagccagagggtggaaaggtgcttaggagacatgagctgcttggaggcagagtcctgcttggaagctgttggttgattcctgggcaagccacttcccctcctgggcctgggttttcatctgtaaatgaaggcgtggatccagatctccctctaagactactccaygcctcacgtgccatttgttctctgagtttcccatgttctcgcctcctactacctagccctatgctaggactctcccctccaggacacagtagccagcctagctttcccctccccacctgcctctaacaatgggaaacaggcaggtggtaaacaggtgggcagtggaggtggccccatgtctccagcctcccctggaagctcccacccccctcattgttcagtgctctggtcctcctggagtggagacctgcagggcccctccccttcctctgttgacctctcctcactctccaggtgccagttttgctccctgcctcagcctggtttacatacagtgtatgtgacggggcttggtcactgctggggcagccctgtggaaggtggaggggaccgagcatgcatgagcttcaggctgagacagtcccagctcagaaccctggagtgcttgttccctccctttctgctcttcctcttccattgcacccactggacccaagagcatgcaaggattgactcacccagtgatgctagaactatgtattcagctgaaagtaagggggtgggggcatccaaccaggggcagaagatgggaattcaagaaaggaaggtttcccctagaaaacggttttcgtcttttctcttaaatccagatagaataagaagcgaaggccgttacagcagagagaaagtygagtcaagcagagatcagatactaaagacactagactaaccagacattcgggccctcagttgaacagctgaggatgtcagaagatgttaaggaggcaaaattggaaaacttggtggctggcagacagaaatggggggagatgggagcagatgtgagaagatttaaaggcttgtagagcttgggtggtgatttcatccaccaaacctatctctctccccattctggcatacaaggcagcagtcagggtccccagaggcagcccrtctttctggcagggacccatgctggagatctggccagctgaaaggccccaaaggagctcggtgccctgggtaatatgggaaggtgctccatggcactgccctcacatggaggccacagaagcccctgaatggctgctgcaattggtaacggggacacctgttcaactgaaatatctcctaccctgagatgggtcctttctccaagggatctttacaattacatttgtccccagtcattccatgttgggaggctgcagggaccagagaagctgagatggtctttggggaggggaaaggaaagatggacagttattttggtcctagaaagcccaaaggtggggaagtgtcaagaaggaagatgagggcacaagagaatgtagggccacccagaagctggctctcattgcaattacagaaagaaaaaccaaaataaagaaagaaaggaaagaagctcccatttattgagcagctactctcaccagccattcacatgcaatacctcgtttaattctcgcagcggctctgaaaggtggatggtggtattgccatttgttaggtaggagacatgccgtccagaaaagcaaataattaaacattcaaagttgacctgggcccatttgaaaattccttttgctccctcattttaacccctaaagtaaagccgtttgtgactttatgagcttttaccaagcatctcctaaaaccaagaatggaggtgaaagattgtggagcccacaacctagagaaaggattgacaattttttttccataaagggcctagtagtatgtattttaggctgtgtggtccacatgagggcagattcttctttttgacttcctcctctgcatcttcttcatcttctctttcctcttcattttttttacaacstttgaaaaatataagcaccattcttagctttaggtacacacaaaaataagctatggctgtattggcttacaggctatagtttcctgacccctgttctaggggaggaaaataattgtacccaactaaatgcgtgcgaatcatgggcctatgtcatgattcccaaagaatgagtttcatggaattttcaacattttaaatattttactccattcttcccttgcttgcmtagtttctgatgagaagtctgctgtcattttcatccttattcctttttagataaggtggagttttcctccctctgcctctacctctacctctttcaagattttctctttctctttactatggtaaataggcctttagtgagaggagttatgtcagcctggctaggagtcaggctgcatttcaggtttgtgatagctagaggtaccagaggcagtttcatggaattttacctttgcaacactgagagcctaggcagcctcagagtcagaacacccacagttgaatcctcagcctgacagacactgaatccagggcaaatcttagctgaatattcatggtctgtagaggtggacatgagctagatatgagctaaggaccatagccagctcatggcttttgtgatgtccaacaccgctatcctctaagatgtcacaagtgtccctaggcttttattcccatggtctctcctggctctgagttctatcttccattaaggttcttcctgttcctcccctcattcacactgattggcatctcttctgtctgccctcaccaactcacatacagaacccagtctctttcctcttatttccacccaaagccctcccacaagccactgttatatgttcacatccctgtaataccagtgagtaataattgctaatgagacatttttccttttatggaacaaaggctgtcccatttctcctcaggcaccagcctcccacatgttgtcatgcctctttcccccactttccctaaaccttctttctctcttgcactccttattccctggttcctattgatttctcatttagcacaaggaactaggtctttcttttgtggcccttttcccaatccaagcctgctgggctctccctcacccccaataacttttactcttgccaagctacttctctaaaccaaagcagggtccctcctatgagggactctgggcacttccactgctgsggaagcagggtcgagcagggcgacccttgcactcacaccttctccaactgcttgctccaccttcagccaaatgggagatgccctttgacccccaagatactcatcagtcaaggttctacttgagcaagaaaaagtgggtaatggtgcccatgatgagtttgcatcacctgactatascttacttccgggacgaggagctgtcctgcaccgtggtggagctgaagtacacaggcaatgccagygcactcttcatcctccctgatcaagacaagatggaggaagtggaagccatgctgctcccagagaccctgaagcggtggagagactctctggagttcaggtgattcttcctggcccccaaagaccccacatctctccacgtcaaggtctcaccaatgtccagggacaagggcatggtggtgggagaactcatacagggacaggtggaatttacacttactttgccctatgctgcctacatggctttgggcttgatttttctttttcttctttaagacaatgacatcagacaggacaaggggctgaggcttcctctgactccagcatgttctaagtcatgagaaatcttctgcacagtcccaaacactcatgcatggtttctcctggtctcaatctcttgaagggagagagaaacagaaggaattgtgatcagttgagggctgcagtgagatggactctgagaatcagttctgcactggtgaaccactgtatttattcattctctcagcatttgctgcatgattaattgagcacctactatgtgtcagacactaatttgcaccctgagagtaaatcagcaaataaaacacaagattccctgccctcctggagcttaatttgtaattggagaggggacaggcaataaataaatataacaaataagttacgtgatatattagaaggtgagaaattgagtaaggggatagaaattgagtagaggaggatgaaaggatcaggaaaactggaactcgtgttagtttgtgattttagatagagtagccattaggtgatgtttgagcatccatataacagaggggargggtggagtcatgttggtatattagggaaaagcattcctggcagagggaacagtcagtgcaaggcctctgaggtggaagtgagcttgatgtggtcaaagaagagtcaggccagagcagctgggcttccacttcctccatcttgtcttgatcagggaggatgaagagtgcgctggcattgcctgtgtacttcagctccaccacggtgcaggagcagagagagtgaggagagagttgagagaggtcaggagtccccaaaggggtggagcagcttaggtagggccacgtagacccctagaaaaccttgcccttcctcctgtgtgtgaaatggagagccatcaggaggtttggaggagtgctgcgatccgagtgttgttttaaaagactaatcctggctgctgagaggagaataactgtagagcaggtatggagtcagtgacacccgcaggaaccaggcacagacatgaggtgggagcccactgtggctgggatccaggagggagccatgcatgtgagaagtcattgagttctggataaatctgagggtagaggaacttgctgggacacacggaattgagctgaccratttcatggggacacagtgaggaggagcagtagttccgggcccagaccctgcagtgggcccagggagtgcatgtgggcagctgtgtggggtagagaggaaggagcaccagccttgggttcagaccgtggtggctggtgtgacctggagcaggtcgctgctcttctctggagctcagctacctcctgaagagaaaggaatgtcctttccccrccacccctgttttcactgggtgattgtgagaatccggtgaggtattgtatgttgaagccataataaaccactaagggcaagggagctgcttcaacactaacctgaggctgcaacccctgccccaaccactgtccagaaggccggacacctctcgggattgcctgaccctcagcccctcctcactctagatcccaggagaccccagaacgtgggggtcctacccaacccatccgtttactcccagactccttcctcctttagcacctaatagccaccagggagcaggggctcagcagataattttgagtggaaagaattctccaaacacttttgatttacaaaatgctgaggaaacatgtgtccacacactcctggcccacagagaatgctcaatagatacttgttgaatgaaggatggaatgaacggacaaacacatgaatgaatgaataaaaatagaaataggacaccttcctccttcakgggactcagagtttaatggaagacacagcctcctgtataattgtaagaccaggcagacagtgacargcatcttaagagggctataaactaagggagggggagtttgcaggtggcrggtgtgacctgggcctctaggagcttgctacctgctctatgccagcccacacctggcttgagggacagtgcccactggtgaggcaagatgggaacctccaattgattgtttcaggatccccaaagctcttctaacacaatcagactcttcagagrcccccaggccctttttgacctgcctctggctcctggcccacctcatccctcactaccctcctccctgaaacactgagatcacccaccgccccgtggagcaactcctcctgctcccaccttcttccaggttcttccacctgcctcctgcccacctcttcacctagctagctcctttcctgcctttgggactcagcctcaacaccacctcctacaggaagccctcctggtgcccccgtgaagcaggctgccatgcagccactgcagctggcccagcccaggctctcaacacactcaggggtccctgctggtgtgaaggtgcttcaactgcattgcaagctkcagggaaaggrcagggccaggctcgagcagggccacaactccaggcttggtgtgctgcctggagactttcacacttgcagatctgaatgaataattaatgaataagaagagtaaagacaggggttaagaaattgaggaacagattatttattttccaatcagaagggggtgactgtagaggaaaccagggaagaccatgctgcgaggtgggaggcasgtaggtactgatcagcagaggttcagatactttttttttctcgttttctagagagataggtgagctctacctgccaaagttttccatctcgagggactataacctgaacgacatacttctccagctgggcattgaggaagccttcaccagcaaggctgacctgtcagggatcacrggggccaggaacctagcagtctcccaggtgagtctttagacttggrtcaattcatcctttgtatccgaacttgaattggtgaaggccagatgkacttttgggtactcttgaacttgggttaatrcacgtgcatttctcattatatactcaccctgcttgggacacccccaagccaagaagagctaggttacagcccagctcctcctgccgtgttaggggttgagcctctacaacataatgtcatccaggcttggaatcagagagccatggacaccattccacactataccatttactatccatgggggcaaacaattaaagtcctccacccccagctttccatgtgtcaaatggtagtgatagttcttggctagtatccagtgcctggctggacagggaatgccaataggtaataacaatgattatctggcaattgtaatgaaaatatgctcggagtatgagagaagactacttgggacactcagcctgtgttactaaaagcagaggcgccaaggcagggtggccatgcagccttttgctcttgtctgccctctgtgctcacacagcactgggttgaggtctgcactccacctttcaaacagcaaagtaagagagggttgtgtgtagaggagcagaccygtatggttcaggaattcaaggccatgaaaagtacttgaaagccccaaggatgtttaagctagagcaggagagatgctgaaagccatgctggcttggctgaggaggtttctgcagcagctgcttgtggtcaagagctgccgggatgttgcttagaagaaaaatgctttacattgttcttgctcttcctcccaacagtagtggctgttttgggggcaaaatagactctcaactcagacacaaagggatgcatatgaggtgctccattctttacctcgatggctctgggcaaatcatactcagcatctgggtctccatttgcacatctaggcatcaggactgtgcaaaactagttgrcaggggagttgggaggagcaaacattcaacagcacaaagacaggccagcactaggtgctcaatgcacattagwccccttagtggcacacaggcaggtcgctgaactcctgcgcatctgtgtttcccgtgtgtaatgttctgctgtccccacaggtggtccataaggctgtgcttgatgtatttgaggagggcacagaagcatctgctgccacagcagtcaaaatcaccctcctttctgcattagtggagacaaggaccattgtgcgtttcaacaggcccttcctgatgatcattgtccctacagrcacccagaacatcttcttcrtgagcaaagtcaccaatcccaagcaagcctagagcttgccatcaagcagtggggctctcagtaaggaacttggaatgcaagctggatgcctgggtctctgggcacagcctggcccctgtgcaccgagtggccatggcatgtgtggccctgtctgcttatccttggaaggtgacagcgattccctgtgtagctctcacatgcacaggggcccatggactyttcagtytggagggtcctgggcctcctgacagcaataaataatttcgttggamacgttgcttgtgcctttccatgctgactatcagactctgcgcccctgaggctacctgtgccccaaagacaagccccttgagctcccatgcaggctcagctccaccccaagatctgggctccttctgccttcagctgcagcagcctgcccaggactacctaagcttgtggccaagctcacccagacctcaggcccagggttgggaggggaccctgctgctctaaggccaattcctgccccccaggcttctgggtgcccactttcagtttctctccttccacccccagggcccaggctccacctggctctttccagagctcctagccctgaccacatctggcacagcccccggactccttgctcctgcagctgtgcagggctttatcatgcgacatccttcttctgccctttagcacccccaatttgggggaagtagctactttctgggtttccagatggagcccctcaactgcctcaccagttcctagccctggctctgtgaatgatctccctcaacaaccagaatgcagggctgaggacaaatgagccatcagcgcacaactgcaataaagcaatcgtgtagtcaggcatttaaccgaggctcccaggcaccttgcaatctctatcacaaaggcaacaatgatactgttgacaacagctcagtacttgaggttttgatgccagacaacctgccaagatctctccctgaaatagccaattgaatcctcctcacgtccctatgagataaatgctctcagcagtcccattctatggatgaggaaactgaggtgcagagaggcttagtaattttcccaaggctacagagctagtaattattgcctgtagaatgttatcccaaccctcctgacaccacaggcgccctcttaaccacaaagtgatttccgtagggattgccttcatggaacgtacaacccgatggcaaatagatggtgaaacaagtctgtggaagctgagggagagcaccaaattcagtttgggaagtcagggaaggcttcttggaggaggcaacttctgtgctgaggtcagggaaagagaaggtggtcaagtgaacagagaggacaatgcttcagatgggaaaaagagcaatggtagcattcaagaaaccaaaagaagttgggtggctctggggcaaagagcagagaggctgaggggctacagagaggaaggtgccatgacagagctggtgggctgcagaagggctggccgctggcaaggattcccaagtgattccttagagccacagggagctctaagcgagtttaaacacagaggtgatggaagcagctttacacactagagaaggaccctggctgctgagtagaaaagtgattcatagcccaggacaaggatgtgggttggacatcgagggggctctgtgggaactggggcaaaataggtcagagctggggagggagagcgggatgattctgttggaaggctttgaggagaatgggtgtgaatttatgattgcaggtggggtggaagggagaataactatttgggtttgggtgcctgggtgatccccagttctctgaataggaaacccagcagggacttgctggcaagggaagtcgatacattcagatttgaacctcccatgtctgaggttcctgggagacaccccaggggtttgttcaggaagcagctaggctgaggtcaggagagaaatctgggctggagggaagcattcaggatcctcccctgggatgggcaagtgagtattgagggtgtcccctcaaatgagtgccatggagtgaaaagaaaagggaaacctcaatgactggctaagaaagggcagcccaccgaggaaagtcaccagcgtggggcaggagacaagaggacaggacgaaagctgtcgccgcaggaacaagaggagatacttatccgggggagaggggagaaaacctagagacaaatgatgaatgaatggaatgaatgggtctgtgggatttagtgatctaaaaccactcggggatcacaagtgcaatgttagcagaattaagggaggaccacagtgggctggagagtgagcaggagagggagagagggaaggcaagacagcgtgtagggaaaaaagagatcagactgttactgtgtctatgtagaaaggaaagacataaaagactccattttgaaaaagacctgtactttgaacaattgctttgctgagatgttgttaatttgtagctttgccccagccactttgccccaaccttgagctcacaaaaacatgtgttgtatgaaatcaaggtctaagggatctagggctgtgcaggatgtgtcttgttaacaaaatgtttacaggcagtgtgcttggtaaaagtcatcgccattctctagtctcaataaaccaggggcacaatgcactgcggaaagctgcagggacctctgcccttgaaagcagggtattgtccaaggtttctccccatgtgatagtctgaaatatggcctcatgggatgggaaagacctgaccgtcccccagcccgacacccgtaaagggtctgtgctgaggtggattagtaaaagaggaaagcctcttgcagttgagatagaggaaggccactgtctcctgcctgcccctgggaactgaatgtctcggtataaaacctgattgtacatttgttcaattctgagataggacaaaaaccgccctatggtgggaggcgagacatgtttgcagcaatgctgccttgttattctttactccactgagatgtttgggtggagagaaacataaatctggcctacgtgcacatccaggcatagtaccttcccttaaacttaattatgacgtagattctattgctcacatgtttgttgctgaccttctccttattatcaccctgccctcctactacattcctttttgctgaaataatgaagataataatcaataaaaactgagggaactcagtgccggtgcaggttcttggtgtgctgagcaccggtcccctgggcccactgttgtttctctatactttgtctctgtgtcttatttctctttcccggtctctcgtcccacctgactagaaatacccataggtgtggaggggcaggccaccccttcacagtgtgcaaatgcctatttagagactggcctttaggggaggtgagagagagggtggtgggtagtgagtgctaggctgaagttagctgcagtgcttgacagatgtgagagccttgaacaagctttcataaccatagaaaggattcaggaggcagggtgacaagcaaccagggtcgcagagtggcacaactcctcaggttacaattcacaggtggtttgacaccatcctaagttacagttcacaggtggtttgacatcgccttcaactcggagttgcagaattagcagttggccaggctgcatgaagcatccctggaaagggaacaggtggagggctggagggccaggatcaaggatcaaggattccactgtgatgggaatgcaggcagggcctggcgagggggctggtgagggagtgtgtttcttggtaggatcaggtgggacctcctctcctccaatgactctgatgattcctagtataggaggcaaagtcacctgcttagtgatatttgccacaggttggggcaggaaaaggcacaaaatgggacacagagtgggccacggtgtcacggcagttcagccaggctcactgatgagcgccttggagatccagctgcaggaattcttggtggttccaggctttacagacagttgtggaatcccccatcttgtggaatatttctccattcttaccagcccctttgtgggcttcaagaaggccaactgctgatcagaaggacaggagtcaagggggctggaggtacagactacagaagggttgacatcatggacttgagaccagcactggggggtacagatgagggcagagggagctgatcactgaggaagactgaggatggggagatggggtccctaggaggtccaagaatgacctgttagaagtgccatatgaactataaaggctacttttcccccccaaagaggattttttcacattgactctcagttttctcaactgtaaagtggaaaccatgacagtgtgtgcatgcctgtgtcatccgtgtgtaagaagtcagcaagtcactgaaatgcttgctcctgagtctgaacgttcccttgacagcaatttaaaaactcctgagatgatcttttccatgtgaactaactcctcatccaggctggcatggcttctcgtcactcagctggggctggatggcattgcactggacaaggctctgacctgcccacctgcccagctcctgcccccggtccctcctgaccccagtccaggtgtctaaggagccttaccacagcccagcattcattcccttctgtgacttaggtctggaaattgctggctgaaaactgagttcctcccttaagggagcgtctgggccccagatctgtgagggtggggcttagtttcattcttccgcctcccctgggggctgagggcccatccacctgctggtcactagctattgcccttaaatggcttcctgacgctagctgcagggacaagacagcacctgtcctgatttactacctccctcactaaccagaagtgaagtccaagcctgagaggcactgacaccaataaaagacacctacttactctctcattcagcccacgcaaattgccaaccctccaaatgcaggccctgagctggccctggagattccgaggttaagaaagtggacctggaatttgccctcatagaatgttcaatttgttgagcaagacagaaaactgagcatggatgtgacagcagccctcgggagtggggtacgtgatgcccagagagggcaggaataaaccccagactagaagagtcaagtttggtctcctagaagagctgtcctcaaatgcaaaatccagtacagtgaagaggagacaccagggagatgtaccagcagaaaaggagagggagtgcagtgtgtccatggagctagaagaagatcctatgttctggataactgatgtttgagggaaccatggtcatctgtggagctaaagagaaaaacatgaacaagaccatgctttgtaaatcatgttaaggatctcagagtttattcaaagagtgatgagccacagtgaatattatacacggggagctgttttgattaagtttcattagaaagatcaccgtggctgagcagggaaggatggatacagtattgagtgtggatttggtgaaaagaagagaagcagaatgaccaagaggttcagccttagctaggaattgggagaggacagagaggaaaggagactaattggagagatatttattagacagaattgatgagacttcatggttgattgtgtgggggacagaaaggaagcaaagttgctgggtcgggaacttggggaactgaaatccacatgccattctatgagctaagcattacagaatgaataacgttttgtgcaggaagcagataagtcctcatgtgggcatgtggagttggagatgtctgtaggccatctaagaagagaagtccaatagagaatgggctctatggatctgaacttcaatagggaaatttgggcaggagggatggatttcaggatttcttcttgtcaaaaatgtgaggacacccctggcaaatgacttctatttttccctgtgccatacaaagagatgttatctgctgagtccaccatggggaagcataaaacccagaagtctggaggaggggagacgaggacacatcaggaaacctcgatgttctagcagtcactaataagggtcccttgggggctggagactactgtgtcactagcctgtacagttgtgtggttctaggtatactcggtagttcagacatagacaaaaaggggatagactgcaagtggctactggagccaaagtttcccctggctacaggacggagggaccatcagtggctgacacaaggaaaaataaatatatctgaaaatattgaccagagagtca

SEQ ID NO: 8749 - DNA, 142613 bp, Homo sapiens
  misc_feature (1)...(142613): n = A,T,C or G, or insertion/deletion polymorphism (see Tables 1-2)
gaggactcagggctcattccaggcacagtagatcctatgcccacagcagtgcaggtcactgcgggcctcgcgtgccaagctctctgagccccccaacatcctggcagcccagtcacaatcagctcagggctggggaaggcccggtagcaactggaagcatctgtgtccatagccctgaggggctggggggcacaaggactagctgaggaaggggacccaatcatctgaagggagaacaatccaagggactgttgagtgtgtgggggacaccaacaaactgtcagtgctaggggccagtaaggggtgctgctaatgggggcacagccagcggccaagagggaacagaaattggaatgtgtatgggtggctgaattttttttttttttttattttttttttgagacggagtctcgctctgtcgcccaggccggactgcggactgcagtggcgcaatctcggctcactgcaagctccgcttcccgggttcacgccattctcctgcctcagcctcccgagtagctgggactacaggcgcccgccaccgcgcccggctaattttttgtatttttagtagagacagggtttcaccttgttagccaggatggtctcgatctcctgacctcatgatgggtggctgaagttatgtctctcccaaggtggtttaactggtaagaggcaggacctttcattcttcgttatagacagttgggtgtaacaaaaacctgttccctcggctccttttatgcaggggagggatggcaaggatttgggtttgtgtatgggaagaggtcatatagaaagaatgaaagaaatagagagaagacctccccaaatgtggtttctccccaaccccctaaagctcattccagctttccagcttttctaatttgtggttataattgggatggtgccattctgacccccacccattcttccaggttgagggacatagtctagagaggaaggaggtgtgcaaagaagcttggtgctttggggtctcttcctggggctggtggtagaaactcagaagtcagtgtcaaggacctttcatctgagatgcacatgcatgagattcctaagccaagaggccaaaaacaacaggcccacagctctagcttaatttcaacactgctgcaaactcagaaatgttaacctcaaaagacatggtgtctggctagtgattcccaatgtagcctcctgatcttcccaccaaagtccctaggaacatacagaataagataaaagcttgtcatcaacgctggaaactagacatctaggttgtcgtagaggcatgtgaattgtttgaggaagtcattcaacaaatatttgttgagcatctactctgtgccagacatcgttctaggcacttgggataaatcggtgaacaaaacaaagatctcctcctcattgagaatacaatctcttcataaatgcatagttctggcctcccaaagactagggcttcccatatttttatacaaatgtatatcccctcccccctgttttaaaatatatgtaatatataatatatatttatatataaatatatatatacacttttttttaagagacagggttttgctatattgcccaggctggtctcaaaccccagggttcaagcaattctcccaccttcgcctcccaaagtgctgggactacaggtatgagccaccatacctggccctatttcctccctttttgtcaaggaacaaacatgtttcttttggcaaaaaataaattagcaaatacagaaaaaataaataatcccactagcctgagataatctttgttcaaacattggcatacagccaataagctattaacaaaaaaaattatgtacaaacatgcaaccttatttatttccatgtgattgaatgtcgactcttaaatctccattgttgtggatgatggaaagttaattttgtcaattcaaagtaaatttagtcactctaaacttaaaacacagtctcctctgggtaactactcactcaattcaggattttccctgctgggctgctgtgtagtatggtggtgtttggaaggtgcacacaactcgcagttgcctctctgctggaattcattgcggatgtcacctgtcagcctctcctttgtccagggaggtcccatcctcaccacatgggctgccgagacatctggttctctgatccgtgaaggtcatcctgcttcctctgtgtctgactgtcaagagctccctggggcagctggcacatcaggacaatcctgggtacctcttcaaggcacaggaaactttcagctatactcccacccccaaaggaagactcgggagagtgtcccagaatctttgtctaaatatcccaggtggatatttctactctgtgtagactcacactcaaagaggctcttttctcccagaatctcaggcagggagtgggatacaggtctctgagcagttttctccagtgtggatggcccctatctctcggtgccgacttcggaaaggagcagagtgggcagagaccctctcaggctccaacctgtggcctttgaacgtcaccctcccttcagctgggcagacttttatctgcttttggataagaagaaagctgctcagatagcatctcatgttctacccaagttcgtggttaatgacataaattttgcgctttgcatcctccaggcttttctctttgtagtcaaagccaagctttttgcatcaaagaaacaaacaaaataaaaacaaatcaaatatatttatctggataagccacacaagtttagtggcttaaacaaggcaaagttattagcttacatttccggaggtcagaagcccaacatgggtcttcctgggctaaaatcaaggtgacagcaggattgcacttctttctggaggctagaagggataatccatttccttgctttttcagcctctggaggccacctgcattcccttggctcatggtcccttcctgcatctttaaagtcagcagcagagcatcttcaagtctcactctgactctgacctcctcttctacctccctccactcttaatataaaacacagtctcctctgggtaactactcactcaattcaggcttttccctgctgggctgttgtgtttggaaggtgcacacaactcgcagttgcctctctgttggaattcactacagatgtcacctgtcagtctctcctttgtccaggaccgtcctcactatattagctgctgaggcatctggttctctgatccttccacttttttttttttttttttttttgagatggagtttcactcttgttgcctgggctggagtgcaatggcatgatcacagctcactgcaacgtccgcctcccgggttcaagagattctcctgcctcagcctcccgagtagctgggattgcaggtgcatgccaccatgcctggctaatttttgtatttttagtagagatggggtttcaccatgttggtcaggctggtcttgaacttctgacctcaggtgatctacccaccttggcctctcaaagtgctgggattacaggcaggagccactgagccgagctgttccttccacttttaaggatacttgtgattacactaggccagcctggatcatgcaggatgattcctttatttcgaagtcagctgattagcaaccttaattccatctgcaatcttatcctcccttgtcatgtaacatcacatattcacaggttcccaggttcaggatgtggacatctctggagaagccatttttctgtccatcacacttttgtcaaaggcttgattcatatcattatgaaccatggttttcagtattatggtctttgctactgatttaacaaagtctatttagaaattctaaagccaatgctttgacttatttttttttaataatcatatagatggcatgaattgaaagtgaaaagcccaaagggatattgaaaagctcatggtgaaaataaaaataaaaaactcaattttattctccagatctgatcttgtttcatgtatgtggatcgtatttacaccatgtttttttgtaagcggttttattcacttaataatataatgcagacatctttctatggcaatacatcttattttatcacatcatcttaatttcttttcttttctgtctttcttttttttttttttttgagacaaagtctcactttgtcacccaggctggagtgcagtggcacgatcttggctcactgcaatgtccacctcctggattcaagcaattctcctgcctcagcctcccgagtagctgggattacaggcacatgccaccacacctggctaatttttgtatttttagtagaaatggggtttcgccatgttggccaggctggtcttgaactcctgaccccaggtgatccacccaccttggcctcccaaagtgctgagattacaggtgtgagccacggtgtctggcctcacatcatcttaatatctgcagagtactcccagaatttatctagcctattgcttattgttgctgccattgggtacgactaaaatgcaaggccagtttctggccctcacagtgctcctggcacagctgcagcatcctgcagtttcagagcctaggcagttcattcaataatcagagtaaggaagggtcaggaagtgccagtgtagggtccccaccctcacccaggggtgatgatggctctcagggagctgttctgactccaggtgctgatagcagagtttctctggcaacctgtagcactgccttgagaaatgattatctaaagtatatttgcatgggggtgaggrgtgcagagggagtacgagagtcacagtgtcttggcagtggattgagcagagtgatggtgatgccagtggccacgactctttggagccctgagtggtagcagtgatattgaggccagaggcaccacggcagggggcccatcccagaaagacctggggcccttggctggtgacagataactcagggactagaccaggatctgtctcacttgctttcctggtaagtttttctctctatcaaacagagcaggttttccctcccattcagtctcacattgctatgtccagaaaatcatcacactcttccaccagaggggtggatattactttctcagttttcagttttgtttgcccactcactgtatattcttttggtctttccaatggtgatccaaggatttatttaacccagcrgtcaaattggtcattttaaataatagtacatcttgtccaagtccaaaaataaaatgtcctggtatgagaaggcaagcggaggaaattgggtagagtaggctgaaaatgttttatagcaccattacccggagcccaagcccctttttcatttatcccttttttgtcccggcatggcaggagtcagagcgccttctgtttgtcttgattaaagtcagcctccaccttcccccgagcccagttgcccttctcaggacacaggctgcattcaccatgggtctctctgcccaagctctttgcagattttatgaaaggcgttttcacttggattaaacaggcgctgtgtttgtgtgtggtgtgtgtgaaggagaaaatgaatcacttcaactttgggcaaggattttaggtgtagtgtttgtcccatgcaattacataaacacaccagaactcattaaaaaaaaaaagtagaagaggggggcagagattcaagtgcttgcgatgatctaaacagtgcggcacattttccatacattagacctcagaaagggttgtgttctgccctctcacaacagactccaagtccaaaggaaagtttgaggttttacatttctgtttgtggtacaggaaaaggcttatgctctgagggcttgattcagtgaaataacattgcctttatacacatttgcttctcaaggagggcaggagttggaagcgaccgttgtgaaacgttaaagattttctggcagagggaaagggattttttttttctccctccctgccgaggaaaaaacagttctaacgaggagttactttgtagttttaactcatattcaaatactcccagccgagaagctgccatcgatcctcccatggacccctgatcctggtttggaggaacttttcacagctctctctccctccctcaaaccctgtgcaatgagtttgcagaagagagtcttcccgagaaggcagaacggtgagtggagctccttctcctatcccaggggactcaggggaggttggaatggaggggtggacccttcctgacatcctcccaggggaatggaagcatggttttggtcccactgtgtagtatatgagtgagtgtgtgtgtgcacacgtgtgagtgtgtgtgcacacgtgtaagtgtgtgcacacgtgtgctacaataggacacaatgcctgtctttgcagaggctggctgagtgctcaccaagtgcttggcagagagttcgggaagggcaattgcaggacccccacaggggaggagagtgaaccctggccagggcaatggttttccatgtgccccggcttcctcttcaaggggcagaggcatcagtgtctaaaacgctagctgtcagggtccccaccagttccgctccagtttcagcagaagcagaacagaagagggagctgctcagctccgggagaagtgaacggagtgctggtctctggagcagatctgagaactgggaggggcctccatccagatcccctaccttcctgcaggtacagcccaacagatgagagcatttcttattaaaatcttcttcttttgctctggaaacataaacaggcatcagggcagaacgttttaacccttctgcccaacttttaaagttaacactggcgaaacttcagctctgttgcaactttggcataagagagtaaacacatggttttccttaaaaaggagaagtaagcaagtcaaaggcatattctgacttttctagctacagaaagatatggctagaaccctggcatctacttgcttaggttgcattaaggcatccgctgaagtctgaagaaaggcagtggggtgtagggaataagaacctgggccatggggcgtggccacctgggatggaatcttggctctgagggtaacaggctccttgatcttggaaaaggcattcaaaggctcactttcctcctttgcaaaacggtggtcataaattcttacctcagaggacggcagaaacaataactaagataaagtgtgtgaaatgacccaaatggcatgtacgtattcagaggatatgtcagctctcctaagcaggctgctcccctcttctctcacagcaaccatcatagatatacaggcttgaggatgaagaaaagagtgcttgagggcccaaagtagccctggctcttcgtatagcagaaagtagggtgagcattcaggcggcctccctttggaggcagatgacatggatgcatttacttccactggggatcttcgagggtgggacttgacctggtgtttactaggtgctccgtgtttggtgaaaccattttattcactctgattcacagggaggtcttaccacttcctaccctggctgcactgcctttggttgggtttccctggtaacagatggtgagacagagatttgcgcataggaagttcattggtgtgtgctctgggaacaacaccagygtggggtgagggagacagaaccagacagatggagaagttgggctgtgatgcagttgcaacactggcctcagcggatccaggggatcttatggggttttgtatccctgcagtgaccagtcattgcttgtgggctgcccctggaatccaggcataaccttgggtgaggcaactgtctttggctgaaggcagtttcccgagagggactcagttgtgagttgtcacaggcaacacttatgtcagctgtgggaatgaacacctcggtccaggggtgaggagcttatccgggygatgccccatcaactactcaatacatttgacacagtgccttctttctctgagttaggctgttagaagattgggcattcacatgcagggacacctgtccagttaaatccttgcatagaagtgtgcctttggataagcccctttccatatctgggactcagtgtccctgtctataaagtggatggaagggtgttggactagacatggcctctaaaaacactccagctctgctatttcacatgtgcagattctgagcatgtggtcatggtggttggatgtgtcctcaataatagttgggtcctgtggtctccaccataggtgccttgactccttctgctgggaaataggaatcgagtcacctggggatccttgggacttggcccctgtcagcaaggaggggctgggcctgtgggaagcagagggaggctctgcatagggctggagggtggggcgtagggtttgaggaggattctgctgcacaccttcccccaccatccccccaacgtctctccaataaaaaaagtaaaaccacatgagacactgccatatgtctttgatagttaagagctatgtaatgttgcccgggacaagcatggatatagttttattactctccgtctcctcctaatttcctatttacttttcaatatacaaagagtgaaatcactttcccaaacacttggaattcattttcattgctttttttcttttcttttcctttttttttttttgacaggatctcatctgtcgcccaggctagagtgcagtggcatgatcatggctcactatggcctcaacctcctgggttcaagtagttctcccacctcaccctccttagtagctgagactacaggagcgtgccaccatgcctggctaaattttatttttttgtagagatggagtcttcctatgttgctcaggctggtgagccactgtgcccagcctggaatttattttcaacaaattatttatttagagtattctaggcttcaagcactgtgctgggctctggggatctaatgggacacattaaacaaacaactgtacacacataaatataacggcaaagagggttaagttctatgggaggctgtaacagggaactggcctagtctggcagatcagcgtggggcttccctgaggaggtgctatttgagttgttttctgaagggtgtgtgggagttacactggggcagagatggagaagcaaatgggcgaattgtagaatagggatgggaaaagaaagtgttttaaatcttaccagcttaacctagccactgtgagttttttaagtgtacatccatccagtctgtttttcttgcagcatcttaaacaaattatggtgacttgttagctaagggaataagatctttttgctggtggggcaaggttttgcctgtgtatcagccagttgtctctgttccccacatctggcagccaacccctcagtgtgcatccctcactaccagaggcctcgccctgaaccctggaaagccctcagtaataccagcagctccctcttcctgagtgctttcagcaccaggcattgatttaggatcaacctgcatgagcactgactcatttgatcttacctacagcgctttatttttatttttattttttatttttacctacagcactgtggggtacatgctgttgtctttacttctcaggtgaaccaaaacaagacacagggagtttaaccaggtggtgagtggcaggacagatttgaacacaggcgggtctattccatcctaaagcctgtactcttagtaagcagtatgcagctgaaaaagcacggtgagctttctacatatccatactgctcacatgctgatgcttccactcgacattgggttgtggataacttctcagttccgacaaagttatctgaaccaccagtcttaccaacctcagaaaawcagatcagatgcctgtgcagtaatttatttaaccattccccaattatggacatcttggcttgctttcaattttatgttttccaaaatatcatcataaatattttcaaacatatggaaaagaggaaagaattgtagtcaacatacctatgtccactatctagattctacaaataacattttagtatatttgctttatcacatctatccatctctccatccctctgtccatccatgcatccatctttttttttcatttttttcttttttaaatatagagatgaagtcttactatgttgcccaggggrgcctcgaactcctgtccccaagtgatcctccctgcctcagcatcctaaagtgctgagattacaagagtgagccaccatgcctggctatccatctcatttttgaatgcatttccaaataagttggggattaaataaagagtacctgagggcccaaagtagcccccctggcttcctctctagtagaaagtagggtgaggatataggtgatctccctttggaggcagactatgtgtgtgcacttacttacactggcgaaccttccagggtggaacttgacttcatcatacatctaactttcaatatttgtttactgttgttctttcaggtaagatttacatacagtgaaatgtatgtatcttaagtgcactgttcagttcattgtgaaaagtgtatatcccagtgtaaagcacacccctagcaaggcataaaatgttatcatcactggctggatgcagtggctcacatcygtaatcgctacacttttgtaggctgagtagggagatggctgatgcccaggagttcaagaccagtctgtgcaacatagcaagaccccatctctaaaaaaattaaaaatttgctgggtgtgacggtgcacacctgtaatcccaggtacttggaaggccgaggcaggagggttgcttgagtctgggaggttgagtttgcagtgaactatgattgtatcactgcattcccgcctgagtgacagtaagactttgttcacccccacccaaaaaaattaccatcatgatcaccccataaagctcttttgtgcccttctcagttgctttcaatttttgctgataatacacaacttgttgctaactttaaagacctgattaaataaagtatggcacctgctttgtcctcctttgaccgtgggggcagaacctttgcctgcaaaggcccccagttgtggtgagcagacctcatgatgagttcaagtgcagactttggctgggggttctgggataagaaagcagcaccaagccatgggttattctgggctaaagggcaacaaggtacggagagtggtcctggctatctctgggcttgggattagggttgcagttttgggttctgacagtgaggttagaaacaggccagggaagaggagatggagcaggggccccatgggtggtgagcactgtattgaggctttgtatgtccttgtttatcctgagggcctcacctgagcccccatggaccctaaggcccagtgatgggtgccaagctgttcccactagagttgtcctcatatttcctgctgcagtccagactagaatgggcattggaggcaatgcatgtacctttcgctagcaagatgaatacaaaaacagcacaaaatagattgcaggtagtgtcgggcagatgtgctttcagccgtctgaatcgctatgttgttatgaggtggagagggggagggtatagacacaggcatttctggctcttgcacactgctgttcttttcttcccattgcagagggtgtgtggagcactgcgggcgagatggagctgagggaaggcagagctggtacgtgttgaacgtccactgtatttcaggcagtgagagcgttctgtataagtcttataataacccattttacagatgaggaagctgatgctcagaaagaggactggcttccctcaggtcagacactagtcagcagcagcccaggggataggtactcaggctgctggactcctggaccagtgctcttttcaatgcaaacccctcctgtgactagggtgtgcacgtgcatacgtatgcctgtaacaggttagatccatgtgttgatgtgtctatattgtctctgtgtctatgcatctgatcacaaagaatccctctttccctccttcctttgcccttcttcctcccggcctttttttcttctttctcttcctcttctcatcccttcctctcacagctacttagcatccagtttgtgtcaggtactatgctcaataccagggctacaaagaaagatatggcacagcccctggcagcaaggctttattctcttactggtaaggcagacacacggatgagagaactcagcatggagtgctttgggaggacagaagggcagctccttatttatttcttatttattgaaacaaggagtgcagtggtatgatcaaggctcactgcagccttgacctcctggcttaagcctgggcttaagcaatcctcccgcctcagcctcctaagtaactgagactataggcacatgccaccatgccaagataatttttttttttttttttttttgagacggagtctcactacatcacccaggctggagtgcagtggcacgatcttggctcactgcaacctccacctcctgggttcaagcgattcttttgcctcagcctcccgagtagctgggattacaggagcctgccatcgtgcccggctaagttttgtatttttagtacagacagggtttctccatgttgacccagcttgtgtccaactcctgatctcaaatgatccacctgccttggtctcctaaagtgctgggattacaagcatgagccactgcacctggcccataccaagctaatttttcatttttatttttgtagggacagagtcttgctgtagagacagggtctttcccaggctggtcttgaactcctggcctcaagtgattctcccacctcagcctcccaaagagttaggattacaggtctgatccactacgaccagtcaagtgatttaatgtgtgagwtgggagggggtgtcagggaagtcttcctggaggaggtgattctgagccaagccttgaaaaacatacaagagttcactggaggcagggcttgttgaagctcttgcttagaaagggcagagtgtgctgacatgtggaggtggaaggatgcacgaagcatctggaggaacttcaagcgtcggagagacaagcctgtgttcttgggcagggatttaaaatttttacttattgagtcagtcatgtcatgacaacaacaaattaagagaagaaagtagggatttcttaatctttaaaaatgttgctttctgatgcaaggcaggaagcggcgttcctcagatacttgtgtgggcagaaagactgaaagcgtgggacaaataactgctttgcacagctgggcaccatccacctcgaactccacccttgtcctgtctgaagccacgcaggccagggcccctggccagggcatctcggacattctgtgacagccagaaaagacgagggactcaactgcctccacacccttgtaaaaggcaagaccccaaactgaacacatggttcctgccaaagtcttgctgagtggaaacattctcccccttctcccccgggtgtgtcactcattaatacctggccttttcttgttgccaggtggtgctgtgcaaaccatcctaatattggccttaaaaatagcaccacccaggcactgaccactccctcccagtgtggcgtttaaccctttctaagcccacccatgtgatagggctgaaggggatgggtaggaatctacagatgctcagcacggcaatgtttacttactcagcttttgttacaaggacaagaactgactggattttgttgtcagataatcctgggttaacatcctggctctgtactttgggctttgagttgttttactccctgtgatgtctcttcctccctttcttataagaaaaaggggaaatcattatggtaccaaccctccaagtgaattgtggagctggatactgtgtggatggtacttagccttgtgtctagctgttccatggtgagcaggcctatgcaaacctacccccaaaggctgaggaagttgaggggccaaagaaagaagctgaaaaatccagtttcttagaaagaaatgttgaatagggacttatgtccagaagccatgtctgtgtctaggacggcgagacaagatggtgaatccccacaattacaccccagacccagggtttatatatcataggagaagggtacagtgcttcagaaggaatgggtagggtgattgctcaaggtcaggatttatggtaagtacaataacatcaagattgttttgacctaagggtaggataagtacatgctcttatacaaggaacagtagatagactagaaaccttacgagactttcctggaactggagttaatcagaatccaacatgggggattagcacccaagatggagttgcctcagcctccacactggcccacagcaagtgctgcacaaatgcttgttgttgctgttattaatcagccaaggttctatatctctgagtactttttatttgttttagagccatgaattaaaccaagtgattcttcttgtcataaccggagggtcatgaatgctcttggaactaaactctcttcccttggagagaacattctgtttcctaatctgtggcttctaggagctaagagagatactgtgaatatgttttttaagttccatttaaacctgggcctaatcacataaattacgctaaggaaatgtctggaagagctctttgtaaactgaaaactacaaacaaatgtagaaactcattacatggcattagtcatttattcattcatttatgcattgattcactcagtaaatgtttatcaaccctttatgggccaggcatgctctagtgctggggaccccacagtgaacaggctgatgaggtccctgtgtgggacctagatggggcggatgggtggtatgtaagtacccaagcagactaacaagacagcttcaaatgctggcaagttctatgaagaaaataaaataaggagaggtaacggtgagtgcctggtttaggttgagtggtcaagaaagatcccacttaggagatggagtcagggaagagccagccatatgaagatctggaagtggaactttcctgtaagagaaaacagctagggcagaagtcttagggtgacaagggcatggcttattcaagaaagagccagaaggccagggtggctgtgggatgcagcgagcaggagaggcagaggtggaagctggagtttgggagataaacaagggtgagatcatttagctcctttgggacactgtaaggaatttgggtattattttggaaaacaacgcaaagcctttggaaggggtggagcacagggcatttttggggcagtaaatatatctctctgtctgatactacagtggtagatccataacgctatgcacttgtcagaacccatagaactgcacaacacaatgggtgaaccatcacgtaagccatgaactttagctaataatcatgtatcagtattgatttatcaattgtaaaaaggtaccacgccaatgcaagatgttaatagtatgggaaattgtgtgtgtggagagggagatcagtattcgggagttctgtactttctatgcaatatttctgtaaagctaaaactgctcagaacaataaagtttattaaatttttaaaaaagtggttgggtgcagtggctcatgcctataatcccagcactttgggaggccaaggaaggaggattgcttgaggccaggagttcaagaccagcctgggcaacacagagagaccgtgtctctacaaaaaaaaagaaaaaagaaaaaatagccaaatgtggtggcatgtgcttgttgtcctagctactcgggaggctgaggctggaggattgcttgagccaggagtttaaggctgcagttagctatgatcataccactaccctgcagcctgggccacagagcaagatgctgtctcaaaaacaaacaaacaaacaaaaaacagtttttaaaagtaattcaaagcccttgcaaattttatgctgatccaatttatattttcaaaaagcctacctgctattatgtgaaaaatggattatgaaggtctgcataggaaccagaatcccagttagaaggtgaaagctataatcagacaagaggcactggtaagaggagggtggcggcagtgaagatggagagaagcggaaagaaagtgggatagcttctggggatagagccaacgagaatcactgataaattggatgtgatgtggaaggttagagagatggagggatcaagatgaataaaaactcacagagggcttattctggcaggcactgttctaagaaccttacaagtattaccatatttagcccaaacaaaccttgtgaggtggatgttagtgcactagccagcctatagatgacaaaaccagtccacagagaagtgcctttttgcctgcctatgatcatgcacttgggcagggacagacctgcgagatgaacccaggaattttggcttcagagcctgtgctatgttcttcccaccttgatactgaggattttggcttgggaaattgatggatgctagtgacaattaccaaaatgtggaagtttagggaagaaacattttattagggggggaatcaagagtactgttggcagtgttccttttttttgcctcactgaataacagccaggcaatgttacttttgaaatttaagttaaaccccagctgaagatgttaagcaagtggtaggaaaaaagagtcagaattcaaggagaagtccaggcctggagaagtgaatttgggagttgttggcatgtgcgtggtatatttgcttgtggactggcttcagttgcttgtcgtgattgtaagtatcttagtgatggaatattactttgaaaggatgcaagcctgatggacagtttgaaagaaaaaaaggccagagagagggcagcatggtctacatggaagtcagctagaattttcgtatgaagttaaaacccttggtttgaatctatatgttgctgtgggccagggaaagaggggaagagagccggggagcgggaatcaagggaccaatggcttctgactgcacagccttggacgtgcactttttggacatgtaacttctctgagtctcagtgtttgcatccgtaagtggggacgtacaataaaatcatcaagttttggcctcaacattctgtctaagttgaaagtgctaaatgcagagagaatttattatcatcatgtccattactgtcaggttacattactagtaacattacattactagttaaaattgttacattactagttaaaattgttaaattatattctgcgtcatgttacattactagttaaaattgttacattactagttaaaattgttaaattatattctgctcatgataatacagttcgcatgaccaaaagtgtacagcataaagaattcccaaggcattttatagattgcaggacagctctttgctcagacctctgagcagccctgtcagattattgggttattgtttccattttgtggacatggaaactgagactcagtaaggtaaaaggacttgcagttgacagagccgcttagtacagaagctggggcttattgctctgaccctaagctctttattttgccattgtttgaacagaataggagatgaccctgttgtgtcattttaaggacacactttctttttgccttctgaatatgtttacttgccacaacaaacatgtattacttttataactaaaattttgaaattaaaaatttttgtaattttaattttttaaattaaatttaaatttgtaattgtaattttaatttttaaaaattaaattagaatttttaaaattaaaattttttaaattaatttttcaaaatttataattttaattttgtaattaaaatttttgtaattaaaaatttacttttggaaataaaattttgtaattaaaaaataggagaattagaaggaaatacaggttattgattatgaaactttagcaagcatcagaatcacttgttgaacagatttctcagttccgtgggctggaagggccaaaaaggtgagcaggcttctgcttggttagctgttggcagcatgcttcctcctctattgcctcattctctcagtaacactgtgcagtagaagtttctaatttcatctggcagacaattaatttcatctaattttcatcgtagcaaactaaggctgtgaatgaccaagatcacacaggaagctcttggttgagcttcaagtggtgcttgaacttcctagttctaaccagggcggggctctctcacctgcgtcttcctccccgtctcttctggcttgcagtgagctggactatggagtgttgggcagggtggagactctttctgcaggatgtcctgaagggcagaggggtgataaaatttccaccttgaagcacaaaccaccccgtattaggaaaaatcagggccaagtctcaactacactttggaataaatttaccttctgagagtgagaaagaacagatcttcggaaaatagagggagaggcgggaactggattcaggtgccgatgacaagagagagcttagacttagtggaggasgggggctgtggggccctcccaggcctcaggatccaagaagggcaaggccagcccccatagccctggggtgctgaattgctcctcagcctctctgccagagcaagatggaagtggggcctgagtctgtcctggccccaccgcacccaggccattgtgagagagattgtgggtgtgagctgagcaggcgacactgacagaggcgctcactctctgcaatttagaaattccttcactgcactccagactcactccagactcagccctacaatgtcccctgtgcctgctgacaaaggcagctttatccccagagtgctccctcctcccgtgcttcccttgggaccgtgggcctgtgttctccagcagcagcggctagatctttgcagccttgcatggaatttcaagggcttcctacaggttgcacctacaccctcattaaagcccccaggaagccctgaaacatttggtgctgagcgttgggaaacattccattctttagaagagaggtccatacaaaaacctcagcctagcatgtacacagggctcacagagactgagcttaggagagatgtgtgggatgctctttgcggggcagatggattaaatgccaccttatgattagattctccaaggggctacgtgggggaaaggcactctggtctcatgacactaatgccaacaggacacacacaaaagtgccccattcttttatgctgcagttttcaacatgctctgtatacgttaggtcatgggctctcgcacctgagcacgcaccaaaatcacctggagrctttgtgaaaacagagtgccagaggtgctgcttcaggaggtctaggccagggcctgagaacttgcatttctagcagatgctgctgatgcagctggcttgaggaccactgagttacataagcttctgagagccagtctgttgtttttgggaaagggtggcacagacaagaaatgaaatgctatggaaaaagcctgggctttggagacaggtggattttgacttgctaacttgctaactgtgtgaccttggggaaattccacggcacgtagtaggtgtttaatgaacgtttgtgcagtggctttctttgtctgcaaagcaggtgatatatttaccagattgatggcaggattgtatgtgatgacttttttcctctttttattaaatttttatataatttgagaggagttcttgctatggtttgcccgggcttgtcttgaaycccccggctcaagtgatccttctgcctcagcctcctgagtagctgggattataggcacgtgccacagcttccagcatgtgatgaggtttatagaaagctcctagcagcgtgccaggcacattgcaggcaccgagtcatgtctgctacctttcggctctcctagtcatttctgtgttgtccaaagaaggcaggggcaactgggctggaccaaggaacctcactgtggttctgtggctctgcactgggtttgcctyctgggtgtkgccggccagcccagcagatggtggaccttgttctgaggctgagcttctcagcactggcagcccccctttttggatcaagccttttcacgtggagcagtcagatggctcagatcaggagtcttcgagcaaatccatgccaggtgggacacatttgtcctgagtcacctgtccagagcaggtggtgaatattgtgtcctactcacggcatctcaactatcggagcctgggatctgactcaaaggccggcctccrtctgagaactgagcrtccatttctcaatccttgccggctctgacccaggcctgggccacaggctgtccgggaataagtggtgctgcaatccctgctgggcagatggagagaggagcaagggagatggcagccccgggggactgtgcatagggaggtaggtgggcaccaggtgagtgaatgtctgtcaggcagctgctctgtccaggtggccgttaccggagggaggaagctggcctctctgacctgaatggggagggtcttggttgctaggacgtaacttcatatttggaagtggtgctggggtcaggggcaggagcagaagccaggattgtgttggtaggaatctctgtgtcaccatgtcacagttaggtacaggaggaagcagcttcagaaggccagagcgggcagagggatatcgcttgacctggctctgcagcacggggagaatttggtcctgagatttctgacttttcagcctcgtctcatccttggcaatggggtgtggaaggaggtggaggaaaggaaggcagcaggagagagaaaggccacggggcacctgatgggggcttctctgctgcctggccagactccttttctccaaagtgggcacagcgggtgggcatctctgcagattgaccatgggaaaagtgttcactctgcttgctttttgataagggtcccgtgactaattcctgcattggtaggtcccaggattggtgtttttttgtttttgttttttgtttgtttgtttttttcttttttggtccatagcaagtttgctttctgtagctggagaatgaggtagcagcataagaatagaggttccctgtggaatacagggaagcatcttctcctcctgcccttatcaggtgaaatcctcccacttcaggctgagccatacaaagacgacccctttgtcccaggaggccagttcaagctcccactgggttcctggaagcagcctgggagctgccgtctctgtggctccccttcctrtttctccagtttcccccggaaggagaagaccgttcagcctttttcctcctctgttctccttctttaccctgaagttaagtgatggtcaacatttacgagcacagtagaaggcacctcccctgctgcagatatgacgtgggcatgagccgtcaggtgggtcagacccttgaagcctctactgctcatttattcaatccccagtgagtcttttaaataaaacttagtaccccaaccatttcctggccactcttcaagccccaggcaccamgctaaaatattcacatacctcatttaatttaaaccttacaacaacctggagcttagggagtatatccccaaaccgagaggtgaggaggcttgcacaggaccactcagctagacrttcccaggacccraacccagcttgactccaaaatccatgctctcactggctttgtggcatgcctcaataaatacttgagtttcctcaacacaaagatggtcatatatccatagggttaaaaaataatctctgttggatgcaattgactatagaattattattttctaattgtttgtattcatggaaacctttttagaattaaaatctatcatgaaaactcatgtataatcagttaaggcagaattattttggcagaggcagaccaggaccttgagacctgcccttttgtcaacccctccccctttctggttcccagcagtggcccaggggtataggagtgagagggagggaggtacactttgaattgaaatctactggccaggtacagtggctcacgcctgtaatcccagcaatttgagaggccgaggcgggcggatcacttgaggtcaggagttcctgaccaggctggccaacatggtgaaaccctgtttctactaaaaatacaaaaattagccaggcgtggaggcacatgcctgtaatcccagctactcaagaggctgaggcaggagaattgcttgaacccgggaggcggagactgcagtgagccgagatcatgccactgcactccagcctgggtgacagagggagactccatctcaaaaaaaaaaaawatatatatatatatatatatatatatataaaatacatattttttattgtgcatttgaattggtaatacattttcatatataggttacgttttgctattaaaaagcaattcattgtgaatagcaatatgctcataaacacggggagaaaataggcatggggcaaaataaacaaatagttccaagaacttggagttgtggttaactaggaaggcagcttgaaatcaggaatttacttcaagttcttcttttgaattcctgttgaaataaggacgaatctatgtcagtcttgtaaactagacagtgttgctcagtgtgtgccagaaacactgagaagtctcagtggatgtctcaggtggatgtgaaggacgttgggtggaagggcggagcccatcaggagggaggcgctgttcttgccacatctggagatgctggaggagaggtttgctttgagtgggagcaactggtaatgctggacagtgacccgatgctgggatcccgcgtggagatctccatcggtcttgcccctggctgagtcttggcatgtgcagctgggatggaaatgctcctccagtggacagttacagcagctaagacatggctaccttgctcagccaataggaggcggtcacctacaaacatcccttccaaaggttcaaggctcccctgagaacttggatgctggggaatggtgcaccttccctgctgctcactgcacctctcacctggcaaagaaaagccacaggaaatctaagccctttctgcagtctggcatcggcatatgaaagattccaacgaggaatttcagaacycatcccagctcccgaatctgagtaagcacagacctcttgagtagggctgagcaaatgcggcaaaatcaatgcacatatgacaagattcagtggcccaaagaagggagctaaatgaggaatcaaagcaaataccccatatggaattgctgtaaaaaatcagagaaaacctgaaagtagtggttttcaagcatgacccactagtggattgaaaatcaacttagcgggttggaaccaacttcctttttctaaaacaaaaaaagaatagcatacatcagattgcatcaggttcttagcaaaatcatattttatattatctttttcataccaaagatattttatattatttttattataccgtagtaaaggtattgtttcatgaaagtttttagttatatatatttatttatttatgtatacatataaatcttatgtgtatgtgatccatgtactatgatgtaaaatgtaaattattatggtaagtcaagatttttttaatttttaaaattctttaaaaattatttttatttatttatctatttattttttgaaacagggtctcactctgttgcccaggctggagttcagcagtgcaatcccggctcactgcagccttgactccgtgagctcaggtgattctcccccttcagcctcccgagtagctgggactacaggcacacgccaccacacctggataattttttgtatttttattagagatggggttttgccatgttggccaggctggtctcaaactcttgagctcgagtgatctgctcgcctcaacctcccaaagtgctggaattaaagtcgtgagccaccatgcctagcctaggtcaagattttaaaagtttcataaatagtcctgtagaacactgggtggagtttggaatggtgaaaatgtgtcaggagagtattgtaactgaaatattcctgatcttctctttcaaaaagatggccttcttcccattatccaaggcaaggatttcaggcctgagtcagccataagctcatctgtctttttttctgtacttacctcctcataaatggattaagagagcctcgagcaatggtgagggttggagaaggtggacaggtggcccagtcttatgcgctttccctctcttccttccttctcctcatcctccaaggatggttgtagccaactccagccaaagtgcagatgccagagaatcctgcagcagttgctgagaacacaggatacctgtcacatttactgaagcagtggcaggacaatgcatcccctgcattgagctagttgtcagaagcagaaaataaaaagtgtgtgtgtgtnnnnnnnnnnnnnnnnnnnnnnnnnnnnnnnnnnnnnnnnnnnnnnnnnnnnnnnnnnnnnnnnnnnnnnnnnnnnnnnnnnnnnnnnnnnnnnnnnnnnnnnnnnnnnnnnnnnnnnnnnnnnnnnnnnnnnnnnnnnnnnnnnnnnnnnnnnnnnnnnnnnnnnnnnnnnnnnnnnnnnnnnnnnnnnnnnnnnnnnnnnnnnnnnnnnnnnnnncacacacacacacagaagtaaatgacagcagttggaccatcaaaatctgaaaaattctttcaggccaaagactccataatgctctatagctgttattttgcatttctttgaatctcctctcagttctatttagagatcacgaaatgtctaatttaatggccctgcccttagttctccaggaaggagatcttagttgttcatccacgaacaactttttgagccactttcctacttctatttcttccagtaggcagatcatattttgggtttctttgttttaagtttgtggtttttgtttttccctctttttctttttaggttgtagttaagtggtgtatacaaatttattagcaatttattatattgccactttgtattttaatctttaatattaaattttgtgtttggtaaaaatgctgtaattagtaaaatgtagagtaatcagtttttacccattctctgctcttcaataacagcttgttgagtattctctctgatttattctagcatcaracacacacacgcgcacacactgtgctgcagcatgttttgttttccaattctatgtagcacaaaaagacttaacctcattcttctccatatctcaacagtattccatgtatcttgatgatcacttacaatataaggcaagtaagcataggcaattcatcagatttgaaccagagatggggttactaastgaactattagttccccagaagaattagcccaagcaaaggtgttgtacagtatgtaaaatgtcttttcctactttatacattttatctggccagagaacacctttaaacattaaatgcaatcatccttagtcattcaacaaatatttactgagcaattgatagaggccattcgccaagctaggcctcatggatcaactcgaaatatgacagacagactctgccctcagggagcttagagttcagtagacatgaccagtggtgacacaagccactggagtagcatcagatgagtgctttggtagtggaagaacctgttctcagagcacagacagctttgggggtctgtattggtttgtggtttcattttaaagaagtgttatccaaaaatagggtttgaagagtgatgaaaatttagcatcatcaaggactatagaaaatttggaaggcatatctcctaatgctatccctcccccctccctacacccacaacagtccccagtgtgtgatgttccccttcctgtgtccatgtgttctcattgttcaattccacctatgagtgagaacatgcagtgtttggttttttgtccttgcaatagtttgctgagaatgatggtttccagtttcatccatgtccctacaaaggacatgaactcatcattttttatggctgcatagtattccatggtgtatatgtgccacattttcttaatccagtctatcattgttggacatttaggttggttccaagtctttgctattgtgaatagtgccccaataaacatacgtgtgcatgtgtctttatagcagcatgatttataatcttttgggtatatacccagtaatgggatggctgggtcaaatggtattcctagttctagatccctgaggaatcgccacactgacttccacaatggttgaactagtttacagtcccaccaacagtgtaaaagtgttcctatttctccacatcctctccagcacctgttgtttcctgactttttaatgatcaccattctaactggtgtgagatgatatctcattgtggttttgatttgcatttctctgatggccagtgatgatgagcactttttcatgtgtctgttggctgcgtaaatgtcttcttttgagaagtgtctgttcatatccttcacccactttttgatggggttgtttttttcttgtaaatttgtttgagttcattgtagattctggatattagccctttgtcagatgagtaggttgcaaaaattttctcccattctgtcagttgcctgttcactctgatggtagtttcttttgctgtgcagaagctctttagtttaattagatcccattggtcaattttgtcttttgttgccattgcttttggtgttttagacatgaagtccttgcccatgcctatgtcctgaatggtattgcctaggttttcttccagggtttttatggttttaggtctaacatttaagtctttaatccatctkgaattaatttttgtataaggtgtaaggaagggatccagtttcagctttctacatatggctagccagttttcccagcaccatttattaaatagggaatcctttccccattgcttgtttttgtcaggtttgtcaaagatcagatagttgtagatatgcggcattatttctgagggctctgttctattccattggtctatatctctgttttggtaccagtaccatgctgttttggttactgcagccttgtagtatagtttgaagtcaggtagcgtgatgcctccaactttgttcttttggcttaggattgacttggcaatgcgggctcttttttggttccatatgaactttaaagtagttttttccaattctgtgaagaaagtcattggtggcttgatggggatgacattgaatctataaattaccttgggcagtatggccattttcacgatattgattcttcctacccatgagcgtggaatgttcttccatttgtttgtatcctcttttatttccttgagcagtggtttgtagttctccttgaagaggtccttcacatcccttgtaagttggattcctaggtattttattctctttgaagcaattgtgaatgggagttcactcatgatttggctctctgtttgtctgttattggtgtataagaaagcttgtgatttttatacattgattttgtatcctgagactttgctgaagttgcctatcagcttaaggagattttgggctgagacgatggggttttctagatatacaatcatgtcatctgcaaacagggacaatttgacttcctcttttcctaattgaataccctttatttccttctcctgcctaattgccctggccagaacttccaacactatgttgaataggagtggtgagagagggcttccctgtcttgtgcccgttttcaaagggaatgcttccagtttttgcccattcagtatgatattggctgtgggtttgtcatagatagctcttattattttgaaatacgtcccatcaatacctaatttattgagagtttttagcatgatgggttgttgaattttctcaaaggccttttctgcatctattgagataatcatgtggtttttgtctttggttctgtttatatgctggattacgtttatctgaatgctaaatgacgagttaatgggtgcagcacatcaacatggcacatgtatacgtatgtaacaaacctgcacgttgtgcacatgtaccctaaaacttaaagtataataataacaaaatttaaaaaaaaaaaaaaaaaagaaaatttggaaggcattggaagcagcctgcaccaagtcctggaagctagagagcgcatgggacattcaggggactgaaaaggtttagtgctgtaatagaatggagttcaagatagggcagagcaagagcctggaggggttgggggagcagaccatgatgataaaaaaattgacaggccacaaaacaagacaaattttaagtctcagtgacggttgttaatacgattttgaaataaagcaaatgataaatcttagaccgggcgcagtggctcacacttgtaaccccagcaccttggggggccaaggtgggtggatcatttgaggccaggagttcaagaccagttggccaacctggtgaaatcccatctgtactaaaaatacaaaaattagccgggcatagtggcacgtgcctgtcatcccagctactcgggaggctaaggcaggagaatggcttgaatctgggaggcggaggttgcagtgagccgagatcacaccattgcactccagcctagatgacagagcaagactccatctcaaaaaaaaaaaaaaaatcttgagagatgatatataatgatctatgatgtcccctaaatagtcaatcactctgagagcacctagcacctcacctcttgcatagggaagaggcatcagatagtgccattcttgcaatcaatgaagaggaaaaatacaggctcaaatattgctttgaaaaattctttacatagccaccagtaatatcaaataaaatgaatgaaacctatgattcattaagaaggaaaagaaagtgtgaataagttgactggaaaacaagaaaaggaataattaaggagccataataagaaaaacaaaacatgtgagaagaaagatgaatcaattaagctctgtagtaagattacacattaaaataaaagagactctcagattcagtttaaaaaagggaaacaaaaaaagcctaaagaaacaaactctctctccccagtccaattatatcccactttcaagagacacatttaaaacttaatcacataaagttacaaataaagggataggaaaatactgtgcaaatgcaaattaaaagaaagtgaggtgtcagtgttaattttgtcagacaaaataaaaattgaggcaactattaaatagatcaagaattacttttttacaaaatgataaaaagagcactcaatgaaggcatgaaaatcagaaaactttgggtaaacataaagcgtcgaaatrtgtaaaacaaaaaaattagagatatactccaaatatggtgttagatttcaatgtacaccactgttaagattttttcagattaattagacaaaatgtacataaagagcttgaattctatgacttacaaaattgaatatgtgcttacatatatatgcagtcatgtgttgcatggcaatgaagataagttctgagaaatttcatcgtcgtacaaacgttacatagggtacttaaacagacctggatggtatagcctactacaccccaaggctatatggtattgcctactgcttctagtctacaagcctgtacagcatgttattgtaggcatttgtaacacagtggtaagtatttgtgtatctgaacatttgtaacaaaaggtacagtaaaaatatggtattttaatcttatgggaccactatcatataagcagttctttgttgaccataatgaytgcattttaatatcacatttgaatatatacatatttgaaacccaaaacacagrataatcattcttttcaaatgtgcacagaacacataaaacacttagtcacatcacatactggctaacagagtaaacctcaatgaattccaacaaataaaaataagacacatcctgtggcacgaygcaattaaactggaattttctaataaaaaattgtaagaacagcaacactaaatctgggaaatttaactacatgaaattaacaataacaccaaaaatctcctgaagaactgagtttaaattgggaatcaaaactgcaattacagaccattcctaaaataacatttagaatattgtatttcacaattcctgggttggggccaaaaggatgttcagaagagaatttcgggctttaaataatgatgatgatgatgatgatgatgatgatgatgatgacgatgacatggtggcaataaaaccacccaacaaaccatgctaagaaatttacatccaggccaggtgtggtggctcatgcctgtaatcccaacactttgggaggccgaggcaggtggatcacgaggtcaggagatcaagaccatcctggctaacacggtgaaaccccgtctctactaaaaaaaccacaaaaaattagccaggcgtggtggtgggcgcctgtggtcccagctcccctggggaggctgaggtaggagaatggcgtgaacctgggaggcagagcttgcagtgagctgagatcatgccactgcactccaggctgggcgacagagtcagactctgtctcaaaaaaaacaaaaaaaaaaaatatcaaaaaaaagaaaagaaaaaagaaatttacatccaatatttcaatttataatcacagtgttgctgtgagatggctaatcatctgcatcttacagatttttaaaaagtgattcacaaaaaggctaagtagattattttaaatttcaactttattttagatacaggggatacatatgcagatttgttacatgggtatattacaactagatagtgagcataataccccatatgtagtttttttaacccacgccccacctcccacccaccccctctagtagtccatggtgtctgttgttcctctgtttatgttactatgtggccaatctttagctcctacttacaagtgagaacttgaagtattcggttttttgtttctacattaatttgcttagaattatgtgtggtctctagctccatccatgttgctgcaaaggacatgatttcattctattttatggctgcatagtatttcatggtgatacgtaccacattttctttactccaccgttaataggtatctaggttgattccatgtctttgctattgtgaatagtgccacaatgagcatacaagtgcatgtgggttttttttttttttggtataatgatcggtttttctttgggtatatatgcagtaatgggattgatgggtcgaatgatagctctaccttaagttctttgagaaatctctgaactgatttccatagtggccaaactagtttacattcccatcaacagtgtataagcattccctttcctctgcaacctcaccagcatctgttgtctgttgactttttaataactgtcattctgactggtgtgagatgatatctcatgatttttatttgaatttctctaatgattactgatgataagcattttttcatatatttcttggctgctagtatgtcttctttcaaaaagtgtctgttcatgtcctttgcccatttttaatggggttatttggtttttgcttgttgatttgtttaagttccttatagtttctggatattagacctttgtcagatgcacaggttgtgaatattttctctcattctgtaggttgtctttttactctgttgatagtttcttttgctgtgcagaagctcgttagcttaattaggtggcatgatctcagcttactgcaatctctgcctcccaggttccagcgattctcttgcctcagcctccagagtagctgggattacaggtgcccaccaccatgcccagctaacttttaaaatatttttagtagagatggggtttcaccgtgttggctgagctagattcaaactcctgacctcaagtgatctgcccaccttggcctcccaaagtgcttggattactggcatgagccatcacacctggtccatattttggttttaaaaatgtttttgcaactcttatctcattgtctccttttcccccaaaccttgggaggaaggtagtagaatatgttaatgatgcatattatcaaatatacatataacagcagtattgctatttctgaagggcaatatggcacaggggttaggtgtgtgggctcattaatctgccggggttgtggtctgactttctcagttactagctgtgtaatcccagacaatccactttacctctctgtgcctcagttttctcacctgttaaatggagaaagttaaaaatagtatatatctcatatggatattataaggataacattataggtacttatatgagaaaattcacctaaaacagaacagtgcacatagtaattgcttgataaatatgatgatgattattatttctattttagcatgggggcactaattctgaggaattgagcactcaatgaattcaatcacatttattgagtcccttcaatgttccagacagtgtgcaagagttatggttgatggtgctcagaggataatgatggagacagggacaaaccagatcattcttatttctgatgtggccaaagtgcaggcaaagacatgtcagggaaatcatgggtacaccgaggagggcagacmgtgtggggaggggcgtcctgggggaggtggctgttgaaagcaggatattccaggaaaccagtctggatggtggtaagaggtgggaatgggcagagggatatgggctcgcaggggcttgcaggagctcacaggggcttggaagaatttgctggaggtggcagaagaggtgatgagcacagtggagtcaagtctgaggcagggatgaactgggacaacagagaggggcattgtccagttcagaacctgagctctcttgttcttttttttaaggagcacaggtgatccttaaagatccaagagtgaattctaagcaagggagggtttcagttgtctaagcaagtcctgcaatcaaaggttccaggtcagcaaggccaaaggtgacagcaggtcctcatatcctttctggagaagctcggagtactcaatagcccacacccactcacttctcccttctcacggggacactctagtccatgtcctgtctgcctacctccctgcctcccctcgccagtggccctgcacccaggcgtgactcagttggcccagatgaactctgcaggctccagcaatgccatggttacactgatttcaaaacaacatctggaattgtcacttcttgtttttgttgcaattgcttttggggacttggccaaaaattctttgccaaagcagatgttgacaagggtacttcttaagttttcctctaggatttttatagtttgagatcttatatttacgcctttaatccattttgagttggtttttgtatatggtgaaaggtaaggttctggtttcattcttcakcatatggctagccagtttatccagaaacatttattaaataaggagtcctttccccattgctggtttttgctggcgttgttgaagagcagatggttgtaggggtgcagttttatttctgagttttgtatttcgtttcattggtctgtgtgtcattttctataccagtgccatgctgttttggttactgtagccttatagtatagtgtgaaattgggtcatgtgatgttcttctgttctttttgcttaaaattgccttggctatgtgggttcttttttgattccgtatgaattttagaatagtttttctrattctgtgaagaaggacactggtagtttgataggaatagcattcaatctttaaattgctttgagcagtatggccatttaaacaatattgattcttccagtccatgagcatggaatatttttccacttatttgtttcatttctgatttctttcagcagtattttgtagttctccttgtagagatctttcaccttcttcgttattcattttctttgtggctattacaagtgggattgtgttcttgatttgacactcagcctggacattattggtgtatagaaatgctactgatttttgtacattgattttgtatcctgaaaccttgctaaagttgtttatcagttctagcagacttttgttggagtctagggttttctaagtatagattcatattgacaacgaagagagatagtttgacttcttcttttcctatttgtatgcttttcatttttttcttttgcctgattgctctggctagaacttccagtactatgttgaataggagtggtgagagtgggcatccttgtcttattccaatcctcaaggggaatggttccagctttttcccattcagtatgatgttggctgtgggttttcatagatggctcttattattttgagttatcttccttagatgcctagtgtgttgagagattttttgggttttttgtttgtttgtttgtttgttttcatagacagagtctcactctgtcacccaggctggagtgcattggtgcaatcatcgcgcactgcagcctcaacattctgggcctgagtgatcttcccacctcaacctcctgagtagctgggactataggcacatgccatgcctggctagtttttgtattttgaattctttttttctttctttttttttttttgtgagacagagtttcactcttgtcacccaggctggagtgcagtggtgcaatctctgctgactgcaacctccacctcccaggttcaggctrttctcctgcctcagcctcccaagtagctgggattacaggcatgcaccaccatgctcagctaattttgcagtttttagtagagacagggtttcgccatgttggccaggctggtgtcaaaatcctgacctcaggtgatccacccacctcagcctcccaaagcactgggattacaagcatgagccaccgcgcttggcctagtttttgtatttttagtaaaaacaaggtctcactatgttgtcttggctggcctttaactcctgggcttaagcaatctgccsctcttggcctcccaaagtgctagaattacaggcatgagccactgcacttggccatgtttaggtgtttattattattattgttattaaggaatgttgaattttatcagaagtttttttctgtgtccattgagatgatcatatggtttttgcttttaattctgtttatatggtaaatcacatttattgatttatgtatattgaaccaatcttgcatcctaggaataaagcctacttgatcgtggtgaattaacattttgatatgctggattcagtttgttgaggatttttacatctatgttcattaggaatattggagtggggttttcttacttcattgtgtctctgccacattttggtattagactgattgtggcttcataggataagttagggargagtgcctcctcctcaattttttggaatagtttcggtaggattgataccagttctttgtacatctggcagaatttggctgtgaatccatcttgtctagggcttttttttttggttgacaggtttcttattactgattcaatttcagtgcttgatattggtctattcagagtttcaatatcttcctgattcaatctttggagattgtgtgtttccaggaatttatctatttcctccagattttctaatatgtttgcatagatttgttcacagtattctctgaagaatgtttgtttgtctgtgggatcagttataataccatctttatttacttatatatacatcttatgtgtgtttatgtgatctatgtactatgatataaaatgtaaattcttactgtaagtcaagattttttttaatttttaaaaatttttaaaaattatttctatttatttattttttgagacagggtctcactctcttgcccaggctggagtgcagtggtgcaatcctggcttactgcagccttgactccctgggctcaggtgattctcccacttcagcctcccaagtaactgggattacaggctccctccaccgcacccagctaagttttgtatttttagtagagatggggtttcactatattggccaggctggtcttaaactcctgacctcaagtgatctgcctgcctcagcctccaaaagtgccaggattacaggcatgagccaccatgcccggcccttctctttttaaatatagctagctgtctatcaatcttatttattttcttgaaaaaacaattcttggtttcactgatcttttgtttggatttttgcacctcaatttcattcagttcttctctaattctatttatatctttccttctgttagtgttggggttagtttgttctttttttgttctagtttctttaggtgcaaaggcaaattgttaatttaacatctttttaatttctcgatgaaggtgtttagggctctaaactttcctcctaacactactttagctgcatcccagagattttggtaagttgtatccctattttcattaatttaaaagaatattttaaaatttctgccttaatttctgtgctcatccaggagttattcagaagcaagttgtttaatttccatgcatttatgtagttttgagaaascttcttgatactgatttctatttttattgcactgtggtttgataatgtgcttggtatgagttcaataacttatttgaagttattgagacttgctttaggacttaacatgtggtctatgttagaatatgtttcatgtgcagatgagaagaatatatattccgtgattgttgtgtggagttctatagatgtctagtaggtccaactgttcaagtgctgagtttaagtccagagtgtcttcgttggttttctgccttgatgatctgtctaacattgtcagtggggtgctgatgtctctcactattattgtatggttgtctaagtctttttgtaggccaagaaggacttgttttatgaatctgggtgctccaatgttgggtgcagtatatatttaggatagttaaattttcttgttggattgtatcctttattattatataatgcccttcattgtcactttaacttttattggtttaaagtctgttttaaaaatagtgactcctgttcttttttgttttccatttgcatagtatatctttctctatccctttattttaagtctatgggagctaygtgaaataggtctcttgaagataataaatggttgggtcttgtctttttatccagcttgcccctctgtgccttttaagtgggaacatttagtccatttacatttacaaggttagtattgatatgcgtgattttgatcctgtcctcatgttttgatcctgtcctcatgtcctcatatagctgattgttatatagatttgattgtgtagttgctttatagtgcctgtgggctatgtgcttaagtgtgcattttgttttttttttgtttgtttgtttgtttttgtggcagtaggtattgttcttttgattccatgtttagcattcccttaaaaatctcttgtaaggcttgtctagttaaaacaaattccatcagcatttgcttgcctgagaaggattttagctttctttcacttatgaaacctagtttgctttacttataaagcttagttagctatatgcttaagtgtgttttctgtggtagcaggtgtcatccttttaattccatgtttagcactcccataaggacttcttgtaaggctggtctagtttaaacaaattcattaagcatttgctagtctgagaatgattttatttttccttcacttatgaagtttagtttggcaggatatgaaattcttggttggaatttctttgctttgaaaatgctgaaaataggcccccaatctcttctgacttgtaaggtttctgctgagaggtctgctgctgcctaatagggttctttcagtttatgatttaccctactctctaattgcctttaagattttttttttgtttgcattgaccttggtgagtctggtgactatgtgtcttggtgatggttgtcttgtgtagtatctagccagggttctctatatttctcatatttgcatatcaacctctagcaaaattagggaaatttttggggactatatcctcaaatgtattttccaaggtgcttattctctctccttttctctcaggaatgccaatgaattgtagatttgatctctttacatactttcataatttttagagattttgttcatttttcttaattcttttttctttccctttatctgattgagtggattcaaggaaccagtcttagagctctgagattctttcctcagcttgatctattctgctgttgatatttctgattgtagtatgaaatttttgtagtgagtctttcagctctagaagttcagtttggttctttcttaaagtggctattttgtctttcagctcttgtaacattttactggattccctggattgattgggctccaactttctcaggaatctcagtgagcttccttgctatccagattctgaattctatgtctgtcatttcagtcatttcagactgagcaaaaaaccattgctagggaactagtggactcatttggagataaggggacactggctttttaaattgccagagttgtaactggttctttcccatctgcaagggttagtgttcctttaactgtggtgtaagttgattatacttagttggctttgtttctggatgttttcagaggatcagagctctgcacaggatctttatgcttgggtgaattcttgtgtttggkttcacagatgcatatattagtaggataatttttggtgttgcagcttaggctgtgatccagtagatggtgtggaagagtgatggccaatagctaggctgatagccagtcacactactcttttgtatctcctcatgttggcaggtgtgctctgcagtcgggggtggagacaaatggccccttcaccaggtctgctcatgagccttggggagacccttttgatcaccagttatgtgcccgtgtttcttttgttaggtgttccaggatgcagggccccctctgggaaaggctgtaacaggaagatgttcttcaccctttctggattgaccctgtggagggaggcatagcttgttcccaccctggcccgggaacccatttgtctcaccccttgccacactctgagggtgggggatcctccctcactcaagtgccaaccacagatcctggctttgtattcctgagctgctgtactgtggccctggggcaccagaacatcccatggctctgtctgaatccatggttggattctggctgcactggggattctatgtgctccagatcaccaggaaagtactcaggtggagcaatgcgctcaggctgggccaaggaggctgtgctgtgcacctgctcctgcagggtggctaggcatgggccctgggaagggctagcatgtaggaaggcttgcagaacagatgtgcatcattcccagggaagccagccctgctctctcctggctggaaggtcagctggggccagcgcctcccagaggggaatagagagtcctgggggatgaccatctgtggctgctctctgctggagctgtcctgtgcacacaaactcctcagctccatgctgtctgaaggcctgtctttgcctgttccctggggagatccccctccagctcccacgtccttgtgtgatgcagggtcccctgtagctagaatcccagaggctggtggcaagagtgaggcatccttcagttccctcactcactgctttcccaggagctgtttgggccaggaactagcctaatagcgtttgggtacccctgcagggttcccagcttcttccctcttcagcctcagcttcagcatcacttctacccacccctggctttttctttttgaagagctacccaaattatggtggcttacttgatagtttggtctctctcagtgggagcaacacatcctggctgcatgtagtcggccatcttgtttccgcctcctgctgtctttgaggaatgctcagccaccatccagctgggccacatctgtctgtcttagcagcagcagcagcagcagcagcagcaggaggaggaagacagcaatgatgaggctgcctaccgagcattcatgaggacctccwatgagaagaacccaaagctgttagcatccctggctgctgaataggtctactgtgcctggcaccccaagcagccctccttacagccttgcagccaagcctcttccagcctccctcctctccactgcatactaagtagatttcttcaaggtcaggcatagtaaattgttggagtgggattgacacctaggtctacttaggctgtaaagctacagcatgtaaccacgacatgatatgctatcatttctaaaatagaataaatttaaggaaactaaatattcaattcttgaagatagaaaaaaaataaaacaawtaaaagcaagaaggagaaaagtagctaaagcagaaataaatatgttggaaatcaaaccccaaaaagcagatgttttcactgcttctaagaatgagtccttggaaaggactgatagaacagatagccctcagtgaagacaaagcaaggcaaacagaaggggaggccaacagaaatgcagagcactggtcaggagagcatatgcacagattttagaaaatatttaaaattatgagtctgtgatggacaactttatactaacaaacctgaaaatctggatgaaagagtacttttatgacaatgtaagtgatcaaaattaacagaggaaatttttttaaaaattaaaatagaccaaccaaggaagtaatggaaaaagtttcaaagaactacctaaaggggatgccaggaccaaaaaattttatggaaaaaatatttcaagcttttaggactaggtgtactttaaactattaaactatttcagaaagtaaaagaaatgtccagcttctctttgctctttttataaaacctaagacaacccaaatgagatggcagaccattcctatttgtgaatatagatataaaagtcctaaataaaatgttagcaaactcaatccagttatctattgaaagagacgcacactgtgatctaatgggacttaaaacaataacaaaatataagtagctcaattgtaagaaaggcattagtttatttcttcattttgacaaatcaaaagaggaaagacacctgatagtgccaaacagctaaaaaagcatttaataaacaaccacccrttcttgatgaaaatgcttccaaaattatcattagtaacatgtatttccttaatatgataaaaaaattatgtctcaatatatcggtcaacattctacatactagaaaacactgcaggaatttccattaatgtctggaaagagaaatgaaaatcctgtattgtcatcatgatttactaaggttctagaaactttagtcagtaaaattagaaaacaaaatgaaataagtgacccaaatatttgtaaatgaagcaagtttgttaatgttcagaggttacatgattgaaaattcaaaataacctactgaatagttattagaattaatatgagatctgcaagtttgcaagttatgaagtaaatatacaaaagtcacttatgtatatacaaagactaaccaattagaaaatatattttacaaataattcaattcaaaatagaaaaaaatgttccggaaaaatgtaattaaaaatatttagagcccaaataaagaagagtgtaaaatgttattgaaagtctgaaaagaaaatttgaacgaatatagaaacaaaacaacaattttctaaaaagtccctggatgggaagactttctcccctaattcatctataaatgcaaagcaattccaatcaaaatttccaccagacattttagaacctgataaaattatttcacaactactagctgacaaaattaagcataaatttctattttgttcctgcaaatagcaaatctttattttctcatcataattgagacgtgattgttgtaaaaagaaatcaagtgtaggaaattacgcagaaaggaaagactccttgtaaatatcatcccccagcaccttgctgtaccttcccaaaaagttattaatagtttgattttattgatgcaagtaagttttttgtaaataaaactcaactccagctattttatgctttttcagctttacaatatattgcagacatatttccatatctatatatgtatctattttattgttgtgattggctgcatggtattccatcatacaaatgtatcataatatatttaacaaaatctcccattcatatacatttaggttttttctcctcttttactgtttttttgagtaacaatttttttttttttagtccatactacgtgcaaggcaataagctaagtatctctcagaattattttctttagccttcacggtcgttagcattgttacctctaagccataaaggtgttaaatactttgcttaagttgtccagatactaagcaacagatctggcatacagagcaaggtcaatttcagagcctaagcctttaagcggtatatttataattctgcttgtccatcttcccaattattaacaattactaattaacgacactgtgtggacatccctatgtgtagctttgtgcagttgacctctcatttcattctgcagtgacattgactgagtgcgtcctaagtgtgaagtcctgctgtgggcactgggattccatgaggaatgagctttagccagtctttcaagaacaatgatgagtggatatgcccttatctatctgggtggaaatgcctttatttatctagctccttcttgcgattgactatatagcaggcctttggaggtaatatattacctccatattggaggtaatatatactgattgggaaatccctttcctgacttatcctgtgccccaggggcctggatcttgttgaggcccacctgatgccccgctcatgcctgtgcactgatggttaggttctccttccaggatgctgaaagtgcaatggtccctgtgaggggcttctccaggatcttaaggacttttctgaggagcagcattgagaatcttcyctgatggctcttgacttgtcttctgctctgaggtcagcccactgtggctccttgtcactctgatgttggttggttacctggagtgcatcattctgtggtcctagctgagatggtttccttgagaacacttcacatgatgttggtgcaggaaaagtctgttggaaagggcctctgaaacaytcatctgccrttcattcactgaacatgcaaatgccccttctttgtgtcaacccccatcaaagctttggggacaaaaaatgaatgagactatgtctatctctcctctccaggaggtaacagtatagaggaagaaagataacagatatgaaactaacttcaacacaacttgcttaaattaccagttgggaaactgaggcccagagacactgtcttcctagtcctgtgtacaatgtatagagacatacacagaactactcccagctgcagatccaatggaatcctattaaagatacttcttttttttcgagacagggtctcactgttgcccaggctggagtgcagtgctgtgatttcggctcactgcagcctccacctcccaggctcaagcaatctctccatctcagcctcctgagtagttgggaccacaggcacatgccatcatgctggctagtttttttgttttttgttttttgttttgtatttttggtagagacagggtttcaccaggctgcccaggctgcccttgaactcctgagctcaagcaaatcacccacctcggcatcccaaagtgttgggattacaggcttgagccactgtaccccacctaagatattcttttagaaagagaaagaaccatacatttcttcatttcttatcattgagttattctttaattgacaaagacaaaaattaccccctgggctagagtgaccaaactttaaaaattgcctttgatgtaggacactgttggagaattcagcaatttgaaacacattttaccagctagttcttctctctccatgtggttatttaccctcccaaagatctccagtgagttaaatgtattttatccrggtggaaatactgtggcctttcctccggtaggttagctttgcctagcacaaaaacaggcacatgacagtttctcaacaagtgcttgttgaatgaaaaaaaaaaaaaaatgaaaaggaaggaaggaaggaggaggaagggagggacagactaacagatcctgcttcacagtacatattctgcaagttttttgaacttctttaaaggagaggaactatccatttcttttcaattcagctctatccttttggctctgcattttctaaataaatgacagctctgccatggtaaaaacatatactgataactatgatgatgagtcagtcctgccccactttttttttggcacagtgtccttacccaagatgtgatggggagaccccttccagatctagtattctgtggaagatataaccaaagaacaaatacactagctctgttggggaggtgtggggaagcctccagggagttggagagcagttttctagggagctgcagaacttctcggtttttctgcttggragtaaaacaactgatsgcattagcttagccatgttagaaaccttcattgtgcttcccccccggaatcctctggaggagacccacaaggctgtcttgtggagggcccaccagaggcagagaaaatctggcaagagtttgacaagtcgtcatagagcctggggaaagataagggaaagctcattagttccaacctttcgaaggcagctggactggaggaatggcatgggcttgccccccagctctgctgacatttggttccattagggagcaatagctggttccaatgtcctgagctcaattactgaagctaagctgaaccatgtgaccacagcactgtgttttcaattattctctctcccttcctccctctcgatgccaggcctggagggaaggcaatctcccacagaagtccaattctggcttctctactacagctcttttgcaattrttctcttcctttaaaaaaaaaaatccataatgacaaggctcattttgaaaactgccttcactcttaaccaaagtgttaatgccttgccccctggttcattgccatctcccatcccatgggccctgccatcccacatgagagcctaggtcatgaaagtggtgattctcttgggaagagcttgttttttcaaagctgccggtactcatcagacactcctgcaaatggtgcattgggattagcacagtttccaccaaggaatttgatccctctgttctcttaaatgctacatgcagccaactattccaccactgagtgaagcacacagccttgcacctagccccaaaggcccccaaatgtttttttgtcctggaaaatgcctagtgagtgaccttactattgctgggacagttattgtacattggaagaggatgtggaagggaaagggaattgggtttgcattccaagaacccatgcagactgtggcaattcttggtgggacaagaatgcgagaggctgttataccagaatctgacactggaggatgaagggggcagagttgaggccttgactgggtatgatggcttctctcctaggcttggggtgggataagagagtttcaaaaaccctctcggcccttggatgtcactgttttccatgccttatgccagcaacggcaaagagaagagctactattccaggagggttttttttttttttttwaagcaaaaagaaagtcttttggtttgcataactgcataggtcaatgcagtttcaggcatggctggatctagatgcccatatgataatgtctgaactcagtccctctcagattttctctctgtcctccttcctttatctctacctctctccccacctctatgagttctgtaccttctgtgttggcttcactcacaggcagcctctctacatggtcgccctcagcatccccatgtttatatctttcctgtttagcaccagcaaagtccagaaggattttaacacagcactgattatcttacaaatttccaaatgcctaatggaccagtgttagctgtgaccaacacacactcacagacacacacacacacacacacacacacatacccacacacatctttccctgtgaaaccctggtgaactatggaactcctaaggaagtgatcaaaatggaaagaagtttggacatattaatatttatagcgacatttgtgtggagagttactagttttgggaagtggaattggcaggatgcagagaaactcttggattggggatgggggcagaggaacattcacaatttgcatttggaagatgacatctggaactaaaggcaataatgaggtaaaagagaaaactactctaaaagcttaaaacgtatgtattcttctgccaatggatctgagcattgatatactggttaacaaatcctctcaaaatgcagcaagctttttaaccaagcakatttggcctctggactttggttcatggcactggggtttgtaaaaggcagacctgatacaacagtttcagtggctgtagggaaaggaagctgactctgtgggctgaggcttgaagaggaggtaagcatgaggggaggaagtacaaagtgcagaacattttctcaagaagacatgaaggggataaaggaaaagcaagtgacaagaggaggacatggagttaacatatagtgtttgaaagacagaaaatgtttgagtgtgttcatgtgctgaggataaagatccagcacagaggaagagactgaggctaaaggtgagaaaggcaataatcaatgagacggtagagccagggtaaagcatgcaggcttaagagccagattgcctggtttgattcctgcttttactgagtcctagctgtgtgatcttgagaaagtcacctaacctctctgtgccttagtatctcttctgtaaaatgaggatattgatggaggctaccacagagtttatgagaactaaatagtaaagcaatgagagcaatgcctggcacaccatagtgaagttttcaaacagacattgttggaaatgtgttatcaagctgattactgaaacagtactactgttggccagagctggaggcccagttggtggccacgaatgtttcatgataccaatctgttcaggagtgagagtgtctccttcaaggcttagagacccacagtcaggcatgaactctgcagaggcttggatttgtctgtgattggagttttactatcatttgagatggaaggacatrgagtacaaaacttaggcatgttgacaagagggtgcttgataaaatggatcaaaaccgaattaatttatactaaagcatcaaacacagtgcctgatatattgtagactttcaatcaatcattaattcatttttgtttattgctattgattactgggatggttggtgaataaattgataaaatcaaagagctaatacagaaaacaataaatgtgtgcaattcgagtgctgaaaaacagtctatttttaggcagaaattctccttttggaggatatgtraaagggttttgatgtaatgaaatgttattaggtctctgctattccttattcaatactggatgtgcgcaaacagcagtaccaatgggccaagagcatcccacaatttgttgttctggccacagcctctcttttgtggcttgggcctgagtcagaactttttaggatacagcatcagggctcctttcaccacctgcttcatggaaactgaatccatgggaggctcctcttggcaaagctgagccaggatgttggcctgactggaaagcccatctttggtctctctggctgtgagagtttgacccagtggggataggtgatgaagcaggagcccctgggcctgactgtgactctggccaagtgtttgactttaggcctggagaaaggcactcatgtttgccaggagcctgttatgtgctcatccctttggcaggcacttgccaagtgtcaccttcttttatgctcacatcaactctggcaggtcagtgttaggtaagacttccaaccttcctagccttgggctcttcatctgtcaatggaggacataagacatcagtggtcttcagactcagctccatggattctggggtttctttggagatgccatgggagttatcaagggtgaagttaccaaggggaccaggaaagtggaacttagttttggttttcccatctttggtctgctctatagactggagttcactgcacacttttgtttaaagaatggcttccaagtttaaaaacctcacaaagtactggcctctaagatccctaaactgtctcctgtaacttattactggctcttctgctagtgccttgggttggtacttcccctctctgcacctcagttcccttgtctatagaatgagaagctctggggctaggtctccaygacactgggagtggagtgggtgttaaccgcttgggttaactgagccccatttggctggcacactggaagggccagtgatcttaaaggatgatctgcccatctgtcctgcttcacgggcaccaagaacccgtggctcagatccaggactcgtgtgcagctccacttgtcagcagcaagtcacattgcttcttcccatttcctctttcctctagggactcatgaagtggcagctaagccctgtccagtggccacccgtcagccaagggccagagaccaggaaaggaagaaaggcagcttcacttcctctttgaggatggagtcgcacagccgcgctggaaagagcagaaaatctgcaaaatttcggtccatctccaggtccctgatgctctgtaatgctaagaccagtgatgatggctctagccctgatgagaaatatcctgatccctttgagatttccttggcccagggcaaggagggaattttccactcatctgtgcagctggcagacacatcggaggctgggcccagcagtgttcctgatctagcactggcctcggaggctgctcaactccaagcagctgggaatgatcgaggcaagacctgtaggaggatattcttcatgaaggtatgcccaggctttgcaggcctgaactagcctgcagttggtttctggtgctgtgaattaaagtctttgaatccatttattcaaaaatcatgaagctgcagagttataattctgaaagagagcaagaaaaaagttgaggcagggcccactggaactrtaacaatgagtatgggagtgaatcaggctcagttaacactcttgcttgagaggttcagggaagcactatgtcactccaaggtaaactgagcctagatccctgatggaaaatgccagatgcagtagtcaatacactgggaagctcttttctctagacaggcattatagagcataccataggcaggccaaatcacatctttcttgtagacttatagaaacagacttatagggcctgggcagagaaggaggccttatggcaagcaaggtaaggggtgccggatgagtgagtttgttccctgaatgctgactgtgaacattttccaggtaccttctgccattttcaacataggtgtagatgctgaaggtggcaagtggagccatcaataggggagggggaaataagcagtgtctggggacctgccagaattcagaatgttttcctttctgttatatcatatttcaatttttgtcatcataatgagatggagattgcagaataccagaaatctagaccaagtaaaatattttgctatcaagtgctgtggcttctatcaaaggtgagatttttcaagagtccagatggccctaaaccatgggrtcagtgctgctaaygcagtgataagccaacatacagacatttctcctatagcctactgccagtctatgcatttaaatagggaagacattccagtacctttgaaaggggtctgtcacctctgtacagcttgccttcttcaggagggaaatcactatttaacacacataataaacaacatttgtgttaagggccttaaggactccacagcatccttaagagcctcacccagcccagtctgctctataacccatgatgtgacttctattaatatgtcctgcactcacttaattgggtagaaggagaagccatcagcccagtgggtttgggggaggctcgccaggctcccaggctgccattaatgatgtgaaaaaatctaatccaccaactgagagtcaaatttattagtgacattatgaatgtatctagattagcgctcacctaaatgaaattcaaaaagtatttcaagacctcagcagaatcctagaatggattattcacatgcttcctcttaatatcataggtatttcctgagcacctattatctgcaaggcacagtgggggtccagtctttgccccgaaataactcacttaagatagagtgaaaaatacactacaagaggggtgtaggagggctgtgggaggctcaaaggaaaaaggcatcatgtctctggggatgctgtcattccttccttcattcagtaaatacttaagccaggcacgggagtgagcaaaacagactcagtcctattgcaacttttattctgatttggggatrtagataataacaacttgatatataatataatattatattaagtagtgaaggactatgaagacatattaagcaggataaggggatagagagtgatgaggaggggttactgctttttattgaaaaggtaatcacaaaggcttctctaaagatgtgacattttggcaaggacctgaatgaagtggaggggggtgcatcacgtgcccacctggggaagggcattgcaggcagtgggaacagcatgtgcaaagacaggaagcaagagtgtgcctaggagcatcaaggagaccggtatgcctggggtaaagaggaaagaggaggatggtagaagaccaagttgaggtggcagccagggaccagaacaagggctgtggcaaggacttggagttttattctacgaaggatgggaagccatgggaggattttgagtaagaaagtgacatgctcagattggtgctttaaaaggagcactctgactgctgagtggagaatggagtgtagggagaccagtgagggggactgcagcaataacccaggccagaaatgacgtggcttggactgaggtggtggtggtagaggcactgagaatggccaaggtagggatttgttgatgcaaggatgtagcatgtgagagaatgagagaagtaaacttcaactgcaagtttcagcctgtgagcacctgggggtagaagtttcagcttgagcacctgggggtagtaggggaaggaggtgccctgtcccaacatgcaaaacaggaggggctggaaaaatggtcaggaaaatggtgagttgtgctcttaagggtgcgcagttgtactaagcagaggtggaggggagagaattccaggcgaagggacatgcgtctgcaaagacaggcgaggagaggtctgaatgcttatgctggggtctccgggcacaggtgagcacgtctatcactctgtccttgtacctattccacagcaggaggctggatacttgagaatggctagatggcatggggaaggagtgggcatggggagggacccgggcaggggaaagaacaaacttcaccttttcatctctttgtgattcacatgtacaacacatttttttttttttttttgagacggagtctcgctctgttgcccaggctggagtacaggggtgcgatctcagctcattgcaacctctgcctcctgggttcaagtgattctcctgcctcagcctccagagtagctgggattacaggagcctgccactacacccagctaattttaaaaatatttttagtagaaatggggattcaccatgttggctgagctggtttcaaartcctgacctcaagtgatctgcccgccttggcctcccaaagtgcttgggggagtgagccaccacacccagtccatattttgggtttaaaaatgtcttcacaactcttatctcattgtcttcctttcccccaaaccttgggaggaaggtagtagaatatgttaatgatgcatattatcaaatatacatatactaatataataatagcaatattgctatttctgaagggcaatatggcacaggggttaggtgtgtgggctcattaatctgactgcctaggttgtggtctgcctttcgcagttactagctgtgtaatcctagacaatccactttacctctctgtgcctcagttttctcacctgttaaatggagaaagttaaaaatagtatatatctcatatggatattataaggataacattataggcacttacatgagaaaattcacctaaaacagaacaatgcatgtagtaattgcttgataaatatgatgatgattattatttctattttagcatgggggcactaattctgaggaattaagcacttaatgaattcaawcacatttattgagtcccttcaatgtgctagacagtgtgtaagagttatagttgacaatgctcagaggataatgakggagacagggacaaactggatcattcttatttctgatgtggccaaagtgcaggcamagacatgtcagggaaatcatgggtacaccgaggagggcagacagtgtggggaggggcgtcctgggggaggtggctgttgaaagcaggatattccaggaaaccagtctggatggtggtaagaggtgggaatgggcagagggatatgggctcgcaggggcttgcaggagctcacaggggcttggaagaatttgctggrggtggcagaagaggtgatgagcacagtggagtcaagtytgaggcagggatgaactgggacaacagagaggggcattgtccaattcagaacctgagctctcttgttcttttttttaaggagtacaggtgatccttaaagatccaagagtgaattgtaagcaagggagggtttcagttgcctaagcaagtcctgcaatcaaaggttccaggtcagcaaggccaaaggcaacagcaggtcctcatatcctttctggagaagctcagagtactcaatagcccacacccactcacttctcccttctcacagggacactctagtccatgccctgtctgcctccctccctgcctcccctcgccagagtggccctgcacccaggcgtgactcagttggcccagatgaactctgcaggctccagcaatgccatggttacactgatttcaaaacaacatctggaatgaggccctgtgatgttagcctctcctctggaaacgcctaatataaaaattaaagaagaggaagttatataaacagccaacttttttttttaaagccttattggatgggttgtgtttggcccagaaaagactgggtaaattaatgccccaggatgtgccaaagcggggcatgggcgtgaagaatccaaactaattaagcatttgaatctgtgttgtgcatgaaagtactgattagggctgtttgttctgggggagcttctagacccctggagatgaattcaaatgggagaatgtcaaaagtcaggcttcctaagttaataaacaaaagcaaatacaatttatcagacttagaactttgaaagaaggaatacagggacttactggctactccagcccctgtctgtttgcaaatgggaagagtatttttaaatgccctttaagtaggatgttaaggccaaatggaaggcagctcagttagagggaacgaaaggtcaaactctccctctcctctttcctctcttccttctcctttcttccttatttctttctctttcttcagacattggcagggacttgttatgagctgtcctctggagataaagaaatagatttgatattataccctcagggaacttgcagtctagagaagggggcaggtgtaagcatagttaattctgtcccttatctcttccccaacctgaatggcattccttgctcagttttcttaaggaaaggtctcagccagagaatgagtagtgggggaattatatcctacaaagagacttctaggttacctttcatttccctagaatattccacaataataggatttacacccttcattatggagcttccctagaaggaatgggtacagctaagatttctgtgaaatctaagcaatcttagaaatcagcaaatgagctctggtcaagctgactctcctgtccacctctccaggaggctcagtatacatgggtggcggacaaaggtaggattccctggagagttaaagggcatcagagcatgggggatgcaggtgaagacggaggtgaaaatgcagagggagacagtggaggaaggggagagaaagctggaggcaggagtgagagggatcactcctacatctcagaagtcaaacctggccccagattcacaaataaatcattttctggctgggcacagtggctcatgcctgtaatcccagaattttgggaggctgaggtaggtggatcccttgaacccaaggaggttttgagaccagcctgggcagcataacaatataacataatataacaataacataacatagcaacataacataacaataccttgtctctgaaaaaaggaaggcaagcaggcgggcaggaaaggagaggagagctgaggagaccagaggagaggaggggaggggaggggagatctacccaaggtcggtctgtctctctctctctctctctctctctctctctctctctctctctctctctctctctccctctcttaagacagggtcttgctttgtcacccaggctgggatgcaatggcatgaacatgggctcaccacaacctcaacctcccaggctcaagtgatcccccctttcagcctcctgagtagttgggactacaggcacatgccaccatgcctggctaatttttgtattttttgtagaggtggggtttcaccatgttgcccaggctgttctcaaacttgtgcattccagcaatccactcaccttggcctcccacagtgctgggattacaagagtgagccactctgctcggcctacccaaaggtcataaagatatttcctcatgttttttctagaagcttggttgttttatctttcacaattggatctttaattcacattaaataaatttttgtatatgttgtgagttagctgctaacttttttcctacgtgaatatccaatgtagtcaacaccattttttggaaatcctgtcctcaccccactgcatagcagtgtcatctctcttataagtcaaggatcacatatgtataggtctatttctggtttctctattctgatctattagtcttttatttttcctatttttgcacagttcaatttactgaagctttctaataagctttatgatatttggtcatgtaagtcctccacatttgttcttgtttttttttttttttttttttttcttttttttttcacatttgttcttaaaactagacttggtttttccgttggaatttttattggaattgctttggctttatagatcaatctgaagaagactgacatctttacagtacttgatattccagtccctttacatgatatatttctgcaaagtttgattggagatttttgttgttgttgtttatttttcagcatatccaatcrttacctaccatttctgaataagcggagctctatttctccccttccaatttttatacttttttcccctttattttacaggctaaggcctacagtgcaatgtcgaatagaagtggtgataacaggcatccttgtctcattcctaatctcaaggggaaagtttcattattattatgtctgtacatatgatgtttgttgtagtttttttgtagctacccttcattagattaaggaagtttgcctctgttcacaattggcagaggttttattttgcccgccacccccaccgccaacataaattgttgaattttgtgaaatgattttttcctgcatttattgagatgctcgtatggagttttatactttactttttcatgtagtgaattgcactaattgacttttttgaatgttgaaacaactttgtcttcctggaataaactcaatttagctatgatgtattgtccttttaatataactctggatttgatatgctaatattttgttagtaattgttgccacttgtgtttatgagagagataacctaaaactttcctttctggtaatgttttggtctggttttcaaactatgggtattttgacctcatgaaatgagttaggaaatactttctcttttccattttctggaatactttgacttacattggtgctatacttttttaaaatggttgaagaattcacctatgagccrtctgggactagagatttctttttggaaaggttttaaattatcactgtatttatttagtagaaataggactatacaaattttcaacttcttttgatatcagttttggtaagatgcatttttcttctgagaatttgtttcatttgaatttccaaatttattagcatgaagttgttaataaaaatcttatatttttactcaaattttgagatagttgtagatttacatgaagttgtaaagaataatagaaagatcctgtgtaccttttcccagttttccccaaaagtaacattttgcataactctagtacagtagcacaaccagcatattgattttgatgcaaaccattaacgttactcacattttctcagctttacttacattgatgtgcgtgtgtgtatacttgttattttttaggcattggtaaaaaccatagtgatgttcatttttcattcctaatattgatacatatgtcttctctttctgtgtgtgtgtgtgtgtgtgtgtgtgtgtgtgtgtgkcttgattgattcctagactaattgttccatagttaaagaagagaatgtattgcgaatgattttaatcactggaaatttgttgagaatatatatacatgcatatacacacacacacatatatacacacaaaaaatgtgtatatatgtctgtgtatgtgtatgcatatatatatctgtatatacatatatatttgttgagtgccatcttctatatttgtctattaggtcaaattccacaataaccattaatttgcatgaatagtcaaatagagaagatatttrtctacccatttcccctatgaatagcttgttagctattttcccaatcttttttaactttatcaattccagctctcaattatttgctgaaagaagcatgttaaagcctctcattattattgtagattggtctgtttctccttttagttctgtcaatttttgccttatatattttgaagctatactctatgtgcatagacctttataactttttatgttttcttggttgataaatgctcttacaatttcgaaatattcttttgactagtgctgatttttttctgaaaaattgtctgatactagtatagcttcaccactatcttttggtgagtggttgcgtggtatatcttttttccttctttatcttcaatctgtgttcacatatttaaagtatatcacatgcaagcatcatataattatgttgttcttccttcaatctttgtctttagaattgtaggtgtttacactatttacatttaatatcatttcagatgtgtttggatctatgtgtactctcttattatttagtgtctaattgtctcaagtgttttatattctgttttctctctcatcttgccctcttttggactaacataatttttactattccatttcccctatgattagcttgttagctataatttttttacttttttaatcattaaaatatacaacatacagtcttaatatattagtcttatataaatttgtactttttactagttctcaaataatgctaaaaccttaggacacacaactccatttatacttgcccactttttggtattattgtcatgcattttaattctacatatatttaaaactccagactatatcattattattctatagagtcaatattcatgtacattaatttaaatgtttacattttccattatttttcattccttcctgcwtttatgtgtttctcggtaagatcacttcctttctgcctgcagcaggctgcctctaatacaggtaggccctagaatgaaagtacacatgagatctacatgttaagtgtctaaaaagttataagtcaaggtaaaatatgttaaaaatacatgttctaccttcctaccttgacaaatataccttgataagaacttggatggccaagttcaactgatttcttggactcctcagagttttccactggaaggtgatggtgtaggaaaagccatttcatggctcctggctgccagctaggattctctttcttgtaccactctcagcactgttcatcaccactaggggccataaatgcatgtatgtgaacacctgtagttctctaatcactgcccccatgcccagtaaacagctaccctggtacctctccagccttgaactgtgcataccagtggtgtgattctccattgatagcacagacccagagaaaagataaggttgggggctgtgttagtccattttgcatttctataaaggaatacctgagactgggtaatttttaaagaaaagaggtttatttggcttaccattctgcaagctatacaagcatgggaccagcatctactcggcttctggtgaggtctcaggaagcttttactcatgatggaagatgaagagggaacagttgtgtcacatggcaagagagggagcaagagagagagaggagatcccagactctttttaacaaccagatctcatgtgaactcatgaccacaaaaagagcacaaagccgttcatgaggaatctgcccccagtgacccaaacacttcccactaggccccccctccaacactggggatcacctttcagcatgagatttggaggagacaaaacatctaaactgtatcaggggcacaagctctcctgatggagtctcatgcctcccatttctcaatttctctccagttgaatgtgagcaggtcacaaagtagacctggaaccccatgttttacgacacggtggagcacagaactgaatgagactgggaacggcacataataatggctctataaatgtttgtgaaaggagtggcattatacccataaaagggtataatgagaccacccttaaggcagagagtctattcacatggcccaaacttgcatttgtttatttgaatcaacacatggctttacactgaatattgctttgggcattcccattgggtgggatatggagttacaggacactcgatctggaagaaggacagcagcagatgagaccgaatgtgtgggaggtccccacttcagagctgccctcctaaaaagatgtgaaatgctttatccacatgagaatgacctccatagagtggaaaatcttgctttctttaaaaattcaaagtaattggtcagacagtgtcaccactcatatagcatgactcaggatttgatgaggtcagatcagtcgtctgaatctctggcatgtgctgtggttggagaaaaggtggtcaaggccttccttcagcagacaaaatcctttgctttgctgcctgtgagcaactcagcctgtggctttggggcctgggccttcttggcaagtgggaaacccartcttttggctgcctgcctcttcctgccgcagaagagcgacttatggatgctgagagcagccactgagagggaagcttagggctccatgactcccacagagccagctgtatcccctgagtgtgtgggaggatgagcagggaggcaagggtggtccatgtgcaggaagcaaggaggggctgcccacaggtatgattaatcttcacttgctgactgtctccccaattcaatgtgatttctagttgctgtttttattgccagaaaacattttgtactattcctgaaagctagttttaggagttggccttttgaatttcattagctctggcagaacttcatttggttagtgaagaggkgttaggtagaaaagaagaggagaataaggccgggcgcggtggctcatgcctgtaattacaatactttgggaggctgaggcgggtggatcatctgaggtcaggagttcgagaccagcctggccaacatggcaaaaatcctgtctctacgaaatacacaaaaattagccaggcctggtggtgggtgcccgtaatcccagctactcaggaggctgaggcagggagaattgcttgaacccgggaagtggaggttgcagtgagctgagatcgcaaccattgcactccagcctgggtaacagagggagactccatctcaaaaaaagaaaggaaactgggaagaagtagtaaaccatctacctttccaactctatttctcaatacggcccttcatttgtacattacaacccatgtaggcttctccctgttcttcacatataacccactggttactgcctccaagcctttgtccttgtggctctctgcctggaatatcttcctcactctcatctttatgaacccaagttttagttatcctctaaggctcagcttcagtggagcatccgccataaatcttttcctgatcctcctcttatcctgcacccttagtttccaccatccctgcttgaaacaacaaacaattaagaaacttayatattcccattgaagaatggcaactagctgcaggtaggaggaatttactgtaacaatttgtgtttccacccccagtttagaagaatgtctgaaaaaaggtttaaggctgcatgagattctatacatcacacacatgtatcatagtttattattttaagatcttcaaagtattttattaaatattgaacatataaaaatgaatttgtaagatgtatacacactctaaaaaataaagatgccctatacaccggtgtgtcaattatcaagtttaagaaacaaaccttaccrttaactttgagattatttgaatgttcctacctgatgcctttccattctcactcctctctaaggtaaccacttaattttgggttattattctcttgcttttctttatactttatyatacctgtttgtatatctgaatgttttattatttagttccacttatttttgattagcatttacatggtgtctattttttatccttttattttcaacctatttgttatgtttcaagtgagtttcttatggatggcatataattgggtcatttagaaatttttattcactctaccagtctctttattttattttttaattttatttattttatttatttatttattttgagacggagtcttgctctgtcacccaggctggagtgcagtgatgcaatctcggctcactgcaacctccgcctcccaggtgcaagcaattctctgcctcagccttccgagtagctgggattacaggcacctgccaccaagcctggctaatttttgtatttttagtagagatggggttttaccatcttggccaggctggtcttgaactcctgacctcgtgatccacccacctcagcctcccaaagtgctgggattacaggcgtgagccactgcgcccggcctagtctctgtattttaactggtgtatttaagcaatttatatttaaagtaataacttgtatgttagaacttaagtctgtcattttattatttgtttcctgtttgttccctttatttcttgttcctccatttattttcttttgccatccggtgtaatccttgaacattttaaagagttccactttgatttatttattatgcttttgagtatataactttttatagttttcatagtggttgctgtatatattaccatatatgcacataacttgttatgcagcctattggtactgacattttaccacttcgagtaaagtgtagaagtcttacttatatttagatcactttacttttctccatttcttaaatattattgttttaagtactttctctatatctattgaacacctcattaggtgttgttataacttttgccccaaccataaaatataagtaaaaaaactcataaagggaaagatgatctattatgtttatttatatttttactcattctattcttcttctttcctttccaaaggttccagacattttatcattttctttgtatttgaagaatttcctttagccattctttaagggtaggcctgctagcaatgaattcttttagtttttttttttttttacctgagaatatctttattttccatcattcctgaagggtagtttcaatagatataggatttatggttgacatgaatttctttatgcttaaaaaaatgtgtcctgacttctgaccttcatgttttcagatgtgaaatctgctgtcatttgaattggtgttcttttttttttttctttacaggtaatgtgtcatctttttgttatttaaacaaattttcttcatctttagtttttagaagtttaattatgatgtatctagttgttgatttatttgggtttattttagtttatcttttctcaywtgactcgtgaattctcagttcttgacattataagtgactcaattgtatcttggacattttgattattatgtgagaagactcttcatctgacttagatcttttgttttagtaggcagccactctgtttaggattagcatgtagttctggcctactcttatgagcttttgttacaatggcatttcagtgttcagagcccttgcagtgctattctggtatgcttcattttctggcactaccagtggtcttgctcaatccctgcagttctgtctactggggtgaaaagacctttcctgggctgcctggtaccactgggtgaccatctgctgcttaggtttggggacagaaaaaacctacagggcctgggcctctttttctactaggtggagagcagaaaaaaatgaagcactcagctgatgctgcccctgaagatgaactggaccacttgccagtgccccagtgatagagtggggctgagttaacctaggattttgctgctgctaaagtagacatatcagaccacatcttggcaccctggttgtggaacagaggctgggattccccactaggtctttgctggtcttcctcctttcctggtgttttagccaggctggcgagaacaggcttgtctttgtttgtttgtttgtttgtttgttkgtttttggctttgcctattggcagttctgggttgcaggcctctccagcctctagtttggggtagatagtagatagaaagaaaatccagggaactcaccctattgttgtttcccaagtcctgaggtaactaaccagttcattctgactttcagaatctttatattgttgtctattaaataattcccagggtatttagttgtatttagcaaagaggaggaaagtcagtctctaccatcttgtcctggaattggaagtctccgttcttcttatttgtgaacatgatatcaatgctattgcactgtgattcctctttggtaaatttgtttatgttattcaatattatgttccaggaattcattcatattatttcattttgttgtagttcattgatttttctctgctcttgagttttccattgtgtgaaaaccactcaatttatccattctactattggtggacgtttgagatatttcccctttcccctcacctactttaaattagagactatacttccatgggcattcttgtacatacctccagtggcatctgtgcaagttcagtagagtataaatctaggtgtggaaatggtgagtcaaagggtatgggaattttcatatatactagataaagccaaattattttctgaagtggttataccaatctacccttccatcagcaggtgtaagtttctttgttcctttgcatcctcatcaatccttgataacatcagattttaaactttctccaatctcagggcaatgaaattgtttctaattttagttgcaactttcatttccctgattactaataacgttgtacgtatataaaccttttttcatattttatagaaacttcaatgttatatactcattcaaacctttttctatttttcttttggcttgctagtcttcttccttcttttcccagctttctctattttctcccagcttttaatttgtcatttttactcttttaatcgatgagtagaagttcctaactttaatgtgggatttatcaatcctttcctttatactttatgcttttgtatcttattaaaaattgttaccatttcctaaagtaataaacattattttataatgtctattcttttttgttgtcttctaaacatcttagagttttgccttttgtgtttatgtttttagtctacctggaattgatgtctgtggggtataggggtacattattttttttccatacagttagcccattgttccagcgccctctgttgaaaagtgtctctttccccacagatctaaagtattagttttgtcagaattcaggtttcctcttatgaacatggggttgtttctaggctctctattctattccatttggtcagtttttaagatttgtatgccaataagccattgtcttaatcactatattttaaaacaagtattgttctcttgtatgaaagtatctccttcctagtgtttatttagatatacttatttatttgaggccctttgcttcttgataaatatttaaggataagcttaaatctaaaaaaaaaagacttgaaagtttgatactgcattaaatttgtagataaatttgggggagaattgacatctattaagcctaccactttaatagacatgatatattgctgcattattcaggccttatttaatgtatttcagcaatttttataattttcttcagcaagggcttacatatctttcattagattagttcccaggcattcctcattttctggtgcattgtaattcttatctttttaataattctatttatgaactgctatttgctggcatatggaatgcaatttttaaatagttattttaattaaacattttattttgcaattatggtagattcaccaaaagtcacaagaaaacaatacagagaagtctgtgtataatccagtttcccccaatggtaacatcttgtaaaattatagtagaatattactgatgttgatgcagccagtatatagaatatttccatcatcgcaaggttccctcatgttacctttatatagccacagtcacttccctcccaaccccacctccaccttttctcctattttttctagaagtttcatagtcttacattatacttgtaagtccattttgagttaatttttgtgtgaaatgtgaaacttaaaccaagctttttttttttttctctcctgtggatatccaattatagcaccatttgttgaaaaaaactatcttccattgaattcctgctgcatctttgtcacatatcagtttggtatatgcttcaggcttatttctgtgttctctattctatgtatatctcttaccaaatatcacacagtgctgaattctgtagctatacattaagtcttaaaattgggtagactgattccgcccattttattcttctatttcagtcgttttagctaatgtaatccctttgcatttacatataaattttggaataattttgtctatatctacaaaaagtcttactgaagttttggtaggaattgcgttaaaccagcatatcagtttgggaagaattaatctttactatgctgagtttttcaatctatgaatatggtatgtctctgtatttatttagatcatctttcatttctctcattagtgtctttgtagtttgtagcatacaagtcctatacatgttttgtcagatttatgcctaagtattttgctttcttttgagtgattataaatggtatgcattttaatttgggtgtccaaatattcattgatagtagatagaaatacaattgatttttgtaagctaattttatacctatgaattactgaaactcattagttctaggcattgagtttttctgtgtagacaacaacatcatcaacaaacaaggacagttttatttcttcctttctgatctttatgctttttattttcttttgtttccttattgtagtaagtagaacttccagtagtatgttgaatgagagtgttgagattgggcattctttctttgtccccagtcttggtgaaaacgtttagttttcattattaattatggttttagccacaggttttttgcagatgttctttatgaggttgaagatattctcctctagtcctagtgtactgacagcttttaatcatgattgggtacttaatttggtcaaaaaatttttttgcattcattgatatgatcatgtgattcttcttgtttagcctattaatagagtgaataacatcaattgattcttgaatattgagccatccttgcattccaagaataattccacttggtcatcatgtataattcttttcatatattgatgaattcaatttgctaacattttgcttatatattagctatataagtatatatatatatatatatatatatatttttttttttttttttttttttttttttttgaggcaaggtcttgctctgtcacccaggctggagtgcagtggcacaatcatggctcactgcagtcttcacctctcaggctcaagaaatcctcccacctcagcctctcaaatrgctgggaccataggcatgtgccaccatgcctggctaatttttattttcttagttttttttgtagagagagaattttgccatgttgcccagtctggtttcaaactcctgagctcaagcaatccacctgcctcagtctcccaaartgctgttgttataggcatgagccaccatgtctggccatgcatctatatttatgaagactattggcttgtagttttctttttttgtaaatctttgtctggttttggtaccaagataatattagcttaataagatgaattgggatgtattttctgccattttctggaaaagactgtgtacaatttatgttaattctttaaatgtttgatagaattcttcagtaaagccatctgaccctagaggtttatcatttggaagttttgaaattacaaattcaatgttcttaatagttatagaactattcaaattatgtttttcatatttgtagagttgtggtagtttgtgctttttgaggaattggtacatttcatttagtacatttatgtgtgtagagtggtttgtagcatttcattattatccttcagaagtcttcagggtttgtagtgatagcttctcttttatttctgatattagtaatttgtgtcttctattttttattgttttaatgttgcagtcttgctagaggtttgtttcattgattgtctctataaaaaatcttgtatagcttttttagttgttgttgtgggctttacattatatagacataactcattatagtctactagtgatcattttaccaattcaagtgaagtgtagcaaacttatttccctttacctacctcgtttatgctataattgtcttaaaatatttcctttacatacacttaaaaccacatcacagtgttaacattttttgcttcaaccatcaaatacaacttagaaaactcaagagaagaaaagtctattgtatttactcatattttgtttgccatgtgtttttccttcctgacgttttaagattctttttgtttgtttgtttgttttccttctgtttcgtgaatgtgctttagctgtttttttgggatagttctggtggtgacaaattctattcattttccttcatctcagaatctcttaatttctctttcatttcagaaaaaaatattttttgctacataaaggaccttaggctgacaatttttttcttccattacttaaaaatataccacatccttctgtcctctttcagataagaaatctactgtcatctgaattgagtttcctttataattaatgtgttatttctttcagcttgtttttaagataattttatgtgtctagtttttaaagttaaattataatgggcttttatgtatgtttctttggatttattgtttggaattctctaagcttcttgaatctgtaatttcatctcttttcctaaatttgtgaagtgctcagccattatttatgaatcccattctctttctctctccttccacaaccctatgacacaaatgttagctcttttgttatagtatcacagatccctgaggcttggttcatttttttcccagtctatttttctctgtcttgttcagattgagtaatttctgttattccgtattctgattaattgattctttcctctgtcccctgagttcattcctttagtttattttgataattatattttttagtgataaggtttccacttgattcttcatatcttctatttatttgttgaaactttctttttcattgttttgagcatgtttgcaattgcttatttaaaacattttatgacagctgccttaaaatctttgtcaaatatttctatattttctatcatctcagtgttggcatctattgatggtttttcttctatcctgttcaaaatatttctggggtttggtatgattagtaattttcaattgaatcctggacttttaaaaattgttatgaggccctggatcttattcaaaccttccattttagctgcctttgacattattcttgcgagtgtggggaaggggccaccatttgttactgccaggtaaaggtagaagtccagcttccccattcggtctttgttgacacccaaggtgagggacttctcattaatgttgtatagagatgtgatttacagttctccagatgttttacactaaggctgtgggtgaaaagggctttttgccgtatggcaggatgaaagtcccatcgctctactcagccttctctgacagtaccccaacggccgggttggagtaagttgttactacctgggaaagatggaagtctagccactgctggcatgggtgggacagggccccatttttctttggtggagtggagcagttattgtctaatgttttctgtctcgctgaacagtcccttcatggtcttttggctagagagatcagacttttgttttggcttttttttttttttttttttttttgcctgtacctactggcaattccagattgccagctgcaattctggaatacatgaggcaaaagaattcctagagaagtcatcttgtcattccttgggtaccaaggttcctatctgatctgtcttcttgctacctttcagagtcttcttatgtttgtttaacatcaaatatctagagtttttagttgtacttactgggagaaatagggaaaagtctgtctactccatcttcccagagtggaactgcaatttatttttgttcattgttgttatattcagcatcttcaggctctttgcaaatcttttatctatagattttattttctacataatcatatcatctatgaataataatggttttgtttcttcaaaccacctttcttttaattttttacaagcctgtaaaaattaaagaaacagagtggttttaactctttccgcaaagaagtttgccacccttctaaaatgcgagagttttatgaattttaacatatgcagggtcgtggaaccaccaccacaatcaggatactgaagagttggttctgtcaccttcgaaagttcccttaggctgcccttttgtcctccaaccatctccccacccctaacccctggcaaccacttacttttctattctctctttctttttctgcctttttcagatagcgtataaaatgaatacatacactttgtgatcttttaagataatttttcttcttaatctgttaaagtggtaaatgatttcatttattttccagtgttcaacaaatctttgaatccctggattcagtcgactatgattttatttgtaatttttatattcatgagtgtgatggccttggaatttttctcctgtactggttccaaggttacactgacctcacactgataccatgctcatctcttttactgatatcaatgttttctttttacttgccaggtaactaagtttgccacccttctaaaatgtgaggtgtggtttctcattatctacattctggaattcgtattctaggtttggaattatttatttcttcaatgatttatagaacttactgtttaaaaccatctggtaccagtgttttctttgtggaaagagttaaaaccactctgtttctttaatttttacaggcccctaaaagtttccttgtctttcttgagttgattttgatacagtttattttcctcagaactttctcatttaatctagttgttcaaatttatgctatacagttatttgtaatatcttcttgtcatcttttaatctttactgtatttgtaattgtgtcccctttcaaccctcattttatttgtgttttctttcttttcttttycttttttttttttttttttttgatcttgagtgaccttgctggagcgtcatcagtattttaaaatcttttcacagaaccagcttataattttgtcaactcccctattatacgtgtatttttatttaataaattttgtccatatctttatcgttttctctactttctttgatgattagcccattattttcagcttttcttcctttttaatataagcacttgagataacttttcctgtaagcactgttttatctttagctgcattccacaagatttaatatgtaaaattttattatcattcagttctaaatgcctttaaatttccagtatgatttcttctttgacccatgagttatttggaggtatgtttcttgattttcaaatatgtagttattttccagttacctcgaagacaaaaatcaaaacctttttcttttcgagtaactacatattcacaagaagttgcaaagatagtacagagaaatctcatgtacccttcacccagttttccccattggttccctcttacataactatagtaaaacatcaaaaccacaaatttgacattgctatggtgtgtgtgtagttctatgctattttatcacttgtaacctctacttcagcgaagataccaaagtgctccctcgccactaagatctccctaatgccacccttcagaatcacaccccacccctcttcccaccatccttaacctctagcagcaactcatctgttttctctctccccagttaacatttttaagtgccttataattaattgtggtgttgtcagaaagcatggagtgggtcattccagttattcagaattgttgagaattatttgatgaccccgtataagattattttcatattttgtttatgtttaaagagacattgtatatagctattaaccttactgctttttgtctgcttgatctatcagtttcttaaggagtcggttaaaaatctcatgctagattttccttttagttatttcagcattatgaggctatgttataaggtgcgaacatttagaattgttatatattctttatgattgaaagcagttataatttatatcctgagtttatctctattatttttgtttgaatctaccttgtctataaagtggtactagctttaattttattagcagttgtctgagctatctacccacctatctgtctatgtctgtatctatctacttctatctagtttttattcttttgttttcaactacacacacacctacttatgtatgtgtgaatgtgtatgtgaatgactttttctttttgaactgtttgtcttcttttattttacctgtatatttcttaaatggtttatggttggatttacaatgtaaatctgtcttgacaatctttgcttcttagatgaatctctttaaaattatttttattattatatttaaaattattaaaaattatctttaaaattatatttatctttaaaattatatttaacctcttaaattataagtaaaattatttcatgtttaatacttattccattttccctgttttattctctgctttcttatctttttattgattatattttctcattccctttctcctcctctattgattctgtttctaattctatttctgtgattttttttctttctttctttttttttttttttttttgaggcagagtctcactctatcacccaggctggagcgcagtggtgcagtctccattcacggcaaactccaccccctgggttcaagccgttctcctgcctcagcctcccaagtggctgggattacaggcgcccaccaccacaccttgctaatttttgtatttttagtagagttggggttttgccatgttgcccaggctggtcttgaactcctgagctcaagtgatctgcccgcttctgcatcccaaagtgctgggattacagacagacataagccaccgcacctggacctatttctgtgattttatggtgaactcagaaaatttggcatgtatatgaaggttttcaaagtgcaaaagttattaatttttacttttaccctcttcctgaataacagaaaaaccattgaatattttcaccccaatagtatgttttcctggttcatatccttttgttaataggtaaattgctccatttttatttgtaaaaccataacatattattattacttcagtcactttttgtttagatttacctgaatatcaactctttcttttaatcatcattctttgcctcacaggccttcatcttgggtcacttctcttctttctaaagaaaaaaatatttttggaatttcttttagtgagagtatattggtggcaaactcccttgggattttttttttctgtctgtaaagacctttattttactcatttttgaagatattttagctggtatacaattctatgttgatgattacactgaactaatcattacactgctatatgacttatacaattgctgttgagaaatgagctttaagtttgatttttgcccttttgaagttaatctgtcttttctctctggctgctgttttaaaatcttctatatgttttagtgttttgcagttttgctaagaactatctagatatgcttttttaatttatcttatttgggatttgttgggtttcatgaattgatgcatttcttcaggactgaaagatttttaataattacgtgaagtataattctaccttattattcctattcccttcttgtggaacactgattagatgttargctttgtcactctatcttacatgtttctttacctctcttttatgttttctttatgttgccatctgagtattttgttagatatatattccaattctttcatcctctctttaacactgtctaatacacttttcatccatctatttaatttttaatatgaataatttttttaaattttgtgcttctttttcaagttggctgggaagccttattttctctcttctcaaatttctcagtcacttcttttttgttttaaaaatattaaatatgtattgtattctgtgtctgctcactccataattggaagtcttcgcaggtctgattatggtgtgttgctccttgtagttctctctcttagaatcttgttttttgttttgagacaaagtcttgctgtgtcgcccaggttggagtgcagtgacgtgatctcggctcactgcaacctctgcctcctgagttcaagtgattctcatgcctcagcctcacgagtagctgggattacaggcatgagccaccactcctggctaattttatttcttttttattttaaatagagatggggcttcaccgtgttggtcaggttgtctcaagctcttggcctcaagtgatctgcccacctcagcctctcaaagtgctgcgattacaggtgggagccaccacacttgacctaggaccttgtttcaatgtgtgttttatcttatgttttattttgctttgatttttttttctgtgacagctcatatgttttgtcatcttgtggggagttttgtgactgaagtcaaagctggttcctgcagagaagattcaaatttgtttctgccaggtattggggcaccaccagcctggaatcattttaaactaaattcttatctagaggctttaaaaagatgtccatatgtattaattagggttgccaactcttgaaaaggccatctggtaatgattattcctctggggggaagattttcctccttccattcrgggtcatttccagattaattgtttttatgcatttcctgagggaggggattaatttatttccaattcaaacttaaaatgaagatataatcctttggggctccctttttatccaagagaagtatcctgttaaactctcyttcctaggaagggactggtatttctcttctcttcccaatatcccataaggctatgaaagacaaagttcaagttcaaccagttcatcaaattatctcagagcaacctccagcttctgggctctgcttgtttctcagaaaarctatggtacagcttttatttactttttggcctccaggtattccttacccatttgctattttrttgatacatttacatcccatgcaacmtttctacttgtttttgtttttgtgtttctagagacagggtctctctctgttgactgggctgggatgcagtggtgtgatcatacctcactgcaatctcaacctcttgggctcaagtgatcctcccacttcagcctcccaagtagctggtactacaggttcgtaccaccacactggcaaaatttttaaaaactttgtagagatggatctcactttgttgcccagactggtcttgaactcctggcctcaagcartcctccaaccttggctcttttccttttatttagcagaaggatccactgtactaccagacatagaagtctcctgtcatgacacctttagttattctcctatcattgaatgtccccctccatgttttctattacaaacaatgtgatgatgaacatctttgtatagacatctttgtgcaccttgtccagttagtttctataataaatttctagaatataaaaagaaagcgacagaactgaggaatatttggaaaatagcttggcactgcttgtagactaactagattcttagggctcttgatagtcattgcatatattactttgcttactcctttcaaaaatcccactggaactagcataatggaaactctactgagagtcatttctattaagtaaataaaaatatagacactgtttctggaaaaaaatagccaattattttaatattacctacagttttttttcaagaggaacttctcccaaattattaacagaaataatttcttagtaacataatgctgtaatgtgtttggaaaaacacgtaagatgagtcaagatgaagagcaatgaaaaactggtcctatcaggtttgaaaacaactgtaaacaactatggatattttaatccttcctagggtctgattggtggagaagtccatggttttctcaggagacagctatttgtctggggacatcactacaaaggttctgtaaatsaattctaaattgattccagaaggatgaaggagagaatggatgggtaactatacaaacagcaggaaataccaggattcactggtaggaagtggactaacaaagtgcaatggagatttggggctatctgggtagtgtcagaggagaagggatgttgaatgacataccaaggggtttggatttggacttgaattcgtgaaagacagagccattagttttaatcagaaagtttcatgggtagcatttgcatttttataaaattatgctggcaacaaggtgcagaggaatttaagggagaaaagattaaaggcagggaaattaggaatagatgagtgaatattctattttttaatggttttattaagatattaactcacataccacacaattaaaccatttaaagtgtaatgttaaatggtttttagtatatttacagagttgtacaaccacaccactgtctagttttagaacatttttgtcccccgaaaaagaaacctcctgcccattagctgttactccttatacccctcattcctgcccgatccctaattacccactaatccactttctatctatagatttgcttattctggacataatataaatagaattatacaatatgtggtctctcgtgactggcttctttcgtttcatttaatgttttcaagactcatccatgttgtagcatgtatcagttcattcattttaattggcaatcttctattatatggatatattccattttattcatccatttatcaggtaatggacacaggttgtttctatgttctggatatcatgaataatgctgctttgaacttttttgtacaagtttttgtgtggttttatgttttcatttcccttgggtatatacctaggaatggaactgctgcatcatatggtaactctatacttaactttttgaaaaactgacactgttttccaaaccccctgctccattttacatttccatcatcaatgtaagagcattccaatttctcatatcctccttacactagcaggtataaagtggttgtgattatagccatcctagtgcatgcgagtggtatctcattgtggttttgatttgcatttccttgatggctaatgatgttgaatatctttttatgtgcttctagtctcttgtatatcatttgaaaaaatgtctattcacattttttgcctatttataaaaattaggttatttgtctttttatttttgagtggtaagcatcctttgtatactctagatacacaagtcccttatcagatatatgatttgcaaatattttctccatttctgtaggttgttttttcactttcttgatggtgtcctttgaggcacaaaagttttaaattttgatgaagctcatttatcttttgtcatttgtgctttttgtatcgtattgaagaagcctctccctaacccaacccaagatttactcctatattttctttaagacttttatagtattagctctcacatatagatctatgatctattttgaggtcctttttgtgtatggtgtgatagaggagtccagcttcactcttttgcatgtgaatatctggttgtcccagcactatttgtaaaatatatttttaaaatagtttttctataccccctagggcattgtattaataatagtccaatctaaaacaaatatcctgagctatgccattggcagtgggaatgggtgtgctggggaaggttgagaaggtaagattataaggacatgggaactgcagtcatgcaggggtcggagagtaagaacttgagaagttttagatttctggttcccaaccttcccctccatatcaggagatctgtggcctcatcatcccacatgacatgtggccatcccagaaccaatctgctggggcctacttgtttatcctcatgactggaggatcaaagcctgtagccgtatgatcaattcaaccacaggaaataagcctcaatcaggaggacagttgaattctattttgtggttctcttagactggagcagctatggcatctgagttcaaagagaaaatggtaaggtttggatggaaggggaatgcagtcagccaactccagaagcatcaggcttctgtcagtaatgccagtgatgtcagccagggctggctacataaaaaataaacactcctaacagagcaatggaattgtcatgatctttggggagaagtttaggctttggaatcaccttgtttgcaggacacaatgccscagaattctccatcttcattctgggtccattccttggttgcatgagaatcttgtttgtttttgtttttttccccatttcttggagttgactgtttagccctagcagtcacatgaccaatcctaactttggaaaaaatatttaaagagttctctggacagttgaccccatttctcgctcagttgccatggggactggcagatggagagactgctacccaggtaattacggggtgtatcacccacagaacctctgcccagggccacagtctctgatgagaatagggaaaatgtgtttagaaatgattttgacagcccctgacctcgatgacaaatcctcagctctgacagcagccccaccttgagagcagaaacagaagagttctgttctgtgtgctgggagggagtcacactgtgcagacgttcgtggggctcctacagagaatcctttgatgagaaacctctccacccaggacatacttgccagagagagaccagatgctttgttcttatgtaagatgttctgacatgtgatcatttgagagaggtgccctttaaacataaccatcagttactattaaaagtaaagagctgaaagtgattttagagattgtttagttcaccccttagctttactaaagaggaaactgagcccagataattgacaagctcagagtcatgagagagttagtgctgctggtctcatgaccctttccctacgactcatttctgatgaagaaactgtttagcttgaacaataacttgaaatagtcccagagtatagatgagtactagacccttgttggtgtcgagaaaacagaaggtccaaaaatgtgtgcactgcctctgtttcaggaacctttaggagtcatatggctttatatgtgtttcataggaaattgctacttagacctcaacttgggtcgagatagaacatttctattctctcctatagtagccatctaatgagnnnnnnnnnnnnnnnnnnnnnnnnnnnnnnnnnnnnnnnnnnnnnnnnnnnnnnnnnnnnnnnnnnnnnnnnnnnnnnnnnnnnnnnnnnnnnnnnnnnnnnnnnnnnnnnnnnnnnnnnnnnnnnnnnnnnnnnnnnnnnnnnnnnnnnnnnnnnnnnnnnnnnnnnnnnnnnnnnnnnnnnnnnnnnnnnnnnnnnnnnnnnnnnnnnnnnnnnnnnnnnnnnnnnnnnnnnnnnnnnnnnnnnnnnnnnnnnnnnnnnnnnnnnnnnnnnnnnnnnnnnnnnnnnnnnnnnnnnnnnnnnnnnnnnnnnnnnnnnnnnnnnnnnnnnnnnnnnnnnnnnnnnnnnnnnnnnnnnnnnnnnnnnnnnnnnnnnnnnnnnnnnnnnnnnnnnnnnnnnnnnnnnnnnnnnnnnnnnnnnnnnnnnnnnnnnnnnnnnnnnnnnnnnnaagagactgagccactgaaatgtggagaactgaggggccaagtggggacccagtcggttcagtgtcttttggataaggccttctacagccaacattgaaacccccagagaaagctttccctctaacacggcattaagtatttacagctaatctgggtgggcggggcagggagaggctccacttcctatgattctcctgccatcaattggctttacaggccaggcaatttccaactgtgccttggactcaggacttacaaagaggattaaaagaaagatgtttaaaaataagcaggctttaagtctaccaatgtgacaattgaaataaatgtaaaagtaatcatttatttttggtttgattctaaaagtagtatattctctctatggaaaatatagaaaatacagaaacatgtgaaaaaatagtatycataatcccatcacccaaacccactcttgctaattcatgagagcaagaccttgtgtttcatgtctgctgtcacatcctcagtacttggaacagtgcctggtacagagtaagtgcttaataaacatttgttgaatgaatgagtgttactgttttggtatacttatttccagcctttttgccctttttctatgtatattttacatgaytgtagtcagtcatcatcattagataatatctttttttaacttactatgataacacaggtatacctatgtcacaactctttacaaactttttttttttttttttttgagacagagtctcgctctgtcrcccaggctgaagtacagtggcaggatcttggttcactgcaacctctgcctcccaggtttatgtgattctcctgcctcagcctcccaagtagctgggaccacaggtgcatgccaacatgccggctagtttttttgtatttttagtagagacagggttttgccatgttggccagggtggtcttgaactccttgaactcctgaactccagtgaaccccccaatttggcctcccaaagtgcagggattacaggtgtgagccaccgcacccrgactctacatttttaaaggtgcttagtattcgatgtattgtgtacacatcatttacttatttacgctcatgcagctagatatttgagataaaatacaaatttcaaagatcctttgcacatagggcttgctcctcatggataagtagaccaactggctgttttactaggcttccttatgctcaatggacccgaaaaaattaataaaatcacattttattttttactttcatagtcttactggattacataaagaagttttcacttctcagtgccagagggaggtcttgaaattagaatcaggacattaccttctcaatctactgtaactaagaaatatcttttgcatattgtgttttatgaagcattgaattcagagaacgactcattatgctaagttctggcaatacagagtctcaagaattcaactgaactcaactaccttctctatagtcactgctttctcccctttaaaagaattccctggttagcctggttatagaaggtaattttgtccaagttaatatagcaccatctgctgctgaaaaggagtccttcaggatgagttctctagttttaaacattgacttgtttaagaaataaaagggaattgacatgtggtttcttgcaggatccccttgtgtcagaactggaaacaatctttttcaaaaagactgagtggacttctggctccagttggcgacagagtacacttgattaactcctccacctgttagaaatttctatcaaaattcaaaaggaatatacaaatagggagaaatgcatgtcagaaacaggaaaccatggaaaggggccaacacattctggaactcatgagaactttctgcacgacaaagtgcaggtgagattggattgagggaagggctcattagcctgccattgaccacataagagggaaaagccaagggaatgagggattccagcagagcccctcaatacctactagctcacagtggcaggggctggagctgagggtgggttatttggcacacagcgagaggcaagcatagatcctccctctgctctggaaaatgcaccaggtgctgggttctgcaaacccttggcacatgaaattaaccaggcattgctaagcctggcttctaagaaatgcagttaagtcagttaggatagagttataatagagtgtcagtgtctccaacaaactataccctgaaacactaagtcccagaaagcatttaagccatctagtttccaagttgagtaaccaatatccaaagattctatactcagccaatcattcacatgtgacagccacagaaagacatccctagacatgcagatattcagagagctttcctgaaagaaaacacacacacagacacacacacagatgtacacacacacagagcatgtgcacacacatacaagaattatggtagagtaataaaaccaatataactcaagagttaagtgaagatcattgtggctaacaaagttacaaaatagaataaccagaaaacagcttcaggaagagaaataaagtaattaataccatcatcctcattatcagtctctatccctatacccatccctaaaatctcaggatgaggagagggaagaaagtaaaagttgtctcaaaatctcatcttagatgagggagagtcatgttttctgtttcattactgaccctggtatggaaatgagtccaagtatgttgtttaatatactgcttacatactcaatactataaaatattttctaaattattagtataaaaagagagcaaagaaaatttgattgtctagtcacgatgactcacgcctgtaatccttacactttgggaggctgaggtgggaggatcacttgagcccaggagtttgagatcagcctgggcaacatgatgaaactccgtctctacaaaaaatacataaactagctgggcatgctggcatgcatctgtagtaccagctactcaggaggctgagtgggaggatctctggagcccaggaggtcaaggctgcagtgagccgagatcamaccactgtactccagccagacaacagagcaccaccctgtcctgacctgctctctctctgtcactcgcgcacgcgctctctctctctctctctgtcactcgctctctctctctctctmtatatatatatatttgtgcatatacgcacacacaacatgtgcacacacacacaaggattatggtagtgagtaataaaaccaatataactcaagaattaagtcaagatcattgtggataacaaagttataaaatagaataacaatcagaaaactttcagaaagataaaataattaataccatcatcctcattatcagcccatatccctacacccatccctaaaattccaggatgaggagagatatataataaattaacatatatatatttgattgatacagcaaggtagaaaaaggataagagaaccataagcaagtttaacaatattgatttttaaaagccctaaattaaatatttgcatatagtaataagcaatatagtaaaatcataatacccttaataatgcatggatagttcaatattaagaaatccatttatataacattcattccgcaaatagttgcaagtgcctgttatgtgccaggtatgccagaacaatgtaacttgctcgatctttctctctaaaacataccttccaggctccctatccacattgctctctagttcttttcttcagagcacttatcattctctgtaattatctttcacctttattttgcttgtttattgtcagtcatctttcactaaaatgcattttctccaagatcaacatccttgtctgtcttggtcacagctatgtgcacaatgtctaacaaakaacttgacatstaatagctgaaggattcattcaatttgtgtcgcattagtttactattaatgtaatctattcattcaatatttgtaattaaacaaatgaatgtatgtctatgagtgaaaggatgatggtgattctaaatccctgctcttatagtacttatcrtttcagtaggggagacagataatctgagtacttctatggtcagtgtcaaaatccaattttgctaagcacaagttttctattctaacttgctgaataaaaagacggcaattgttttgcaggaatcttccacagcttcctctcgagaaaagcctggaaaactagaagcacaaagtagtaacttcctgtttcctaaagcctgccaccaaagggcacgcagcaactcaaccagtaagtgtcttcccaacatgtcttcaggaacagagctcagctgttcctggatagcaggactattgggaggatagcggctctcttctggtccagttggagtaaactagcattggagtctgctcagcttcatagtgtgtgcatgctctggctagccagagttctgtgttgtctagccagctctcctcatggctccaagtgccatgctggaaagacctgggtgtggggaagaagagaccgggctttactcctgctgtgtctcctaacatgctccttggtcttgggaaggcttctgtctcttagctgcaatatgatggaagttgaggttggaagagctcatgatttttattagctgaaaatagaagatggctagtacaaagtcaagaaaatgtgaagaatgcaataatacagaaaaacctgaagaaattaaaatcacaccaaatcataatattagagatcatctatgttaacatattcagttatttcccttctatgcctacatatgctataaaaaacttcacacacgcatttrtttatatrtaactatttcaggtcatcagaaactcttgaaaacaccattttttagtggatccatggtattttattatatgaatttatgaaatctagttaaccaactccctattattagatatttataaaatctacttaaccaaatccctgttattaggtatttaagtcattctcaggttttcactagtctaatcaagttgctgaataggtacatgagattttgtctgagtttgtgatgatctttcaaagaaaatacagaaggcagtggcctggttaagagctcacatttgggagctaaggcacttggatctgggtcccgcttccagaactagtgacctatgtgatcttgggcaagtcccctctgagtctcacatgattctgctgtatgatgcaccatccttagtgatttcctattattggaaataaaaatatttttaaaaagttacttgcttttttatcatcaatttttacttattctagcataattttctagaaatggaatttggggttaaacggtagatgtagtttaaggctttttatctgtattgccaaatttcagtagctaatattctttcaataatatatatgaatacctatttcttcaatcatagctcacatgggattatgatttttgataaatatttgctttacagcaatttacagatttacaggtttttctcctttccctttctccctcacccattctttgcttttttactgttttgttttgcagccaagaccagctatacaattggtaggactcactgtaaaatgaaaaggcasgattgctgttcaaaaaatatatgaataatttcaaaaaggtagaagaaaatctttgaaccaggttgggattcttcaatcacagggccccaggtgactgtgcaggccacgtgcccctgaagccaggccctcttgccccctgggagctgaaccccgcagagctccctggctccctggcatccccagggctccctggctctctggcttctgattgagttcagtcaatgacaggcatcaatggaggactggcagggggaagagagccaccagggtgtttcttcctctgctcccccaccttggtgctgcagtgctggtggtggctgtgcccctctatgacagtaaattgtgttagggtggcctgtcggttccagtgcccactgggctctggtaacaccatttccccaccttactccttcaagcctggggtggtaacagtgtctggtacctcaataggcctcgttatttttctaacccggcccacccctctgtgtatggctcctttacccaattctcagaatcccaactgagtgtgccttttgtttcttcccaaaccctgattgatacactgataaaaatagatggaaaaaaaaagtacctaggctggctgccacagcttctgcctgtcattctagccctttgggaggctgaggcaggaggatcgcttgaacccaggagtttgagatcagcctggacaatatagtgaaaccatgtctctacaaaaaatttttttaaaaaaagaaaacccactaggcatgatggctcgtacctgaggtcccagctggtaggaggatcccttgagcctgggaggttgaggctgcagtaagccatgattgtgccactgcactctggtctgggcaacagagtgagagcctgtcctgcccccccgaaaagaggtgaagttaaacattcatacaggtgaagttaaacattccttcatttatttattttgtttttggtgagtttgcctattctttactgaaataatcatctttttatcattaatttataaaaagcctcttggttaaattaatatttgacgtcatacttgttgaaaatactttctccagttcgttgcttttattttaattttttaacattaaggtgttttaatctttatgtaatcaagtttactgatcttttcttttttaatgtgaaagttacttccacattcagataactattaagtctgtgactatatatacttctaatttgtaaatgatttatcttttttccctcaaatttactgtattatctgtagtttatttttggtgtttgatatgatgtaagaatctaggtagattttttttttctaaatgaatagagaattattctagcatcacttatttacaatcagttccttttattttgcgttttttgtttgttttgttaatctcatgcaaacgatatgcagttaggtccctgaaagcaaatttggcaatttttttaagaagagaagcttaaggccgggcgcagtggctcacgcctgtaatcccagcactttgggaggccgaggtgggtggatcacctgaggtcaggagttcragaccagcctgaccaacatagagaaaccctgtctctactaaaaatacaaaattagccgggagtggtggcacacgcctgtaatcccagctactcaggaggctgaggcaggagaatcacttaaacctgggaggcagaggttgtggtgagccgagattgtgccactgcactctagcctgggcaacaagagtgaaactccattttaaaaaaagaaaagaagctcagatagttgaaatcagtgttatagatcatatttatttttacttagctctttttatgctttttattttgatgattccttgccatttgtttgttcttggcctcttgctataatgattgtgaaaggtttatttaattattgtctctacttctgatttccttaagttttaattaattacccaattaagtttaatcaattaattaatatctgacataacattttccaaattgtccccctcatgaaagatgaagaagttagcttggtgttattcatcccttttccatggatttttccattttgtaattcaacataactttataaactcatgacaatatgtagctctaatatagcttttttgtatataatcatgacaatatatagctcccctttcaaaaactattttttttgttttttttttttttgcattgggttgtaataaccagctttcagttaactcacttaatactctacacttaactggtttaaacttcccccaatggagatgataattttggtacatttcctagttggctggagtgcgtcaacaagcaatgttctgaaacagtgggccgaagtgggcacagaaatcgaccccagaccagggagagttttggagaacccactctgtcctgactctggtctgcgtccccacagatctgaatgtctagtgggaactggaacccccacacaagtggagctgggtgtggcctgagcagttgcactgggctctcctgtggctctgaggtcaggttgatctgctctgtgaaccattccaagttggcagcctgtttgttcatcctcattccctctgaacccaaagcatgcaccactggccaccttcaagtcacaggtcacccttgcactgctgtggatggagagaatgcagggagactgggattctggaggctgaggtcatgcctcagactgtttcttcactgatccggaaccctctgggcttccatttcctcactgatagaggaagragtaactccagcagggttcccaaaggacaaatgacgagccacctgcatcatctgcacaggctgacaaacatacaggtttccccagacccgaaacgtgcagatatggatcaataggttgggtggagcactgaaatctacctttctattaaacactccggataaatataatgcacaggcagagttagcactagaggatgtctagcctctcctctcacccccctttcttgattctgtgtcctctctttgcagcgtgtggttttctgaatcttctggcttcctctccctcctggtccatctgggagcagttggtccctgtaactcagagagggccacctacttgcgctgaagcagctgctgggagcagctgttcttgcaggggcaggtttccccagccactctctgggccccgatggaccaaaacctctcccttcttcaccttgtctttgttcctttcctcatccccttttagggatctcacaccctcagagataccactcctcttttcttctcaagctaccctggccagtggcttcctctcttcagcctataaataagcttaagtctttcccatcctgaaaataaaagcaaacccaaccctgctccatcctgtgtttcctttgaactaccaccaatcttaccttttcctctaggggaatttttcacaaaagcctgtccattcactcgagcctcacttggccctcaggatactaggcaaaccctgcccctctcctggcctctagaacggaactgcccaacacattagccacatgtagtcttgagcacttgaaatgtgacttattcaaacagaatgtgcagaaagtatcaaagacccactggattcaaagactaagtgcaagaagaaaaggatgtaaaatatctcactaataattttacatattatttatatgttgaaagaacaatagatataacagaccaaataaaatatattattaaaattaatctctcctgtttcttttcactttttaaatgtggctactagaaaattttttaattacataggtggctggcattatatttcatttgggaagcactgttgtagacaatgacaggttaaatcagatcatctgtgaaggttttcccagctggatgtggtagggtagggaggtagggtagagttcccggttggatgaaaggaagtctgtggtttccacaaagtagaggaagcctgtcgctttgcatttttgcagatatccaaagaatcaagagttgtctccgtgtgtgtgtatccctgtgtgtgagtgcctgtgtaagagccagtcagataggatctcccctgcccctgttcctactgggtctcgcctgtttgtgcttgtcctcggaaacctttgtgttttcctcctttctctccttggttgggattgaaaacaccggggcctggatctgatgcagcattgtggtttctgagagctcagcacactgattgacttgcaggaaatgcctgtcaactcttgttgcattgaatggaggtaaaatggaagtgagagtcccatctgcaccctgcagtacagacagcatgcgtggagatcatgacaatgctgctcatgtcttccgcggccacctctccccaccacgcacctggcacagggtgttaagtggtttacagtcacactggcccctggctaatgaggggctgatattgttcttagttgaactttgcattttgagagcacaaatgatttcttgctgtttttcctcttctggtttaggtgttaatccctattgcacaagagaaattgattttccaatgaccaagaaatctgcagcgcccacggacaggcagccttactctctctgcagtaacaggaagtccctctctcaacaattggactgtccagcaggaaaggctgcggtaagaatggaaggagggaaactcagagaagagtttctcccggggagaagggaggggcccaacattaacagtggctgaagaggccttcccagtagtttttttgtccgcagaactacagaggagagggtctcgcttagtagctgcaagaaggtacaaccatctctgggctgagaaccgcattagaaatggtcatccattgagcgcccccttgtgccaggcacttgcaactgctgccacgtgtgtgctattaagagctaacatgtagagaacacggcacgcggggggaccctgaactatggctttgcgtggatcgctttatttcatctgcacatactcctaagaggtagaagagggagctacagcttgggcaagttaaaggatttatgcacattcacactgttgaggagaaacagctgggacttcaagtctgatctttatgactctgaagcctgtgcgaaaaggcttttcactcctataatcyagtgacctgctttaccaacattgcctctaattcttaaaacaagcttagaaaggaatatgttgttagtcccattttatagtaggacactgaggcttggcaaagtgagtagctgggtttatgcatcttaaaacctataggaccagaatttaaactgccctgtgtgctcctcagtccatgaccttcccactacaggtgtcagcttgcaggcagagagctaagcagatataaagcacagtgtaccctacacacgtcccaccagcttgcctttcagccccagccaaagcacgctgtgctgcacgctgccacttttggtcacacagcgccctctgtctgtagcwtctcacccctccttctctgatctctatctctagaaactgccccagccttcaaaaaccttcctaaggttctcttttgcctgggaaagctcctgatctctccaaaggcgtggacttcacattttcccaaatgcccatcaggaagcaactgcactcctctcacagtgctcacccagcctgtcttgtgagtgtcatttatgttagcatttcatctcaccaactgactctcccaaggagggtctccacggtcaagcaatgtttccctgcatagtacataatagatgctcagtgaatttcatctctctcttcccttcctttccttgagtcaatgtgtttttcattcccaaactgggagtgtggtgtcctagtgttagaagaaggtggcttccctggtgccaccctgagctgagaactttcccagtccctggttttctgcacatctggggtcatacaggagtacactggagccctccaatatctgcagccagcgctgggtccctgaggattgggctagcgggtacttcctgggggaagctgcttcctgtctttgctgcctcatgcactaggatccaggtccttgggaacaggaggcytacctggccagcagggatgggctaaagatcagccagtagtagctgcctgggaggctgtgctgaaragaattgaggggttacattccaccaggaaggagtgcttcaggagattggcagtgttttggggacaggagtgggagactcagttattccctctactcaactcctcaaagtttaggaggcaattagacactatgttagttggagacagaaccaataagagatgtatagatagacacacatacacatacgcagacacacatacacagacagacacacacacacacacacacacacacacagagagcgagagactgatcataatgaattggttggtttatgggattatgaaggtaggcaggttccaagatctttagcatgaattgacaagctggagacccagggaagcctatggtttagacctaattagagtctaaaggcctgagaaccaggagagccaatggtgtggttcccatccaaaggccagcaggctcaagcccaggaagggctgatttttcagttggaatataaagacaggaaaaaggctgatgtcctagttcaaaggcagtcacgcacgaaggatgctttctaactcaggggaggtctgtcttttctctattcaggacttcagcagattggatgaggctcacctgcatcagggcaggtgatgtgctttggctacagatttcaatgctcatctcattccaaagcaccctcatagacacacacagaataatggttgactaaatatatgggcacccatgtggcccagtcaagtggacacagaaaattaaccaccacggatgtccatgcgtgatttcacattgtcttcataacagccctccaaaggaggaggagagggagttatcagaggaaggttgtttctgggagagaagaagagaaagtgggatccacagtggacgggaaggccagggagtggcttacaggacctgggtatttcctgggtgactttggagagagcggcccatcaggtgtgggcaactgcaagccaacaagagagagggtgatccagagaagagcagctcgttatccagggaatgctagtaataaagaaaacatgcattccatgttcgctgccttccaggcatgaggcgatgtgttttacaaacagctatacagccaagggagtacaacccaaagagctaagtactgttaatatccacctttgacagatacagaggccaggctgagagaagttaagtggccttccgaaggtcatctaattcatagcaacaggatggatatgaacacaggcagctcagagcccatgccctgctgcttcctctgcccaggtggcatggggacagcatgggcctgggagtcagcagcccgggatcctggttctgccttgcggcatctccgatatcagagagcagggagcaagcagctacctccacattcacagctgatgtgtctgctttcgtggacatgcrggaagcacagccttcagccccagactctttccaaatattaaatgctgaaagtagcaaacagtcttagaatttataataatgacaagaaacatttctaaggcacttgctatgtgtcgggcaccattttaagcactcgcatagatttattcttcaaaatgacactattagataggccccattaggaccatgcttttacagctgaggaaactgaggcagagagggctaagtcactaagctaaggtcacccgccagctgataatgggcagagtcagaagaacccagacaatggggttcccaagtctaagctctcaccactaagccgtatttcccctctgcagggcggcttcctgtggcacayagctctggttctcattcatgaatagttaagcctgtctgcctaccccaaaattacattctgagttttgaagtctttgggctccgcccccttgcccaccacctcctgcctggcacaaggggagttctcagtaaatgtgtcttggattgaacatagtctcagggcgttcttggtagctggcttcccaaattctgcctgagacctggcttatgaggacttgtcctggaggcagcgtgttctgtgatgttaacctgggccctacttccttgataaaccttagtgagmcttttggctgctcatctacatcaggctcagcaaagcaggctcctagaaccaaggaagtccctccccaccataatcctacccacaccccactaaccacattctggttgttacgctgcctgcccttaggagaaagaggacttggttcctctctttggctgggcttttccccttccttgtgaggcatgtgctgctgtcctatgtggctaatcttctgcctactctggttccttgttgcagggaacttcgagaccaacacggtccctgagcacagctcagctcgtgcagccatctgggggcctccaggcttcagtcatctccaacatcgtgctgatgaagggccaggctaaggtgagaagggattgtggccaacaggaagtcctggggggcagcaccagtctccaaggagctgctgtgtccagggaaggatgggaataggactactggggtgtcctggcgcatcagaaragacaaacacaagagtggctagtcttaaaactcacacctggctgagtccaagcagcacacatttttctaattaaacaaagtgattgttttcttgtaaaggatgccagtccctgccagctgccttagcactttcaaagcttgttctctaattcattcctggcacagtagtttccaggacttaattttacctgatacataaatccaaattgtttacatagatttctggatcctgagtttacctctgccattcagatgttggcataataaagcagggacccatatattaatttataaaaacatatgctacctactacatgtgggaaattcaatggttgatagtgcttttggctgtcaattgtagcatctggaagagtcagaactaactctacctctctcaagatgatgaaacatcatactgatctctgcttcataatggagatatagccaaaggggatacaaaagtattggtggtgatggtgagatagggggcgtacacaggtttgcactgctcccagaacatgccaccttgtgcgtgaggttgactgcaaagctctcaggccagcccaagcaacccaggtgctaaagtaatgaaagggtggtttctttatgtaatataattttttgtgtggtgtgagaggaggacctaattgctacttatggtctgtccagggggaggggccccaccatacacctcaagtcctctttccctccatctcctgtcccttctgtctgctgggagcttagcaggaaataaaaaagaagagagacatgagagatgctgggacgaatgctcctctgatcacaagggagtaactgtcttctatgctgactttctctgaaggacccattttctgattagtaaatcacgatgctttttccccttcaatttaggtagtagtatttttttggattgacttttaaattgtttgcagtgcccaaaagaaggtgaaatggtaaacgccaccaaaactcatgtgaagatgaccaaaaatggtttaagttatcttggtgtgcacaaaatatgcattcaatgagtaatctttatgaggccggggggtggaagaagatgaatcatttgatatasaaatcctcatgtacagagcagtgatgatgagttcagaaataaagcaggcttcccactatctggcgataaaacctacaccccaagatctcgtcactaacaggatgacaagtagcagtgaagcagggggaggaggagttagagccagagggatcagcaagtgcttgaggtagagtcaaaagcaaatcacacaataaaaccagccaccaaaacccgggcattgtgctatgggctttgcaaccataactcctttaatccccacaacaaccctcctattatctcccttttatagacgtgcagccgggcgcactggctcacgcctataatcccagcactttgggaggcctcctgtttgagtcctggagttggagaccagcctgggtaacatagtaagaccctgtctctacaaaaataaataaaataaaataaattaaataaaataaaataataaaataaataaataaatatataaaataattaacccggtatgctggcacatgcctgtagtcccagctgcccaggaggctgaggtgggrggattgcttgagtccgggaatttgaggccacagtgagctgtgatagagccactgcactccagtctgggcagcagagggagacgctatctctaatgaatatctctgtgtgtatgtgtgtatatagatatggagacgggggacctgggaggttgcaggactcgtccaaggtgacttggttagtgaggagccraaccaaggcaatgaccccaggctgtctgacccctgggccttgttcttaaccatgacgccatcctgagtccccaggatgggtgagactttgagtctagagcagccgtctcagccaggacaaggctaggggcccgtggaggagccctgaaggggctcctacctcaccttttcctaagcctgtgctactcccggacaccatttgtcctgcccatcctggaacacacaccaccttcaccagaggcttagaacagctgctcatccccacggctctcccactgactccctacagtgtcaagaagatggaggacagcgtgttgtctctgtggcacggggtgatgctcctaatcagcgcagcggctctggcctgaagtaaactgcccatgagcaatggttctgttacagcagtggccatcactttaaagggtctgtctaggagccaagctactggccactgcctggcatgcttgtacgttggacccaaaagcctggcctccaggtgcatttatgcctttatcctgtaatacgtgcttcttgagcacctgcctgaggccagacacagaaataagatgcatttactgtcttcagagagcttatagtctagaaagctgcttattagactcaagctatgccctctagggcggcatggggtgccttagtcctcaacaaaattgagcaagtcacatggatttcctttgctgcttttcaggtctgccaggccattctgtgaactcactggccgatttgcaggggaagctgtgcccaccctcccttctcttcctgctgtagacctcactcaacctttcccgggacttattcctgtttggccttctctactgccttctggctgctccccagctggaactatctgctgagctatgagtttattctcccagagccacctgtacaattccaggatatgtttgttggctcatgggaatcacctaggacaatggcagatagagcagrtgcaggagggagagcacgtgattggagggatgtccttgagaaggggattgagaaggcctttggtgggagaagggctacattgtaaagctgctactattattactattgttggtatttttatgattgttgctaggcattttactttcaaacacaaccctgtgagttaggtaatatcattattattttaaaaggagggaaactgaggttcagaagcagaaagtgattggcccaggattgccaactggagggacagagccagggtgctggtctccatccagcctccctctgtgtgggaaacttcagattcccgcgaaagctccagacactacccagcccaggctggccttcatgccgctgctcttcctatttttgttgttgttgttggtgttgttgttgttgttgttgttaacctctgagacctctgagaccaaaggcaccttctctccttcccaatccctttgttcagggctgaggcaggccctcagaaggcatcaggccaatgagaagcatggaatactacccctaaatcagaccttctctttttttccccagggtctgggcttcagcatcgttgggggaaaagacagcatttatggccccattgggatttacgtcaaaaccatttttgcagggggagcagcagcagccgatggaaggctacaggaaggtaggcttcccagcccttttcagaccatggtggaggaatcagaagcagaatccagaattgctggggccatagaagatgttgggaatgcaaaatgtgtcttgagttgtcaggatacggccagcatgcatcctggggtctgcaagcaatggggacacagctcccccgagggggtcttcattatgactggcaggttggttgtgcatgtttgcacatttagcccctggcaccgttaccccttagctggtcttggggccagcctgggtgggactgaagtctgaggggtctgtttctgacccttccctcctctcacccattctctcggctgtctttccctttccatccaagatcctgtctcagttgctgggatccgttaacaccccctctccttcattctccctgtccttcctaacccacaaccatagggaaaccaggttcaatgcttccaacccttgtaacggatgagtctgataaacatttgctaggagcctactgaatcctagggtctaggaatacagatagaaacaatcaggcatgattcctgaagagctcatgatctgccacagggaccctctcttccactccccacccacctttcttccatcaacccaccccctctcaactctttcatatcctcacaagacagaagcctcatccatcctgggagtgaggggccagggaaacagagctgcctgtcttcttgtcctgtagagtcagggttccccccacccccacctccaccctaaagtcatkcatggattattgagcaacaggtttggcccaaagaaattgccaggtttcaactcaggaggcaaagttcaggggctggaagtcacagggcagagagtacccactgcaggccaaggactgggccatacaccagaggtctgaagagaagtgacttcatagcattttcactcttctctgtcagctcgctttctataagctatgctgggagcctaaccacctttaatcatctaacttgcttagggcagggtaggcacactacagtctgtgggccaaatctggcccaccgcctgttttcaatgtctcatgaacaaagaaaggttattacatttctaaatggttgaaaatttaaaagtgtttttgattattttatgatatgtggaaatgaaatgaaatccaaattttagtatccataaaaaagccttctggggactcgagcacgctcatccacgtacctgtcatccagggctgctttcatctcagcagggtgcccccatctcagcctcacaaagtgctgggattagaggtgtgagccacagtgcccagctagaaaaagaaaccagagaaaaagratggatcatatacaatggaaccatgaytaggtgacagcagattcatcagtaacgaccaggtccagaagtcagtgtaaacatagtatttatatctgagttgcttggtgtaatgttgaattcagagaaagtgctccctgtttgtgtattgaacaaattgaaagaaagggagaaagtggttttctgttcacatagaaatggattttatgttacagcatagtgtggagtggttgcagctcacaaaggttaaaacttttaccatctgggtctttacagaaaaagtttatcaacccgagcactatgcagaattacacatacagattttagggtgtgggcaatggcgagcctttgaaggtttttatactatgggagggacctgctgtgaccagggttttcagaggcttcaggaagcagagtgtaggatgannnnnnnnnnnnnnnnnnnnnnnnnnnnnnnnnnnnnnnnnnnnnnnnnnnnnnnnnnnnnnnnnnnnnnnnnnnnnnnnnnnnnnnnnnnnnnnnnnnnnnnnnnnnnnnnnnnnnnnnnnnnnnnnnnnnnnnnnnnnnnnnnnnnnnnnnnnnnnnnnnnnnnnnnnnnnnnnnnnnnnnnnnnnnnnnnnnnnnnnnnnnnnnnnnnnnnnnnnnnnnnnnnnnnnnnnnnnnnnnnnnnnnnnnnnnnnnnnnnnnnnnnnnnnnnnnnnnnnnnnnnnnnnnnnnnnnnnnnnnnnnnnnnnnnnnnnnnnnnnnnnnnnnnnnnnnnnnnnnnnnnnnnnnnnnnnnnnnnnnnnnnnnnnnnnnnnnnnnnnnnnnnnnnnnnnnnnnnnnnnnnnnnnnnnnnnnnnnnnnnnnnnnnnnnnnnnnnnnnnnnnnnnnnnnnnnnnnnnnnnnnnnnnnnnnnnnnnnnnnnnnnnnnnnnnnnnnnnnnnnnnnnnnnnnnnnnnnnnnnnnnnnnnnnnnnnnnnnnnnnnnnnnnnnnnnnnnnnnnnnnnnnnnnnnnnnnnnnnnnnnnnnnnnnnnnnnnnnnnnnnnnnnnnnnnnnnnnnnnnnnnnnnnnnnnnnnnnnnnnnnnnnnnnnnnnnnnnnnnnnnnnnnnnnnnnnnnnnnnnnnnnnnnnnnnnnnnnnnnnnnnnnnnnnnnnnnnnnnnnnnnnnnnnnnnnnnnnnnnnnnnnnnnnnnnnnnnnnnnnnnnnnnnnnnnnnnnnnnnnnnnnnnnnnnnnnnnnnnnnnnnnnnnnnctcccagatggaccagaagggaggggagggcccagatgcagttctaggggaatagctaaatcaagagggtggtggagaggaaatgtcaaagagaggaaaaaagaacagtgggatcagaattgggagtgtgccatcatgtgttttattatcttttgtacttttctgtgtttaaacaaaggggtgggggaagggttgaagtggcaagaaaagagaatattgtgttttgttctctttcctgaatgtaagcctgcccaagccaamctttttattttttctgagcatttgcctcccttaattaacagcaatcataaaaattgaagatttcaatgagtcaagactctcagctagtatatgatccctgattctagcctcaaacattgaccaaatcatcttttgtaacttcttttaaaagtaaatatttgaatcttgaattcagggcaaatacattagttgcaacaaaagtttggtgtacagatcaaggctactaatgttttacttttattccccttccaagaaactattgtgtaagatttatttggcaaaacctaatcagccagcttttaccagatatagccaaataaggacaggacattccaaaaagcccagagctgggctgtgtggccccagtaagatggacattctaataacttaaagagaagtctagccccttaggtaattaagaatggacattctgaatttttgttgtctatccttctttcagcacacatgtaattatattctgatgttttaaatgtatctattttccttcccagacttggagtctcacaatgacaaggactggttccttttatttttcactttggctccagcaacytaacagacggaactgatctgaatactctccccmccctgcctccagcccctgtttccaatacgtagacttgtgaaataatatagcacatccaaaatcaaaataaagacgtggaaatgcccagctgctaagaaacaaagaaacaactttaaatctaagaatggcagactcaggggttgatgatgtggcggggagggctgctggatgcttatagacyttaagggctggaactcagatttgaatgcccacatgggcagaggggacagagcyttgggtccatgtgaggctctgagaacctgcacacagcyttgataatgaaagagtttcccctcagtaaagccaacaggccccaggggagcaacaaggaaacttaactttacccatggctcctcagttggccaaaaacatctctcaccaaaaagtgaatatcaaaattgtgtcatatatgggcatgcaggttacatttatagttcctgtaaagcaaaggtaatgccaaggtaagaaattaatatgaaaactagtcccaaaccagtgaaaaccttggggtgccaaatggaaataaaggaaaaactggcagtgacctggggtgtatgggaatcccatagaaaaacagaatatcctgaaaatgagtttataaagattacatactatactacatcaggaaatgtccactgttgaggagagtcagcagaaataacaaagaggagcgttagcccttaacaacttaacagaacaatctaaaagagactatagaattgctatgtttaaaatcattttaaaaagataaaaaaaggaatataaactgtaagacaagaccggaaacagtaaaaaaaaaaataagtggaagtgaaaaaaataacttttggaaatgagcaaaaaaagcagtcattgaaataaaaaactcaatggatggcttaaacagaagattagatgcagctgtaaggagaattagtgaactggaaattatccagtaggccacgcagatcaaagaagaaaaagatgagcactaaagaaatatggagaataggttgaaagggtccaaaatacatttaataggaattttagaaagaatagagtgaaaagggagagatagtatgcaaaaagatagtggcttataattttcaagaactgacttaaggcatgatatttctgcttgaggaaacacaaaatgtttcctttctctctagtgcatcatagtaaaactgcagaatatcaaagacaaaggaaaaagaaatcttttctttcctttttttttttttgagacaggatctcatcctgtagcccaggctggagtgcagtggttcaatcacagctcactgcagccttgatctcccaggttcaagtgatcccccacctcagcctctgaagtagttgggactacaggtgcatgccacyacatccagctaatatttgtacgttttgtagaaacagggtttcgccatgttgcccagggtgcccccatctcagcctcacaaagcgctgggattagaggtgtgagccacagtgcccagctagaaaaagaaaccttaaaagaaaccagagaaaaaggatggatcatatacaatggaaccatgattaggcgacagcagattcatcagtaacgaccaggtccagaagtcagtgtaaacatagtatttatatctgagttgcttggtgcaatgttgaattcagagaaagtgctccctgtttgtgtattgaacaaattgaaagaaagggagaaagtggttttctgttcacatagaaatggatttttggttacaggaagaatgattctcctacaagtatactgttgtgaaaaaaggacttgcagtcaaaagatccaagtcctatttatttatttatttatttatttatttatttatttatttttaccatatgacttcggacttctctgagttcacttttctctattgtaaaatggggtctacattgcattctggaaaatcgtatccaaaccacatccactgagcaatctgtagacctcattcagcattggtcctggggatatatcatctaataagacaaaatccctgtccccaacaagctgccagcctggccagggagtgactgagggtgcaggccattgatcaccacccagggtgacaagtgcagtaggtacagtgtgacatgaacatagaaaggagctaaaggtagcaggggcctaaagattaagaagggataggaggagaaagtggaagtatattttatttgagaaaatggcatggacaagcatttaactgcacagaccattgtggaaaatgcaggtcgtgttgcatcagaaaatgatgcatgggagcaaatggtgtgagggtcagggagacaaggaggaaggaggtgaagcaaagaggtgggcaaggaccatatccagccaggacttgtgtgcctggctaagaaccctgggtttcaccctggaagagagtgggtgccagagaaggcccatgttgctgccctgcctgcttcgcaaggggagagcacaaaatgagaaaatgttcttccagagcttcgtgcatcatacaaaaagccgggcagttggggagactagagttaaaggtaatgataatgccctttgattgggcaacactcttcttagctacactttctctctctaaacaggtgatgaaattctggagctcaatggtgaatcaatggctggactaacacatcaggatgctttgcagaagttcaaggtgaccatttcttatcaacacgtgaccaaactctggggccttcaggcaaagaaaccaagctctcagcatccaaacctacaaattcaaactgtggaacccttcacatgaggcacctcactgatgctgatcttggcgcagggttaaaagaagacctgactcagaaaataatagtgtgatcgggattgttgtgggggattttaaaactctttaatatttataaaattgttttaaaacactctgtgtatttatcatggtatatttacaaatctgttttaagtttttaagataattgctaaatgatattcctaagtctccatctagttagttcaattcatgactctatccatccatctatctattatcaatcaatctatctatctatctctatctattcatccatctatctatccatccatctattcatccatctatctatccttccatctatctatctattcatccatctatctggcatatgtaaatatatatagtagttgtgtgtatatatacaaatatgtcataatataatttgtaacatgtatgaatatatgcgcacatttatatttcatacacatacacacacacagaggtgtgtttccttaaacagtatttcttcatctcaccctggattgctgctgggtgttgtagccctctctctttctttcagcaagccaaaaaggggctcctcaccctcaccgtgagaacccgcctgacggcgcctccttccctgtgcagccacctgtctcccccactgtgccgctccctgagctccagcacttgtatcaccaaggacagcagctccttcgccttggaaagcccctcggctcccatcagcaccgccaagcccaattacagaatcatggtggaggtttctctgcagaaaggtaggagtgctgcagctgtgtcccgtgcctgggtctcccagcactggctgagtctcccaggctttcctcacttggaatcagtccagaggtagggcaggatgttgtcttttagcacattttacagctactgcttggagccaggtcgagtcttctgtttatagaagctcaagacataccattcgaacctagtcaatgtgttctgggtcagtggtttaaataaagcaaaacaaagcaaagaaaaactcaaacacaaaaatacccagagagagagagagagaaacaatgggccaggagtggtagctctgcagtaaatatgctaagacgccctgggcaggccaccttcccttccctgggcctcagtttccctacctgtggcagagaattgaggtcctttctacctctgacattcaggaacagacagccattccctttgccacccccccaggtgggggctcggagccctctctgcctgaatgcaaccgaactgagacctggaggataaagaggaggcagcgaggcacagagctgggctccagcacaggggccagcatgtgttctaggagcagaatgaaggccagcatggctggagctaggtgggcagagtgagagctgacatcagggtacttggcagaggcagagagaccctgtggggctttgcagctcgattctcttctaactggagttggaaatcctttatagatttctaagcaggcgagtgacacatcagcttatgcttcaaaaaatgtctcctagggttcttcacggagaatggcccatagtgtgacaaaagtagaggcttggaatccacttgcagccatttgggtcagggattgggagtagtggatttggagagaagaggatgggcttgagatatattgtcgaagtggaagggaagcatacatagttaattccttgcatacagctttgcctgatgtgtgttttaactctcctgctaggttgaaagctccctgaggcctcagatgcctctgtatgcctgcaagcctggcacaatgcttggcataaggactaggggcagacaagtctgtgctggcatggtcccaacagctgtaaccagggctcccgcagtgcatttgctgagcaggcataaaatgggaaaggcatggccttggagtggtgtttcctctgatcactggcatcagaaacaccttagggaggatttttgtttgctcattttatataatgcagcttcttagactccacccccagagattttgcttcaacagtgtttgttcaacaagttgaggtgaggccaagggatccacattctaaacaagtatcttatgcaattctgacgcccattagactgaaaaacttgctctagtcaggacacctgggctgtgggaagggctctgacttttaccaaattcttcatccataaaatgggattgccaacaattgtcacggcctccctcatgggactgctgggaggaccagcatgagaaggtgaaaacatttgccaaagtgctctgtaaatcatacgtgtcgaaagaaaactgtaaagggccttcccccacactgtgctcactccatctggtcctccttgctgacagctcctcgttttccaggcgtttccatgttggtgagccccaggccctcctctcccacacactgggggatcccatccagccccacggccctaacaccacctacatgcagctacgttcaaactttcagcttccaccctgctttctcctctgggttccggcttcatctgtgcaaacatctgctctacacgtcgctgggatagtcccagacatcctgacagcacccccttgcctgtgmagccacctgaagtatccattcctcactttccagcacattgcacatgtcatttgggcaaagctgaaccccccagtcttaccctcataatcctgggcttccatagccctccctgctttggtaaatcacattaccatctgcccagttactcaagccaaacagatctccaagttattttgattttatttgttaagtttctatacttcatccatcagcaagtctatcttcaaaatatcttccatgggcatccgtttctttccatcttcactrgaggtgaagtccaaggccaccactgtttctctcaacagaggcctcttagctggtcttcttgcttccattctccatgacccatagttctttcccttcacagtagccagatgtgttcataaaaataggaatgagatcatgtcacttccttgttcacagttctcctatggcatcccttctcagtagagaataaacccgttcactgacatgccattgttgacacagccccactgaatctgcgcttgatccctctctctcaccgtcatgtgctgctctcccatgcaggctgtgtccctgccacactggcctttctggtcctgcaacatggcatgcttgcttttgccctggggcctttgcgttggctgtttctgcttctgagatgctctgccccatctcttcacccctaactcttgtcacttgtattttagcccaactggtgtctcctctgaggcctgaagtagccatccctcactttccagcacattctgcgtacattcaccacataatacttatcactcttagatactgtcctctcttctcatctagctccctccttccctccttcccttcctccctccttcgctccttccttcctagtctttccccactattccttgcctgccttggtcactgttctgaccctagagcggtgcctgcacacaacgactactctgtgaatacgggtgggatgaaagctgtaataaccagggggccatgtctgtggcacccaatcgacgagtaggccccctgggaaagctcagtcccggtctccccaccccgccctgttctgcttccagaggccggcgtgggcctgggcatcggcctgtgcagcgttccctacttccaatgcatctctggcattttcgtccacacgctgtcaccaggatccgtggcgcacctggacggacgtctccggtatgtcctcacttctgtttctgaatatacccccgacttacaaccaggaaagaaataccttagaatgtcgggagattgatttggacatgagctataaagaatgatcttgtggtggagatcagccgctccgcccgccaggacaccccctgttgtgggcactggctggggaggggcaggcctccttcctgccccccaggacactcttgggagatgcatttgcaatctggctcagagggagggagtgaggctttgcaccccagcccctctccaggccactgggagggtgggtgctggctgagcccccagggctagcaggagcggggtggacagggtctttgttctcagctcccacagcagagccaggtgtgggtcctgccaggaccagaccgaggtggggcggcctaaataccacatcccgctgtggccagcacacccctgaccctgcacacatttgtaaccctgagaaattccagggctgggccgggaggcagagaagctggaggggatgtctgaggccatacccagtgggctggttcaagcctgtggctggagctggggtctgtttatctaataaagccccacaggtgcctcaaaaaaaaaamcccaaaaaccaaacaaacaaaaaaaagagaatgatctgggcatagctcagagccrtgttcctcaaagtgtggtctggaccagcagaatcaatgtcaactgggaacttgttagaaatgtggaatctcagacgcccggacccagacctgctgaacgaggacctgcattctaacaaaatccccatgaatgtgtatgcatgttacagcttaagaagcatcgtctcagagaatgccagtccaacatagaaaacacactttaattaagatttaactaatattgaatttacaatgacataaataggagctttgatgaggttaatctatgaattctatatggaaatggtggcttaatgacaaaaatattagtaagttgggcaccatggttcacacctataatcccagcgctttgggaggctgaggcgagtgaatggcctgagctcaggagttcaagaccagcctgggcaacatggcaaaacccatctctactaaacataaaaattagccaagtgtggtggcaccttcctgtaatcccagttacttgggaggctgaggcaggaggctcacttgagccagggaggcagaggttgcagtaagccaagatcgcaccattgcacttcagcctgggcaacagagcaagaccctgtctcagaaaaaaaaaaaaaaaaaaagagagragatatcagtaagagaaatacaggttctttctcccataaacaatatatttctgggtactccagatatattttttataaataatttctaagagaagttcaaatctaatttctttcaataactgatctggatttgatttaaaaatttatcctatttaatttgttacaatactttgcactctaacatttgtgtatagtgcaaatatatcatctctcactggttttgggttttcctaaatcaggagagttttgccatccttttaaagggtttcctacaattgcagtgtatggaaaagccatccctgcttatgatgctgtctctctggagcttctgaattagaaagggatttgctgttatctgcgggagggtggcaggtgatttgctgagctgctctgctggtttgtggcacatactgcaggttccatgtggttgtcttggtcctagtaccctcggacagagagtacctccttcttagatctgcagtggagtagggattgttctggaagcttctgctttccttagcatctggtgctatacaaccatggccttcagttacagcagtaaaaaggaagcaagggtgaaggaggatgaactcagcagaaggaagtcacagaacacagcaggggacacagggaaatcagcctcaggaggctagagttccaatcctggacctgctgatgaccaactaggccaggggtctgcaaactggggcctatcactgttttggttttgttgttgttgttgttttaataaaattatattggaacaaagccatgctcatttgtttatgcctcgtctatggccacagctgtcatgctattaatataacagcagagttgaatagtttcgataaagacagtatggcaaagcatgcaacaccaaaaatatttactctctggccctttgcagaaaaagtttgtcaattcctgagcagacctagatcagggaaatctattcaacctctgcaactcaatttccctatctaggtcgggaaggggactggattatacaaatcttccatgtatctatgtgaccccgtgtttcctaccttttttttttttaaggtttaggttgctattaactcccttcccacctcacaactagaatgaatgccatcaccttttctccttatttctttttgcaagaatctcaactgctctcctgttgagttattttttctctgccttttagcacatgtaggatgttaggtccgatattcaacatcctgtgtgtgctatgttagatccaatccttccttctaactagtctacttatgggaacacagaggcccaaggagaggatgtggtggattaaatcctggttaattgttatttagttgaattggctaacccacaccctcagtctttaatgggcatagttaaatgtgaaaagaaggaggaaagttacagatgaacttttgttaatgttgacccacygtaaataggaaatgtctgctgctttgtggttgtacggtaagggggtatgggatatgctactttggtctgccctgttctgagttttggtctggtggctagtggggtctacttattcatgtgatttttatatctcatcaaacagcccagccaggagtgggcccctggggcagtgactgttcaaatgtctcattgattcacttactgatggcttcttattgatgcttgcacaggtgtggggacgagattgtggaaatcagtgattcccctgtgcactgcctgacgctcaatgaagtctacacgatcctgagtcactgtgatcccggtccagtcyccatcattgttagccgacatccagacccacaggtaacacccactgggttatcctcttcttytcaggctcactcgttcagtaccaaaattggaacaagaaatagatgaaaacagagatgttgctggctgggtttgtacctgaattcccaagaatcccttccaagtttctgtagtaagaattgtctgcagcagaggtccactaacaaactcctagatatcagaggcaattgacattaacttagggaagctcttacagctgagttataagctctggggcaggaaagtagagacccagggtcccagctagtagaccaagaaatttattcatttatgcgtctagtaggtacccactgtgggaatgtctggaggyaggtactgaagatacagaggcaagttcatagcacacagtcctgccctgcagaagctcacagtatcaataaagagcctgacatacaaataattgcaaaacagagatggtaagtcctatgagaatacaggaatatagcagggaatggttgataaagtaaaaaaataccagaggttagttttctccaggcagagaatataaggaagatcattccaggaggtgggaacacaaaattcaatgtcacagagtcaaaaagggacctgacatggaaggagaggagtgggttctgtggggctggaatgtagggtactaggtaagagtgactgagaacagatgttggcagggcattggggttacactgcagagggctttcaacaggatactaaagagtttgcattttattctacatagtgaggagctatgggaggtctgtagctgtagaaggagcatgttcatattttaatttttaaacctttgattgcactgtagaagacaggatagagtgggtggagtgtggggtttgtaagaggaaggaagctgatggtgagagcctgaactacacagcagccatgagaagagaaaagagaaggggcaatgtattagtctgttctcccgctgttgatagacacatacctgagactgggtagtttataaagaaaaagagatttaatagacttacagttccatgtggctggggaggcctcacaatcacrgcagaaggtgaaaggcatgtcttacatgatggcagacaagagagaataagagccaagtgaaaggggaaaccccttataaaatcgtcagatcttgtgagacttattcactrtcatgagaacagaatgggggaaactgcccctatgactcaattatctcccaccaggtccctcccacaacatgtgggaattatgggagctaaaactcaagataagatttgggtagggacacagacaaaccatatcaggcaacatgaggcaatgcttgggaagactcaacaagagctgctgggcaagtggctctggggtaagagagggaggaacygaagatatctcgaatatttttagattggaagactgagcaatggtcttccaccagaagagagaagaggaaaaggtagcaggcttgggagggagagaagagcatgatcttactgtgggacatagtgaggtggaggtaccacggggtgtccaggtaaagatgcccagtaggcaagttagacttagggctgatagcaactataacaggaacccaggctggagctagacttgggggttgaatccctgctgttggtgagagctctggggaacctggaataatcaccacaaagaattatttaatcttaatatgcaccaggcatgtttttcaaagatgtgacccacacaactgcatttagttgttgtgcagcctcctgaaatcagtgtgatatttcccccccaactcacagatgaggaaactgaggcttagaaaggacaaataagtttcccaatggtgaagctactaagtaaagaagctaagatttaaatccagcaaagcctgtgctttgaactcactgactcccaaactcccagtgacacttggacagagtggagtaatgagggaaatcaatatataatggtgtggtggaattcaaacccagccccattctgtggattgcacactggagctaaacacaatcagagacaagcaaacttcttaattaaggcaaacaaataattggcctaaatctctggacaatwcaagaaaagaaagaggtcccaattaatttgtcatttcctcctgctgcttttaggactacggcagaaaatcagtggagtagggcgtcaggttgtgggcaaatgctgtagccctgggcttaaggaatgtgcattctcccagagacatgggacacacacagagaggccacagaggtgagggccttgagagtgagggagctggagttccagctgctcagataagggagccaggccagaaaggacaggtaaggtttagagcagcagaaagacgaagacaccctaggccgtggagatccaggggcacaggcatagggcagagagaagagagccaggcccagcagcagaatgcctggcatgtgtccagtctgctgcttatggttaatttgggcaactcatctaacctccaagagcctctggttcctcaactctgacataggggagtggtctttaccttacaggactgttgtggatggtaactctcctctagtaagagtttaccatctgccaggcattgtgccgcagactttaaatgatttatttattgttgtttattgtggtaaaatacacataacataaaatttaccatcttaaccattttttaagtgtacagttcagtggcattaaggacattctcattgttgtgcaaccattgccaccatccgtctccasaactctttccatctttcagaatttaaactctaccagttaaacaagtccctatgttctcctaccagcaaatcctgggaaccaccattttactttctgtctctgtgattttgactactctacgttcatcgaagtggaatcatataaaatgggtccttttgtgtctgccttatttgacttcgcgtaatgtcctcaaggttcatttatgttgtagcacgggccagaatttccttcctttttaaggtcgaataatcttctagtatgtgtatgtgtgtgtgtgtgtgtgtgcstgtgtgtgtatcacatgctgtttatcatctgtttttgggtacttgggttgtttccaccttttgactattgtgaataatgctacaatgaacgtggagtacagattcctctgagatactgacttcccttcttttagggtatatacccagaagtggaattgctgggtcatatggtaattctatttttaagtttttgaggagccttcaaactattttccacagtggctacaccattttacattcttatcaacagagcccaagggtcccgatttctccatatccttgccaatactttgttattttcttttctttttttgagactgagtctcactctgtcacccaggctcgagcgcagtggcacgatcttggctcactgcactgggttcaagtgattctcccacctcagcctccctagtagcagggattataggtgtgtaccactgcacaggctaatttttgtatttttagtagcgatgggctttcaccatgttggtcagcctggtctcgaactcctgacctcaagtgatctgcctgcctcagcctcccagagtgctgggattagaagcatgagctaccatgcccagcctcttttctttttgtttatagtagccatcctaatgtcctaatgtgtgtgaggtggtaactcagtgtggttgtgatttgcatttacctaatcattagtgatgttgagcattttttcatttgctttttggctgtttgtatatcttctttgaagaaatgtctattcaggttctgtgcccagtttttaatcaggttgttttgttgttgttgttgttgctgagttgtaggagttctttatataatctgcaactcaactatttatctgaaatatgatttgcgaatattttctccaattctatgagttgccttttcaatctgttgatgatgtccttttgatgcacagaagtttttgattttcacatagtccaatttatctatttttttgtttcctgtacttttgatgtcaaataatttatttttaaaaaacctgtcctcattttgaagtgggttttattattgttattattttacagaaggaagaaatggaggctcaggaggttaagtaacttgtctaggtgttcacacctagacagtagaggaaccgggactagaacacaagcctttttgactctaggactcatactcttaactattactccaaagtgataataaactgtgagtcacagctcagacastataatagtgattgtgattattacgatattgttgataatgatgatgtcatgacagcattgccaagaacggactagctcatagagataacctatgaagtggtaactttgcctagaattttccagcaagtagtggggagaaggttggagagttgagggggcctccttgggaacccctgcattgatagactttggactttatctagaagatactgaggaaccattgattcccggggtatttctggaaatggaattcatcagctatttgcagagtgggttgaaataaaataatttagaatccagtggcccagctttggagctggtacggggctgggagcctgatgcaggagcttctactgtttgtttgaggagatgactgatattttctaggtctctgaacagcaactcaaagaagctgtggcccaggctgtggaaaacaccaagtttggaaaggagaggcatcartggagtctggaaggtaagacaaatggtgaactttgatgtaaaatatctttgccttcttagaaagcttaggatttatccattaactcatcctctatccaaggaatagtaacagcatttaccatagaccagcatagtatgtagacaaaggctgaaaactagcagcccaccagctaaatttagcttatatttttgctttgtttggaagacacaagattttaaaagcatctgaatttaaattgctacaaatgtgccaggctctctccagctccckgtggtctccaccgttccctttatcctgtaccaagttgccattcacacaatagcccctgcaggcacttgagtttgcagcccctagtttataataatagaatattagaaaaactaacatttgggaatataattctgacatttatttaattcttataattcttataataaatcagagactatgctaattcatgcattcacacataatttttatgcaaattttataasaaaaagtgaggccctcagagactctcttactcaaagtcataccactagagcacagaggctctggaatggagatccagctggcttgactcccatgcctagccattgggcattaatcacrtctaccatggaacatccttatgaaagaacaacatgcaaccattggcactgatattgacaagaaattaaatgatctggggaaatgttcagagaaaagaacagaacacaatttatttcagctctggtttattatttctacccacccaacatgcatatatgctcgggaaagcatgacagagaaactcaccaaaattttgacagtagttatttctggctgataggaacacaggtgaagtgaatttttactttcattccttcctccttgtggctgagttttctctaaggaggatgcattatttcatgatcaggaaaaaaaaaaagaaaactttttatttaaagagaaagtgagttaggagcttggctggccttggttctctctcatggggctcctctggctttcttggtctctcagaatgagctggaatttgagcaagagactagatttcaatcctctcccaccccttcaagctgtgattttaggaaaggggcacccttgacagcttaccactagagagaagggcctctcaaggatgtgtgggtagccctagtgctggaaactagggtagggggtactgagaaccaggaagggctaatggggagggagggaggaaggtgcagtggctaagaaatagcggctttctgccctcacctcaccctcaactggaaagaaatagtgacttcttcgtgtaagattcaaagtgccttgacaggtagtttctctgtctttgttattgagcctcaaaataaccccagtgactttaaaattatcatcctcattttacagatgcagaaatggagttgggtcccccaggaagctgactctgagatggagtttggtctgcaggcagtgtcctggggttcactacctgtggcagggaggggagcaggcaggktagacagagggaggayggagctgaggtgcacacccaacagcttcagccaagccctggagctctgcagccaaagtccccattagagttgtcctatgttggccaacatagctgggcctctgtaaccctatctccagcagtccctggagatgggctgccccattggacaaggcagctgtctgcagctgtggcagcccctggagggacccacagctgaaagtagtctgccagcagcactccccacagctgggacaccaagcccttcctcgatgggtgatctgggtggcatatctccatatacatcagtcataggctcagaaagcttgaatgattttcccaacccaaagtcatacagctcgccagggaccaacaccaagactgccatactccagatccacagtgacttcagataagaagcagatggccgatgtgcagtgtgctgcccgtggcagtcacaggtgaggccagggggtatttctgttttctgaagctcagctgtgaagattctcttgtgcttcccacacaggtgtcaaaaggctggaaagcagttggcaygggcggcccaccttggagaaggaacgagagaagaactcagcacccccgcatcgcagggctcagaaggtcatgatccgctccagcagtgacagcagctacatgtctgggtccccagggggaagtcctgggagtggcagtgctgagaagccgtcctctgacgtggacatcagcacacacagccccagcttgcctctggcacgggagccagtggtgctttctatagcatcctccaggctgccccaggagagcccacccctcccagagagccgggacagccacccgccgctgagactgaagaaatcctttgagattttggtgagaaagcctatgtcctccaagcccaacctccacccagaaaatactttaaaagtgacagtgaccctcagaagagtctggaagagagagagaactcctcatgctcttctgggcacaccccacccacctgtggccaggtaagaggatgggtccacaggttgagtgtttccaggaccagactcaaatcttgagcatgggcaaattagcaagttagtgttagcagggccagaatgaaagtttctcctgctccaccagagagaaactgttgcctaggactcagctgaggactgaccatgaaaagatgggtttgaaggttgacagataattgaagtcccagtcctgcttgctggcatctgggttcccacccataacacactggaatttaaggttcctttcttgtgtcatttttcactcaccatgaaggaaaaataccagggcccctgcagggtctcagtctttgcatgtggatctttgagtgtcctgcttgtagggagaatagtggcttaaataactaaaaaggggcctggcacggtggctcatgcctgtaatcccagcactttgggaggctgagccgggtggatcatgagctcaggagttcaagaccagcctggccaagatggtgaaaccctgtctctactaacaatacaaaaattagccgggtatggtggcaggtgcctgtaatcccagctacgcaggaggctgaggcagggaattgcttaaaccygggaggagtggctccttccaagggctattgtgaggattaaaggtaaccacttaaggcaagtacctgacagcatctcaggcatattagcattcattgccatgatctttccccatcaggccccttaaagccctcctttccaccccttgcataaaaggcagactgactgacagacagctgctgtgtctagaaccattttatgcgcaggctaaccacactgagtactttcatgtacattgtgtcaattaaatcttacaaccacctgatggtgagagtcccagttgtgcaaagagggaactgagaaactcgctcaagttcacattgctagtgggtcacagttacccactatgcaatgctgagtttcccatccttacccagaagctgtctsccccatcacggaatggccctgcaggggccctggcccttcccttaagcacaccgtgggcaggtgggagggggcctctggaaatcccctaaaacaatctacagtgagggttggcaagcttcaggaggggtagcggtggagacgggatgttgagtaggaggggtgaaagtgaaggagggaggaggaagccaggttactaaaaaggaagtgcagttttgcagagcgctggcaggatgtggctggttagcaacacatgatggagttatcagatggatctgttctcccaccccctcttttaagcccatatttcattttcccttgggcctgagacctatgagtccagaagggcaaatcaggagcagccagctgagaagccagtcattttgccttcctcctggaggcccagaaaaggagtgcagttgccacagcaggtctgtcccagtgatgcccttggcagagccacatagggtcagggaatattcccgagtaaggcgtctggagaaggaactggggtgtcctcagggaagcccaggcaaggaacttcccacaggtcatctttcatgccctgtgtgcctcagcagaatacagggctccctcctgtacctgcccccaacagcaccgtctcctggagacaaggccgttctgcagctgccctcctctgtttgctctggtctgtcccacgtggccagcagatccttctcccacaaacatttccataaaagcaatcagcacgacataattttattgggcactggagaggcgggggtcacagagaaaggatcatagcacgcaatagaaaacaggaagcaatttgcttgaggtcactctcaaaatttccttgaccattcctggggatttctcactggatgttttcttccgtggccacagtgtccactgtctcactctcccacttttccctccctgcagtcttttctctacagggtcccaagactgttgtcaagctgctatggatgacccccaagtctttcccatctactctaattcaaggggacttaactctcacaaccaatatgaactttgggatattttcttcaacaaaaaactaacatccctcttataaaaaatcagcctaaactctcccccgtgctttaaaaaacttgcttaaaaaaacacaacaggattttcgaagaatcctttcttagaaaacaaacaaaaaaaccaaacaaaaacgtactttctccccactatgctgaatctgctctctccctctttccttctttctcttctccctccctcatccaccaagcatggttccaggaaacactagtaagagaaaaatttgtgtaaaatcaaatttatttcaggggctaattctgaagtctcccatgaagaggatgcaatattggatgtgttgatgaaaagacaaaacacatttgtgctgttctaagttgtaaagctgcattgactgcagttggtatcacatgtggctgcctgtaaaagagctaacaatycatgaatgtcaacagatgtcaacttacagagctcccaaccaggtgaaattaaatttcatccccatgtaatttctcttgtggacaagagacttagagatcatcaggccaatatttggagcttctaatgccatgactcagccttactttttttaagggctagttcgagaagctcaatgattcctttgaaattggttgatctctcagtatttcataatgctctcctaaagctcagttctacagtagggaactcgagctgaggcaatgctctgtgaatacacttctaacttttgtagacctttgcttcctccaaaatgtttattgtcaatgtagatcttaaatttcaggtcatggatatttgccattgcttttttagtcccaaaggatgcatttgttccttcctctttccttcctctctggaaggaagcctgcagccatgtcaaatggcccatcattacacaaatctggaatgaaccggacgtggaggccaccgcagtatagcaaagcatttctcttgcagacaatcaaatacaggtggcatcattttgatgatgtctgctttctcaatctttttttccagatgggtattatgtttggttgggctatgtctctggaacactatttttctgcctctctgcctgcaaaattcttactctgtttatgaagcagacagaaagtacttctctaggaagccttctccacctctgggatggaactggtctctctgtttcctctgggccctgacagtaccttaagcacactgtgtgataatccaaactcttcaagtattgcatagctattcagagcctggttcatcttgtccctaggctgttttgggaggaccccaaggctgcatccaggctcagtggtggaaacaattctgcaacagattgaggatgtcaccctaggtgccacagaggggagcaatggcacaggtgctgagtatctgtcatcttttgcagaacacttactaaatatttgaagagtgcttaacaagtgacagcaattgacaagcattttcctgagtgctctaaccttagggaacactagctgccaggtttttttgctgccttgtttctacgctgccctataccctcccggggtgggtagttcaccagatgcagttgtaactgaagcaatgccagtccctccacactcaaagccttttgttcctatcataaagagtcagggtcttcaagtatgtcaacagtatgagcccatgacctggataccaggttgctggaagtcaagggatgctctgcatgtctaggaggtgctggctctgccacgtcagcaccaaggagaaaagaatcctctttacatggctgctgatgaacttctcactgaaagcagctcaatatccgtttttccgtcccaatcaaagcgtgtctcgccttctcacagcttgaggctaccgttttgacatggtctcgcttcctgtttacaccacaggaagcgagagagctgctgccactgctgctaccacaggaagacacagcagggagaagccctagtgcctctgccggctgcccaggacctggtatcggcccacagaccaagtcctccacagagggcgagccagggtggagaagagccagcccaggtaagctttcattgagatcttccaaaagraagggtcttttgaaaaaaggtgcagggataagataagagcacaaattggcctgaggatcagagtgctctgcattgacatcaccactggacctggctgatcaacagtcaagggttccaggtgctgggcagcagcaccgtggaggtgctgtccagggtggggagcctcctgggtggacgggtgatgctgtgggggtggcagsaggaatgcaggccattctggataattgggaggatggagcccttggaagaggtccaaagacacacccacccagccatcctgggcagctacctctagggtgccaacattccagttgcaacagtcctgctgcattcaggatttctgagtcagagaatgcaacgccagaaaagtataaatagcatstaccagtggtcacctcctccatgaggtggatagcaagggtgtgtccacatggtacacctgacaatgctaagacatgacttgaatatttatttgcttgctagagagagcataggacttgaagtcagggaatcctggatctgtctgtcattagtatgattctgagcaacctactttgcctttctgagcccagattcactcatcagcaatgtgtggaagagcacgtagaccccaagcatatgatgcattcagcaagcacacattgaatgctggcttcgtgaggccctgtgctagatgctggggggagagagagaaagggatgagaccaggtagtcaggtcctgcctccaaggagcaactagtagtggcaggaaataaacatatagactataaaacatatgactgtttgagtaacactacagaaaagctcatgaaagacttttggagggctaagggacattttggaaagatctagcacatctcacccagagcagaggccctgtgggtggaggctcctctcccttagtcaccctaattgaggaacattctagcaaaagcaaacgcctcagtgtttaactgacaggaggttgtcactccaatctgcaaagggcttgcctgtggaacytctgcctcctgattctcacaacagcaccttacagccaagccattcaaaaatgcagaaacaggctggaggcctgggctcacttgcccaaggccagtctcttagattgtgcagaatttctctttgatatcatcaaggtgtaatgctccatgattcacttcttttgaaacctggcattgagacaagggacaggagggatcagagttccttcaactgggttgcgttccagtagcaagcatcccccaaggcacacaggccagcctccctctgcccctgggaaagagagccaggacaccctctcccttacccatgcagayatgatgctggttcaatgctggcttctgagaaagactcctatgtgctccagggcatgcctgaggtcctggctggcacagagcaggttgcacattgcaatcccctgctcatcacattcccaacacycaggytgcatcccaggtatcttcagtcagtacctaggggtgggcgtcagtatttttcagggccctccagattccagtatgtagccaaggtggagaatcctacttcacagattcctttctacctggaaccttttcatcagcttttgagggagggaaaacactcctttgccgagrgcaagctgatcaatgacctgtgtataggcagagcagcaaacacacggcttcagggccaggcaggtacatacatgggaaatgctggctgggtgagagggagcgtgaagagctgtgggaagccgaagtggccccatcagaagctgtgcacaggcaccttgtttttaatgacacgggtaggtcaaagcacaaacagctgccaactyatgacctttgtcttaaaagtttaaacggcaggagaactgctttggcttttacacatttaacatggtatcttggaggctccttagtgcagtagaaaggacatgaacttcaagagtcaggagacacagggtcttgcctgagcactgccatcagatggccccttacccttcttgaaatgtaatatgccagaggtcggcccagatattctctgagcacccttccaggcctaaaacactaggatactgtgagattaactcctacttctggtccttcactcctgcctgttggcagctcagtcaggtaatagcacctggagttcacccacctgggtgtcccccacttctgctaatctcctcctcttgaatccttcttgctrttcagcttggaaactagaatttaggaagaaaagtcactgtatgatgtaatgcacagctttggccttgtttctgcactgtagtgacccaaacatccccgataaaacacccactgcttaagaggcaggctcggatggactatagctttgataccacagccgaagacccttgggttaggrtttctgactgcatcaaaaacttatttagccccatcatgagtgagaaccatggccacatgcctctacagcccaatgccagcctgaatgaagaagaagggacacagggccacccagatgggaccccaccaaagctggacaccgccaatggcactcccaaagtttacaagtcagcagacagcagcactgtgaagaaaggtcctcctgtggctcccaagccagcctggtttcgccaaagcttgaaaggtttgaggaatcgtgcttcagacccaagagggctccctgatcctgccttgtccacccagccagcacctgcttccagggagcacctaggatcacacatccgggcctcctcctcctcctcctccatcaggcagagaatcagctcctttgaaacctttggctcctctcaactgcctgacaaaggagcccagagactgagcctccagccctcctctggggaggcagcaaaacctcttgggaagcatgaggaaggacggttttctggactcttggggcraggggctgcacccactcttgtgccccarcagcctgagcaagtactgtcctyggggtcccctgcagcctccgaggccagagacccaggtgtgtctgagtcccctcccccagggcggcagcccaatcagaaaactctcccccctggcccggacccgctcctaaggctgctgtcaacacaggctgaggaatctcaaggcccagtgctcaagatgcctagccagcgagcacggagcttccccctgaccaggtcccagtcctgtgagacgaagctacttgacgaaaagaccagcaaactctattctatcagcagccaagtgtcatcggctgtcatgaaatccttgctgtgccttccatcttctatctcctgtgcccagactccctgcatccccaaggaaggggcatctccaacatcawcatccaacgaagactcagctgcaaatggttctgctgaaacatctgccttggacacrgggttctcgctcaagtgagtttctacacccggtgtttctctttamctttctcatctttttctttctcatctttatttttaaaaataatyctatatataatttaaaaaattyccagatatattgattaaagaattgttctgcctctttctttccatgtgtgtgcagatgtctgagtgtgtgtgtgtctgtctgtaggtattacacctctgcctttcacattaaggaggagttttcacaacatctggcttcaggagggctgggaggtaggaggtgggactggctccctggtgaattgctcatgagggctgacatacgcctgtggagatttggaaggttgatgcacatctgaaatgtcctgcggttactcagaaagaccagaatgaggccaggaaattatccatcaggaattcttactctccaaatggaatccacttgtactctgcacrtgggttcaactccctcrtcagggagttaggatgtctgggtcctagtctcagcttaggcactgattctgactatgagcaggttctttccatgctcaccctcagattccttgtcagttgaaattaggagatggatgagaccttctatgcagaaccaagaggatgtcagacgtgccatagggtccctgctgtagggctggggcttggtcttccctctgatcaaagtagctctgcatttattagttttatttattattcttacactgctgggaaatatctgtagagtgaaggtatgctagtatctactcatagatttgttgcatcaaataatatgcacataagtgcttggcaccacacctgggacatagtaattatacaatcactgttacctctttttaatattgttgttcatactgtgtgttgtttctccttatgaaagcctttcagagctgagagaatatacagagggtctcacggaagccaaggaagacgatgatggggaccacagttcccttcagtctggtcagtccgttatctccctgctgagctcagaagaattaaaaaaactcatcgaggaggtgaaggttctggatgaagcaacattaaaggtaggtttcctttgtaagcatctgcagtaaccaatggcttattatggctgtgtggccaccttagttgggccagaggggaagtagcttgagtagcctgctcacatcagacccaggttgcgtcctgtgatggtgggacactgtagcacttgaccacagtaagaccttccatttgaagagagccttttagcttgtgaaccactttcagtagattgacttcttgcatcttcttttgtcattttataaatgagaaaggtaaggctcaatcaaggytacagaacctgggttttctgtctccaagttcaagttcagtgctgtttccacattccatgtgctgctgtcctggcatgtgtctgttgtgggatgctgtccattgtaaacaatgtgggttacaagagctctcacctggagctttcattatttccactgtgcatggagaggtggctgatcccagggctcacaagtcccccacgcttcagtcaagtcattctgaaagtctcacttcccatatgttttctgagcatgacccaaaggggtgtggggaggaagtggccaggctgagctggggccagcagtcaaatgagctcaggctcatgggtcctgcaccctctaggtgctgccccaggcctccgtaggcttttggcactagaatgatccaggctaggatgagaggataaggaggttctcgttttccatacaaggaggcctcatagctgcaatttccacatcaagagtgtaggtgagtctgatgagcccaaggtgctgctgtgctgagattctttcgctgtggctttcacttgtcacctgggaccatcatcccccaggatcttactcagtgcaaatgaaataacagaggcagagcgtgtaaaacacaaagagccatcctgcctgagctgctctggggagagtatttgctttctaacatgagaagagccttctacaaggcaagtaacctgatacttgggtaaaagttgagagagttgggctagtgttggggcttggaggtgagggtgcagtgaggtacattcatccttccatgcctttgggtcttaggggctccaagtcttaggatcatagggacagctgcaagtcaggtgctctagtgacgctgagcaagtgaattctttgacataagtttactccttagtgccaaggtacaaacaggtgccccaagaacctgtaggtktactttatttggtctgcatggtgatgaaaaaaatattgaattctatacatgataaaacctgaattgaaacctggactttagggaagtgatctggtagcgctagttctgtatgcctacgtagagctgaccctttgagcagatgtactcgttggcgctctgcagttcctatcacacatctgcccatttggctcattttagggacctgcctgactcctataggcatctgagtttgagacccctgctctagactggaataggagtctctgactgtgtcctggctccatgggagtccccgtctaggctaggaagtaccgtagtaatgtgtgtgtgtgtgtgtgtgtgtgtgtgkcacacttgcacactgtgcattggggcaggatgttagctgggcttccttagtgctgctgctgtgacccatggagaagtagaagggaagaaggagcaaccaattcctgcagaacagcactgacccctgttttgttttttgttgttttttttttttgttttgttttacctgaagtcctacaacctgacttcatctcacactgtccaatatgctgatttctggctgacttcatggcactccccctgcccggctgtggacagggtgaatgagagaggaaaataattatgcttgctgctttacatacattttttttttcttctaagcttcccatgactcctgaaggtccattctttacagatgaggaaactgaggtttgaggaggtgatgtaacttggaggctggccaagctggggtttgagataacaaatcagtctgatgtcagtcygatgttaaattgttcatcctcttgcagtaaaatgtttttgaatgtatgtatttcctctgcagcaattagacggcatccatgtcaccatcttacacaaggaggaaggtgctggtcttgggttcagcttggcaggaggagcagatctagaaaacaaggtgattacggtgagtggccaagtgaaggggcatgtcacagccagaggcaatggttctgggggagggggacayacttgccaggaaggggccctgtgctggggaaatgaagaatgcatgacactaggccactgggcaggtcctgtccactcagyacatcccagagcctgsggctgcgtggagagggtagcaggcctggccatgggcatcttttcctgtgggtcccactattctggctcatccaatctgatcagcattggctgctgccttcaggtcacctgtacctgacccagatggtttctggttctgccagttttgtggagccatgctgcggctgctcgctctctaaagccgagtgcattgctgtcatcccagggctgtgttgtctcagggtatcctttgtgtaggctgtgctgggctyatttgaatttccatgcccaactgaaaacaaatcctccagttcacagcatcagccagcattcaacataccacacccccttgcagtggcaatctggcatgttcctgcgtgtcacttcagagtcaatcatgtcagtggtgacttccttgatttcctgataagttytctatcacataaaaaacacttaaaacckgtaagtctctatttctctcactgagtgcagctgagtattacaaaaagattcctgaccgtgtagtttactktctacttgaagaggaggaaagagagcttgcctgtgggaatggcactttgggtatttttctctgtccatgagtagcaacttctgtccacgtcatctggccagtcacccttgagacactgcagacaacaggaaamtaggaggaaggcgcacatgttggctgrgcacatgcacaaaagcttctttctccttctgtgtttgagcatttctcttcctttccagatgattaraagggaactaacgtagagcaccatccacggccatgctgagcactcactgacctgttgtctaaattcatcctacccacactttggattgataaattggtggcatttatgcttcttttatagaggaggaacctgaggttcctcctttaattaactttaatcttcgttggcctaaaaatcctctagcattgaggaacctgaggctcagaggagaggttctgcttcatgcttggatgttacagcctggggattctaaccatgtaacagaatttttctaacaccaaaacaatttagagaagcaaagagctttgctcctatcataaaagcaaaactacaggtaccacattttagtggtttccatgcatgctatcactcagtcctcttaattataatggacctcattaaagaggctgaggcagagacatgagatatttttgtgtgtttgtttatcccacatatcttgcagaaaggggaccaagaggtgactggaggtaaagagtcagaatttctaggggrggagctataaaaatgtctagactgcctaggagagtgtttctcaaaatgcattctgccaaatgagaccgagaatttctctatgagaaaagaattctttgttgaaacactttgggaatccccataataccctgccaatacttagaaatctgccatgcagatttgcattgtagaccctctaaatgccttttgcttagaaatctgctgccatgcaaatttgcattgtagaccctctaatgccttttgctttttaaaagtagacaatgtcagagcttttgtttcacccagtattcctcaagtttctttgattttaaaaaatttttcttggccgggtgtggtggctcatacctgtaattccaacactgtgcggggccaaggtgagaggattgcttgagcccaggagtttgagaccatcctgggcaacactgggagaccctgtctctattttttaaaaaataataggaaaagcctttttcttacacaatacccgttaatatgccatagaatcagtgccttgagaaaactactctggggacttctgacctagggcaggtgaagcaaaagattttatatggaatcccaactagaatcgtggtggtacactatrggacgttgtgttgggatggattctgagggcttacctggtcattactgctggtgatctctgctctggatggagaaggagggaatgctggcctctgtgccagcagctccaatctaggacacaattatctttaatctttgttggcctaaaaatcctctagcattgactaaccggttcaatcctcctccagcaagtatgtggactggacttgtgtgatttctggtmctgacttcctttrgtttgctcaggttcacagagtgtttccaaakgggctggcctcccaggaagggactattcagaagggcaatgaggttctttccatcaacggcaagtctctcaaggggaccacgcaccrtgatgccttggcmatcctccgccaagctcgagagcccaggcaagctgtgattgtcacaagraagctgactccagaggccatgccygacctcaactcctccactgactctgcagcctcagcctctgcagccagtgatgtttctgtagaatctagtaagttctcccaactcagtggaagccacatgggccacatcctctttggccatttggggccagacctgatggggctactcagtaayttgtgaccccaagaatgtgtggctgcctagtacactgcctgagacgtgtttacatgtgcctgtgtgcaaacacgggggctgtatcaccccgggctcacttgaagcccagggcatctgtggcctgggagaggagaggatccctaacagagaccttgtgtttttctcagcagcagaggccacagtctgcacggtgacactggagaagatgtcggcagggctgggcttcagcctggaaggagggaagggctccctacacggagacaagcctctcaccattaacaggattttcaaaggtgtggggtgtgtctggttctttgcgtgctctccagttgtgggcatgtggccargcccccaaaaggcttctgggcactttctgggctatgttgtttcccacaactccatgtcctcttcataggcatgctggtccttttagggctcaattctgctttttctactttttctcctttgctcagacatcccctcaatcccccctctgttttgatgggtcttcaaaaatacctaagtcctgggcttggttcgggttggcagggccaggactctagagtggggcagtgaggcactggcctgtggggcagaattttaaaggggtgccaaaacactcagtaactcagatcgatactattttaatgcagcgtgttttttaaaattaattttaaaaaaacatgttggacaaaatatcmaagtttaaatcaagacagagtctgactttgtactgcacacttggcctcatttgccttaccstagtcctggacacgtcagctcctgcctttatttaaaatgttgatagatattttgttcatcagggattggagtacaaaccagtctgatrtgggggtcacttggatttccctgtgaaaatcatgaatgactgtggctaccatgtaaaaccatccctgattctttggtgttcctcaaattggaggtctccaagccacagagcaaggggttgtagagagaggagtactggacagggaggcaggtgggccaggttctagtcccagctctgcctgtaatgtgctgagtgacccttcccttctgggcctgaggctcttcatccataaaaggaggtaaagaggtacaggtgtgtgtctgagggctcttaggactgagacccaaagggactcttagctctgtccctcacccactatgagctcctgctgctgactggtttcgttagaggaagttctgctgcggctgcagaaacccagaaggtagagtgaggcttacatggcattccccccagaatccatgttaaccccaattctgggaaagatatttctaatttttgaaggtcaatttggaaggagcattgggttcaatgtcaagaggactagattccagtgttagttctgccacatgaccttggtagcatgatcttggacaagtcacttcaccaccatgggccyatttgcttaaatgtttaggatgagactgccagctgcagggtgatgttggaaggagagatgcagattctggagccagaaagtctgggttccagcccagggcccaccactagcagctatgaagctctgggccagttacttgagttcttggtttcctcagctgttaaaaggaaacacaaataatacacccctcataggattactrtcataaatgcaaaacattagcacaacgcctgttaaaataattgcccaatacactttagctatattttcattactatcattagtattatcttctactcttatcaggatttgtgaagatcactgtgtcaaatggatgggaaattttattttaatataaacagtaaaatagcattgttttcacttgcagctttgaaatagtgggggccatatatggttgtttccttttttakgtggacacagaggacttcgtgccagaggcaagatccctgtaaatattgttgcacaaaawtctcactagctctcttcccataccacccaatgctgatgtcctcaccacatgcggagaacaaatgtgaagggagtaggatattgggtcagtgtccaaagcagggtctgggcaggactcagctccccagagtcctctatgaactatggacggtgctccaggcaggctaaggcgtggagctgcctgatatttccctcccctggggacagcaagggctatccctttccaaaggccatggagagctggagcctggtgccctaacctctgagtcaccatcttaagagatgcctcattttagaaccaccaacaagcaagctcccaagggatggtgccctgttctctaccaagctatcctggctctttggagatcaaggagaggaggcaactttccttgttccccatcatctgtggaacccattaccttctccctcatttcaggagcagcctcagaacaaagtgagacagtccagcctggagatgaaatcttrcagctgggtggcactgccatgcagggcctcacacggtttgaagcctggaacatcatcaaggcactgcctgatggacctgtcacgattgtcatcaggagaaaaagcctccagtccaaggaaaccacagctgctggagactcctaggcaggacatgctgaagccaaagccaataacacacagctaacacacagctcccataaccgctgattctcagggtctctgctgccgccccacccagatgggggaaagcacaggtgggcttcccagtggctgctgcccaggcccagaccttctaggacgccacccagcaaaargttgttcctaaartaagggcagagtcacackggggcagctgatacaaattgcagactgtgtaaaaagagagcttaatgataatattgtggtgccacaaataaaatggatttattagaatttcatatgacattcatgcctggcttcgcaaaatgtttcaagtactgtaactgtgtcatgattcacccccaaacagtgacatttatttttctcatgaatctgcaatgtgggcagagattggaatgggcagctcatctctgtcccacttggcatcagctggcgtcatgcaaagtcatgcaaaggctgggaccacgtgagatcattcactcatacatctggccgttgatgttggctgggaactcacctggggctgctggcctgaatgcttataggtggcctctccttgtggcctgggcctcctcwcaacatggtgtctgkattcccaggatgagcatcccaggatcgcaagagccaygtagaagctgcatcttgtttatacctttgccttggaagttgcatggcatcacctccaccatactccatcagttagagctgacacaaacctgcctgggtttaaggggagaggaaatattgctggggtcatttatgaaaaatacagtttgtcacatgaaacatttgcaaaattgtttttggttggattggagaagtaatcctagggaagggtggtggagccagtaaacagaggagtacaggtgaagcaccaagctcaaagcgtggacaggtgtgccgacagaaggaaccagcgtgtatatgagggtatcaaataaaattgctactacttacctaccacatgccaagcactgtgctcagggctaaacgggcattgcctttagtgatcacagcagcttctacggtgtatggttctgtgccaatgtattgataagagggcacacactgtgtacagtaaatggcttatccagctggtgagtgatgcggcagattgagttttcttctgtgattcggtggagactatcagcccaagatgctttaagtgcacaacattacagggaatgcctgagtgcctggccaaagggatatttggtttggccatctctggatgcctgattgccaagctcaggaccaggcaatgtgactttgcatcagcaacaaccagcatcccttgaccaggcctgggccagagtattggtctcctctcagcccctgatcctgtgaagtaaggatgtgggggaagacctggcaaggacacagatgaaacacaaacaatagtaattctcaggccatcatcagtggagccatgttaatgtaatctgatggcttctccagggtccacaggaagtgaagaatctgtttcccagcagtggactcaaaacccatctgggctcctaaccttcctgtaaacccctttagtggcttcattagagcaggcgttcagctcactgttctattcatctcaaggaataatgggcttagagcagtttctgtcctgctggttaacttgtttggcctattccattctggattttgtcaagcagtagacaagcaattagacaagaacttggaggcaccatttgtatccactttttagacttaatagaaacattgaagatgaacataatctaccaacgaaagacgtgattcaattcaacactcccttcccatgacccaggctgggcaaggaggccacgtgatgtggagggcacattccttgcctgcacaaactcaccatctgtgcacgcagtggccttccctaaaatcagggaattgttttaagtcttatcaagcagccaagggatgaaagagaaggtgggttttcatcaagactggaaggtggggacagggatgagcatggagctggccgtgggcctggggtaccaagagactccttgagagaccaggcaaagcaagtgattgggacagaggttatctgtcccaggttatctgggcatagatgcaggtgagcccatggccctcccagtacctcctgtctctggcctgttttagaaggttctctcctccccaaggagacacaacaactcctagggccactgaagatataactattgcccaggtttctggtctctaggctggggaagtcctctgggtaggaatcagcaagaagatcctaaaacaaaagctcatccatttgcgttccatgatgctgggatttacacttgaggcttagctttgctctgccaacttcttcagagctgacacaggatgaaggcaatgccatcctcaaacactgcaggcatcacagctaacaattgtgaagtcgtcttaactcaccataaaaaggaatccactcccaggcagccctacttctttgctttgcccagcattttactgattcatacattatctcacttgtgccaacactcaagaagcaggctacactgacactggtattcctgcctccatattttctttaaaagacaaatcaaagcagatatattaagtgactgttcaagagcacacttggcccaagtggcagagcttggactggatgcatgttttccagctcctcatccagggctctgaccagtttaacctgatgcagtcacgtggaggagcagtgcaggcacagtatgtcccataggcccagtgagatgcattcttggttggctggccttccacttggctacacagggatgtacaaggcgatcccatcttgataagaccaccacctcagagtatggagctcagagagggcaggcatgaagtttccttggctggtgcacctagaattggctgaactcatgagaagttgatatagaacagtgcttgccacagagcrgggactcggtaagcacttaaygaatgaatgaattctaagtcaatccargagtctgatgatttcttgaaaagggtgttagctaaaggatcttaggcatgactgtagaatttgtagttgcaatagaacagagaaagaggaagctttctgtctccttaacactgagctgtcatgttttaaagcttgctcacatcttggcacatttaagagacagtcaccccaggactcaaaaatagggaagtaacagtaacgcaggggaaacrttttctgtttggaggagcaaaggctgagaacactgtgaaaacatyytgcgcgcacaatagtaacctgggtaaatgcagcgtgaagggattttagtcacacgtggtctttcttacaaggaaggtggtgggggtgcagatgaggttgctagagaatgttagaggatccctctctggattggagatagggaaagaaagttgcacggctgctgaggccccttctaggtggcaaggctgtgctccctggttctgatgatgtgcctgggtggacatggcccctgtgagtttgtacagtcttgcagcaggatctagaggggggatttccagccagggctgctagacggaggcctactcttccatctttcctgatggcaggatggcctggccagggcctggaagacagagacctcctgcctccgcctcagtaagacgacaaggaaaggcaaatgcccaagggaaagaaaaggaaggctcttctccccagagttccccatgcagacatgagtgcgtgctcagttcagaatcacttcygagaactcatccctaatgctgcagatttgggctggaacagattcacactgtctggtttcaccgaggacatgaaactccaccttgcggggataaagagagaaaaacaaattcatcaaatggaagacacattgaaagtgtttttccttaatgcttatcctgtttttaaaccattatttccaagttgacaccttttttaaggaaaaataaatattttgcggcattaaagcyatatacaaggtctatatcagaaaaatatatttggggggctgcagcacaggactgagggagcggtacatgcttaaaaggcaacagggcctggttttcagtggcgatgatgattctctatgacagtcagggaaacgtggtctctgagagtgatgggcacataaagccttggtgccagagtgcatcgcatggtgtccaggccgagtctctgtcagatggttagaggcctgggtctaccctgccaggagaggcgtgtttgggtaacaggcagatggagtttggaacacatgaatggctcatcacacgccaaccctgagtggggcaggaggcaggaagggtgggctgccgcctctggttggcattctcagagatgcgcagtccatcagcttgttccaaagagtgaacacaggcctctgcgtgctcccaggctccttggtgtcccaacagctggagctcctcgatgagtcacgggagttctttgccaagaagtaacgatagcattactcatggaattgcttcactgctttctgaaggttggcataaaaccgggtcatgctgcgggggaagaaggagtccaccacgttctgtgggaggtaaccgctgaggtcggtatggaagaatgtgaccaggttggtcttggtgggttccctgtgaaggcaacagcagagctgtgttatgatctgcagcagaggtgctggggacgagcgccaggcaggtgagcagagcccagcccagtggaaatggccatgatacagtgatcgcgtctcatcccttgctgtgccctccacccaggagtcctctctggacctgctgattttcaggatggaaacccatcctgtcggggatgcattccacagcctctcccggcctccagggaggaagaagtccctactcccagcccaaaaacccagtaccctgctgcccgattcactcagcaaatgctttcagagaactcactttgtgccaggccctgagaggaacgaagagatgctgcccttcactatttagggtctgcaacctcctgggggctcctgggaccctttcaaggggtctacaaagttaacactatttttataacaacacgaacatgtgattcgccttctctcacatgcatacagtggggttttccggaggttacatgatatgtgatattgcaacagactacacgcacaagcaggtatgagtttctgttaagcctggcatgaaagagatgggcaaaaatataaaaacaatgccactcttttcacagtattttttgttttaaaaaaatagttttttaaaataaaaatgttatctatgttaacatgcagtgcatttttatgttaaaatatttttaacatttctcaaatttaccagttacaatttcaaatacatcaaataatgatagctataacccccaagaacaaaggccctatgaagccctcaaatatatgtaagggtataataatgccttatgccaaaattttgagaactgctatttagagaactggcgaataatttgagcacctatgaagggattttggccaaggggtggcagaagctcagaggacggcaggtggcacagatgctgactggaagtccagaatcaaaggggcacacgatgtggagatggaacacaacttggtagggacaggaagcgatcttcactgtgacaaacttctcaacggccaggacaacaaaggtggtataggctttgtggtgtgcatttggcattttacttgaatgcaactgtccactcagcctcaccaggaaccccaggtagcactatgcctgcccatcagatgtttcctgacatcatgcaggctacaggtttggaactggagaccttttagaatcccactccccagggccaagcacggtggctcatgcctgtaatcccagcacctttgggaggtcgaggcaggtggatcacctgaggtcaggagttcgagaccaatctggacaacaaggggaaaccccatctctactaaacatacaaaagttagccaggcatagtggcaggtgcctataatcccagctactcaggaggctgaggcaggagaatcgcttgaacctgggaggcggaggttgcagtgagccgagattacaccattgcactccagcctgggtgacaagagcaaaaccccacctcaaaaaagaaaaaaaaaaaaaaaaaaaaaaagaatctcactcttcaagtcatacagaaggacaactggggcatggaacaggatggggccagcagatccacaaggtgggagagcatgtgctcctctgggctgtggcttttctcctctgcttgtgccctgcttccccaaagagggtgaactccaggggacagagacttccttccatctcaaagtcctagcatcatccgcactccacctttccctcacccaccaacccctgcccatcccgcctctgctagggccttctctctcctccctgctcctcctcccaatgggcttcctctggcccgcatcacctctcagcagcatcctctttggaaacatgaacaggtgagtgagaaatgagactccgtgatcatgtttccctctgggtgaggaatgggctttgtggtgggcggaacgtgtgagaggccatgtgggatgggacaaactctcttcgtcacagtggccttggtgagtggtagctcttgcatgtacaccattatgtgacaacaacagaaagggcaaaagggggcacagaggaattgtaggtcacccagtctcccctcagaaaaggctgggatgaaggcatccactacggttgctagaaggatttaatgagagtaggtgtgacgcacttagcatccttcctgtgcacagtgcaagtgctccagaaatgacactgtaatgctgcctcgaccacagatacaggctcctccaccttaagaacacctttcccccgccccccgcgccacttggagctcaaccaccaccacctctggcctcaacaccacctcacccccaatgagtcctcttgccctcttgctcacagcctcttactcaagagagcaagaggagagagaaggccctagcaaaggcgggatgggcaggggttggtgggtgagggagagggtggagtgcagacgatgctaaggctttgagatggaaggaagtccctgtcccctggagttcaccctctttggggaagcagggcatcatagcagttaagaccaaagtcagaccatgtcctgctcaggcctccccagtggcttcccattttattcagaggaaagtccccaacaggctgcggcccctgctacctcatgggccgaatgtcctagcctctcctcttgctaacacaacacctccctctgtgctgttcctcaaaggccccgctcttgctccggctcctgctcccacttctgggactttgcatctgctcatccccctgccagaatgctcgctccaccaacacgcccaagactccctgcatttgtgccttgctcaaacgtcttattagggaaaccccctagataacccactcacacctttccctggcacctttatctgggtttagttttccccaaggcacttaacgtctgatacttactagcacatccacgagatagaactacttacatttgtgttttgtctgtctcctcctgccttcattggaatctaagttctaagagggcagacactctagctgttttgagacatcaatatctgggttaagagcccagattctggagccagatggccagaatgagactgtggctctcttacttgctggctgtgtgaccttgggttagttactaaacctctctgtgcacccaccattcttattttaaaaatgaggatcacaacagtgccttacggttgttataaaaacagttaatttatatgaagtgcttacaatagtggctgacacacagtaatgctgtataaatgtttgctgctgctgctgctgttattattgtctgctgaatctagggtccagaataggcctatcttcacagaataataagagaataatcattgtcacagatttcagatccacagcctcatgagaataactgcacacagcaggctctggaagaaagctttacagagaacacgtgatgtttttaatcaagtggagaggagttggaagagtcaacacttgagttaaaaccttcatatgggcagggttttgtgggaccccaaccaccctctcagcaaaatccatgcaatcgggccaggcgyggtgactcacgcctgtaatcacagcactttgggaggccaagacggggatcatttgaggtcaggagttcaagaccagcctggacaacatggtgaaaccccggctctactaaaaatacaaaaattagccaggcatggtggcaggcacctgtaatcccagctactcgggaggctgaggcaggagaatcgcttgagcctgggaggcagaggttgcagtgagccaagattgcaccactgcactccggcctgggtgacagccaaactccgtctcaaaaaaaaaaaaaaaaaatccatgtgatacctttgctacctggcatgagggcgtgatgctacccattatattgtgcattccaccaaaaagaagacagcaatgggattcagcccctcagaaggaaggactctgcctcttattctgaaaattcctctctgtcagacccggcaccactgaaaggtgagtcttagcatctgactaccaggtgggagaggacaaggaaatgagcccaggccaggggatccagggcacctatatattgggagaactgaaactgagtgcaggtgtgtatgtctgtgtgtggtagagcacagctgtgctattttcaaactcaaaattttgttacatctaagaaaagtcttcacatgatgtctgaaaagccagcttagcaaagagggtaacataaaggtgctaggtctgggcttggtataatcccacgacaccgaggcccacctcctgggacaatgtggtagaaggacagaccccttccctccgggtgtctgtatggagactgcagggaacaccgggacacacctgcaaggcacagtttcttttgctgtcaacatgcatgattcccagggtaaacaagggaccttcaggtaattcattacacagaaatttcctggcaagagcctggccatgacctgtggcaaaatgggaacagagagtccccggggtcaattctgaggctgacttacagtgtggtctcagaactgccctttaggcctgagttccgccacattccttgccgaggagagatgatcactgagtgaaatgtggggtggggactgctatcctcaaagctgctcctgcctggcggagggtattcagggaggactcggagcacagaccctgccctgccaacctcctagcctttgagtcaggacacatcactgaacctccccaaacctcagtttcctcatttgctaaatggaccatgacatttgcttaacctggaggctgcagggaaaatttcctgcatcaaaaataagagtaacgcctcccctcaattctttcccacatgccaggtactctcaggaggttctgcttatgcagatgtgtgtgaaagtattttgtatcgtcacaatctaaagagctataaggcatttttcttcttttgaatcgtagtcaaagtgccccttttcacagaaggtccacagggaagtcacagttaggtctgagccatgtacctcaatgcaggaaattatccttaccctggaagaggttcacagaagcaaccamaaggatggttaaatcctctcacaaaacctggcttcgggggacataacggatgctccacatgggtggctggaagacagtgcagaatctcggtgagttacaacttcagacggtcaggtcactgccattggggtgccatagagcacacagaccagactacctgcagccctggagtctgtgagggactcctgcctcttggcgtgagttccccctactcccaccctactgccccttacactcacacatacaaatacactctcacatgcgtgtacacaaactcacacacagacacacacacacttgcactcacacacactcactcatc

SEQ ID NO: 8750 - DNA, 19317 bp, Homo sapiens
ctcacacagtaaaataatgccatggacacagtggggctaatacagggcaagcaagagacatcacttgccaatgaaagtgggtattaaaagaggaacaaattttagcacaatgttattaatagccaccatttgtcagggcttactaggtgtcagcatttatttatttaaatttaatcctcactgcagtctttacaggttgcactcaatttactaacgagaaaactgcaattgtaataaggatgctcatctagtgagcagcggagccaggatatgactcctgcatgtctaactctgacttccatgcttttaaccacaattttactgtggaagataacatatctcttcagtgatacagggttgccctcctggtaagatatgcaggagagtctgcatctatgagtgtacactcagtttggctaaatgagagatgccacgacatataggacaactaatctggctttggacttatgggcagcacactctttggatgagggctgagaccagaagtcaagaatttctggttccattaaaccataagttacatgtagacaataaacattcattaaatacgtgatttaattttgcttttgtctatgtgtgttcccagtgttaaacataatattgcctggtacatagtaagtgaccccaaaaatccatgattaatgagtcaataaatacatgaactagtgaataaatcaatcagtgtacagagaaatgtgcattcccatattcatctctaggaaattattgcacagagagcaatacaccaaccctagatcatcaatcttttcttgccatatgtgggtcccaaaattttttcacaagtaaagggaatatggcattgtcatagttacttgtataacagaatgtgtgctaacagcagtaatgaacaaagaccgggccatgagcagtcccaggctgatgactcatacaccaccagagccttttgtccccagccattattttccagcattttcttgcactgcccttttgctacaagaatcaatctggatttaatcatttgctctttaacctgaagcatacagatttatagcacactttttagggctatgggatctttgttttggattttctatagtttaaagatcaattttgactaatcagagctaattagagatcaacaaacccttccaatctctatctagggcctgggcaagtgttaaaaacctacatgatttctaagtcaaaagtcattccacaggcaaatataggaagaaaccatgtttggcaaatgtaatttctagttgtgcagctttcaactgacaaatgccttaatgatggaaaaaacaaaggacagaaactagacctcctaggtttccaaaatgttgttatcactattagatgtgtgaccttaaacaaatcactaagccacactaagtctcagtttgcccaactgagtaatgaattgttgaactctctgttaggtgtataaacacacacatgtcattttattacagtccatcttattccataagtttgccttgtttatcaacaagcttgtgaattacttgagggtgtgtcttaaattttctttttttgtctcttccattgcttctagaacgctgttaaatacaaaaagctgatcagcagtgaactagattgaagtaaatcaaggttccttgtgtttgcctaccaagaatatgaaaatcttcccaaatttatgtaaagaaaactcttcaggaatcagaacaatatgctgcatttctatagggtttttcttttttgttttatttctcagatatgtgtgatcccttaaatactgtgtgtgtgcatgtatttaaaacaatctgtgcttctttcactcttggttaaaaattttattggttttgtacataaaattcccaaagtaaaattttcattgaaaatggaaaatactcaatttctgtttgcactaagtggctgacaattaacaaatgagtcacatgtattcccttcctgtaactaatgcactgcaagccgaattcatcaattacagcaaggacacaatattcactttaccaaacatccaagtttcttagctgttgatctttttgtgtatgtgtttgctttctcattctctttctatgtgttctattcataaattgtgtccagcaaattgtggcaaaggtgtctcccttctctattgccactttgcaatctatacttaactgcagggtaacaacaatggaagccatcactaacagagccaactctagccctctaaatctgcaactacagcttgggaaaaatcttgtatcagggtgttacatgctagatttaatgtgaatgttgtagtctgaaatgaaaattatttgtacagctggaatataacatttgcataagttacaattaaaagggaaaatataattacaaattttcaacttaatttgaatggtttttaaaatgctcatttggcataggcaacagcttgcaggcaaacagaacacactctcagagttgcatccctttgtctgggtagcagtagtgagctcattttgaagtgcttgctttaacccctgaatcccaacagcaaccagcattgagaacctaaagtacaaggcaatgtttgttttcaraataggrttacaacatacacagtgattcataaatatttgcatcttttaattgtttctaaaaatgaagtggcaagtggcatcgcacaggaatgttatttctcccgtggagcgaatgagcagtggaattttaactagtttcattccctttcagttctcagatctgaratcttcggtcacatctcctgtacaatgttttcctcatatcacagtctctttaatggctccagtttctgattttttttttcctccttaattacatgtccttttcttgtagctacttcatgctgaaggcatgtcattcttctcagagacagtcttggctaggtgtccgtggaccgagtccatttgttcatttgtttttaggatttcttttctaagacgcaaaggaatccttttattatcctcaaacacaaaaagtgaaattttcataaaatactttgtacagcgtacagcatgtttacttgaaaccctgcttccccaaagtcatgatatctgtgattattatgtaacatgcattgtgttgcatcaatgggttttgcaaaagagaggaaaaagagaaaattattccattctgtctttcccagcaaaaaagcatccaaaaagacatataaataaaaaaattactatgactgtgaattacacaatgaactgtgcctttctattttcccgatctttcttttcacagctatctccaaataatgagataccagaagatgctcttgaaaaaaaaaataaattataaaaactgatcctttgttctatttaccctggaatctgaaaaggaaactccgtgccaaagagaaaaacataaagtaataatacaacccaattttatatttttcctgagaaactacaaaggtactcagttaatcgagagtattattaagtagtgtgatttttttaaatcgcagaaatctttcttattttaggaagaacaaatacatagcaatgagaagaccaccacaccaccttcaggaaaatgctccttacaatgacttgctgaaaccaatgacaaaaccacatcgtgcccttgtggataatcatcttttgggcaatggacttagaataacttcatcacacttaactgggatgtaaatttaatacatacatataataagtgcatataaatgtaatttatcttgaaaagaattccaaggtcttaataaatattatgctgggttctatagcttctttcctagtccctcagctttcccatttctttcctctttgatgcatagtggacaattgtatcagcccctaggtttgtattcaaagtcataagccagtagcaggccatttcctcgaatgatatttcccaaatggtgaagatttgtcactggcaagatcattttagttgcccataccccagtatttatctgttttttaaaaaatataacacacttgtgatttcaccagttttatcaaataataagaatttatccaagaataaggctaaattattccattttaaattgatagaaagaaaatattgagaaaaaaaaccagatggtatgcagatagaacaaagatcatgaaagaggtatgtagatgactaaagtttaggaaactgtcctagaaaaatcacttctccatcaagagctgagctcttaagggaaaaaaaaaaaaaagaaagaaaggaaaaaaaagtactcaaaaaatttttggaaaaaaattaaagccccagaaaagaaccaaatatttctcatttttacttttccctttgattcatgaaaaacatttttcaaaaagaccaaaagcaccacagcacaaggacttcccttgaatgcaaagaacagatctggagaaggcactctagagaagatgtagacattttttgacaaggctcctcccaagaagccaaggtgtcaaggaacgcctcaggtgagttgagatggcgagggttgccgctagcagctccacaggtcacacgagggcaggactggagtgatgctgagcaccaggcgaggatcgcccacaaatgagggacacaaccaagggtgcggtggtgcgggaacagccagccactctatctcccaagctcccgccactccacatctcaggttccctctgccttcccttcccttcactcccttccttcctttcttttctcctcaactgtgtttcaccaactgaactgattataactgtgtaaagtatatttttattattgaatttctttctgtaaagttctttgttttctcttctgagttttaaatatatgggtgacttcaaaattttatattcccagttccccaaaaaggttagaattcagctaaaaatggtgatacgttggcttttacttgtatatggttgtgagatagatattttgtgtgatttggtgtccactcccacccccaccattgaaaatagagcaaaaattggagctgagaaaggaatcattttccctatttggtgggaagagtattgcatatgcaatacattacgagagtaattttgggagtgaaaaagacaaggaatattctcgagaaggatgtttctgagaacctttgtgttttggtgttctttctactatcctaaagaagtcacaccatttccagggaaatctagagttattcaccattaagacaaaataggtcattcttaaaatgttcctttacatcattttttatacaagctgcacctcccagagtgaatgtcagaatcaatgggttgggtagaacagaagtttccaccctcatttccccagagccctacctttgatggggggcgggggtattaaaggatgagggaaaggggcgctaggaggaatgatacccaggctccaccacctccttcaacaaccacagccccacttttgtctgtttaatagagcaatcattgaaaatttcctttgaaaaaaaagggtctcatgttttaaaaacttggaacataatgggaatagaaaaactgatgtgcctggattaaccctggaaaaacaggatacaagttataaaaatgatgaatgtttcttcagactaattgtttctttctaattcctcacaaggctcatgaaactatatgctgttctcctgtgggatccactaaccttgcaccttgtgaatcactctccactcccctcactttctagtcctcaagctggggtggtcaagggttaggggagaagcaggtgaagtagggagggcacataaaacagatggattgggctgctctcccctacagttttatatatgcttgccaaagaagtaagacctctgtactgataagagtaagataagtctaaatgtttcttacagacaaagttgacaagattcaaaagtggtttgggtaaaagagactcaatcctagaggggcatttgattccaaaagggaagaagacgtacttcatctggaacatcgtgaagtcacagaagaacttcacaagtgttccgatcggaagggagccctttgagtaagtgaaatgaagcgtgaataactgcctaattagtggayatgaaaactggacagtctccaaagtcatcagagatgaccacgcttgccaggcaacttactagactaagggtgagtccatttgtaatcatcccagctgggaggtggctgggaggtttgacctagggctcagaagactggctaacctggataaagccattcaagacaatcaggtgtgacattatctccatggctgaggtcttctggagcagtagttctagaacttcttggggccactccaatataacaacactcaggaatcacctcccactactgctggggcaggcggtgggaacagatgtagagagggtaaactttattacaaggaatgaggaaaatggaactgattttgataagggccattgtcaatcattagttcacatgacagccatgaaggtagagtcctgtcccaatcaatattataagaggggagtccacagaccacccagagaccaaggagacatcaagtagcctttgaaccatagattcaaaacctccactcaacaagaatatcagggagctctttgatatctagctttcacgtgttaaagctgttactagatgcctctccttcccactcctattcttgcctagataatgaagtccaaattccctagcatcaaggctcttcaaattccagcccattctactttctcatccttctctcttgccatgccttggcctgttctctgtcttgtaaggaatataggttgcactagccccttggtctggttatgtycatttctaaagtctctggcaaaaacactgtcatctttcaggatgcagttcaaatttcacttccttccctacatagttcatgactcctttgtgttaaagacacagttcaagcgtctaccttagcaccttactcgaagaagagtctggggagaacagtccttgcttcagcctcagttcagatgtaattacacagatctagcaagccagtggtgtgcacccaggaatcacatggcactgagagacttaactgactaggcttgttacccccagggtaactgtgaaatagggctttggagtgtggtatcagtttcttgcatctatcccaagcctagccccatagacacatgtctaggtccttgtagatgggtgattaatagcatgcatctaaagccagttgcctggattcagatctaagttctgttgcttgctggttgccttgagtgagtcagttaacccctctggcctcagtggagatgaaaataatatgggtctgttgtgagcattrcacaagttaatgtatgtaaatctctccccacactgccaggcacacaatgagcctcacgtaagcatcaggtactacatttaggaagagagatggtggtaagtaaaagtttaaaattattcaatttgggagcacaagccacactaattcagaatcactaatttgagagaaaattgaaagagggtgatcatctaactccaccatccactagaagcagcttagctcattgaagtggtggcaccgtggtggggctggaagcaagggtagtcccagcagaaggcttgggcacatgacagaggcagtggtgctcagatagaggtggcagcaggggcaatggcatcaccaggtggtctctgtgacacccacaggtggtgtctcaagacattcaaggtgctcagtgagtgcagactatgcaggagaagtgacacagaagcctgatggaggtgatgatacccagtggccaygggactttgtcagcaaaggcagtgataaacagcatgagaggtcaatactccgggacaccatggggcagaygtcagccttattcacatgcccatgggagaaattccctggggtcgaccagaagtgcgtggtggtgaagctttgccaggtcctcatgaatccagtgtgacaaattcctcaaattaccattggtgtgagctcattcttccagaagaggaatattgggaaatcatagaaagcacaagctttagagttagtcaggcttgttctccattcaactgaacacacttcctgagcacctttttcatgccataggctcagctctagttggtagaaacaccacagtgagcgaggcaaaaagtgtcctcctcacaggatgttcaccttacagagggagacacagttgataaacaagtaagcaaatacattaatgagaggtttcatgtgataaaggctgtgaagacaataaagtaggtaataatgcaggagatgagtagagcaaactacttaaatagaggagccgggttaatctctcattcacagtgaggatgcagtggccagaagaggcagcccagggaagatctgaggtgaaccctctggttggaaagccttggcaaattggaggaatgaaaagaaaaaagagtaaatctacaacaaggatcagcaaactccagtctacaggccaaatccagcctgctgcctgtttatgtcaataaagttttattggaacatagccacactcgtctgcttatttattatctatgggtgctttcatgctagaatagcagggctgagtagctgcaagggagactgcatggcctgcagagcctaaaatatttacctggccctgtgctgaraagtgtgctgatcccggtctaaagcactgtaaacaagctagggggagaacagtaggagatgaagtttaagggttcagggaaaggtggcaaattctgcagggccttgtaacccatggaaaagggctgggattctgttctgcatgtaatgggaagtcactggaaaattccaagcagggagcacgtgatctgacttatgttcttacaaggccaccctgggagctaaagaagagtagatttccagtctttggaagatggaccatagggccaagaggcagccagaaagtctatcaggtggctactgcagagcccagtgagagacaaaggtgccagggatggggacggtagcagtgccaatgcaacaagtggtcaaggtatattattttaggtaatattttaggtttaacaggcatgagaacccttactccactgtgtaaccttaggcaagttattcaaatgctgtaagcccagtttcttgtcaaaaaaaccctcagagcactattgtgtggattgaattacaaaatacatctgaggtgcctgtcaaaaagttaagtgttcaataaatgtcaactatgattactgtttgttgttgttgttgttgttgttgactgatgagacctgtggaaagatcaggttgcagcatacagctcattgtgtcagttaatggtgctcttctctgcctgattaaatttctgagttccctggagacagggaagctccgttattcatctttatgtccccaaaagtgtgcctggcacatggtagatgtttaataaatgcttattgattaaactattattttttaagaaaggaggagtattatctattctgccatttttcaccagaagtgttttgttttcaggattgatatcctgtgtcacatttttgtgacacagaaccattccaaagatacagaggtagctgtctctagggaaagctggtacccagcaaaggaaaactcagatgctattctttggaaaacctctaacctgataaaatatgtcagtgtttgcaataatatattgaatctgggctaaaaattcaccatgcacaagaaatccaatcttcacagatacatataaaaaatctctgccataatgtggatgagaacaatgagtccaaaaatcgttgctctaatgtgtcaagctgttttcagactaatttcaaagtggttggatattctgatcccttgctcagccatattaaagggtcctccattttgctttattacctccttccttttattcattcattattctgcctttaaaactaaaaggagttggattaaaattgagacttcagaattatttgtcaacgttcttattctttggcgttagcacttaccaaaaaagactggaaatctacacttctttagaagttaaattttgtcattatatgatagtttcaaatgaaattaaatatgacacaaattttaaaataaaaaatgacacctgtaaaatacatactcctaggtgacatttttatttttaaaaagtggttaaataccatagtggtcatacaatacaaaattgtaaaatcttcaaagggccacaaaataaaatgttaccagttgcatttacctgttgcattcagaataactaaatgtattcttaacacatacatgttgctatatctgaaagaggaattctaatttcttaaaaattaacaaattaacactaggtgagaaatctcttcgaggcagtcaccgaatcatagcagtactacacaaacttaccaatagctaacaaaccctaaaagaatgagaaaataaaaataaggaaaatacttaaaataacaggacactaaaaaagaggatcccttattatagtaaagaaaaggctgaaatccttgaaacaccaggcagcagccatgaggagggattttttttttttaacacggagcctggcatctcacaaataacgtatgttctatgttatgtggcagttgctatggtaacaacctttattttctgaaacagtacacagatgtgtacaacatactaacttactggttataaattacagcttttcccatagttcaataacttaagaattctacgtttttgaaatctcagaagttctgttgttattacattcttttatgagataattttccttgtactttcaaaatgagagtgctcccaaacataccaaaagaaaggagcaatgagaaaatggggtatctcagagagcagcagtgcactgagtactggctatagagtctgtaggaaacccactgaaagaaggagaaaattactttaatgaattaggtatcatgaacaatagtcatgagaaacaagttgccagcaaaatgatgtcataaataaagttatgaattgatttcctattataaggtgccatatttgcagttttaaaataaatgaagattatttcttagaagtgttacaaacattaatataattttataaggtacaatagtgtggttgcatgaattaacctggttttttkacttcaaatgaaatcttctgagtcttgaaaagaccagaatctgggggaacacttatattactctatttaatatrggattagtatccctttgtcaggttaaaaagcaaaagacagatttttactgattgggatatttttatattccaactttaatcaacaaatacttgaaaagtgccttctacatgcagggagctggctgtccatgcttagatgcatattgacatgcgtggaaacataagttatagggaagttcagttctatagatgatttttttcctattctaaaaatttatgttatattttccatgtggatctgaatattttctttaaataggtagttcacattgtagattttttagagttgtcagaaaaaaatcatctctgcagcatttatgaggtgagagttcattacctgggaaacatttgaaaaataagcttgtatagctagcatttacagttaaaaaccatctatcttaaataagaaaaaagatttctaattataagaaaattgtaagtacccttacataaaaagtaacaaagcacccctgatttagaaagtccagaaactgcactgctaatggcttttcctaacaaacataaaacactgggaactgctatttcaagtcacaatacggttacattcaaattcaaaattgtcttatagcagcaatgacaatgagaaacaattgaatactgtgcagataagaccaaatcattttgaaaagcctgcaccattaagtggtggttaaaatttttgctaatgatttccacacatacttctttctatatcttttagagatatattaaaaacgggaccatgactaatccattcaaatccttatgctatcagagagagagtgagagaaagagagagagttaagttatcacctaatgggggcttagtggctagaactcagaacccaatagaaaaagagtacttcactgctaggtgcattttaaaagtattacttaaattacatttaagtcatcagataattatgaactttcttctcttttatatttatatggcatatttattgaattgcacagtatgcttttacaataaagtgctttttacgttgccgcctttgttcatccaaaataaaactgacagttatccttttataagctattctgagaacattttctcttctttgaagctgattgatgcactactttaaatgttcctgcaaatatcttttcaattcaagtttttgcataatgtaataagaagataaaagaattctatacttcaacaagagacattacaaagcaagtagagacattatcaagggcattaacttgctcctaatagcaataaaaccttttaactgtctgatgtagaacatgctcccaccaaaccaccacatattatggtaattggctccaatttctgaatcttacattgtaaagttacaaagagttaggcagaactgaaaaacaaatctctaatactcatcttgttactgttcccattataagatgtttactttttacctctaaggaggactggtctgctctgttgtgctgctctttactgtgctatcatatttttgcatcctgtctcatttttatttctactcactgatatcaagacacttttcttcccaaaaaactcttttctaactccaaaacatcacagtaacacaaatagcattttcctgagaatttcagtgtaacaaatgggttctctgtgcatgcctgtgtcacgtctcattcactttatgtgttctctcatcactggcagatacgacagggaaaaacagtccatgaggacgctttgatttttctttacaacgcgttactaaatgacatgagtagcctttccatcctggccaagaggaaatataatttcaaactaaagttgagttcagattctgttaaattaaatagcaaagaaacagtcactcttggttttattcctcttagacaggaagcagggcagtggggaaytgacatgagccrttcctcggtgattaacctgcagtttatgttgtttctaggtgacgtgcccatcatgcaggaagcttcyccaaggctggcgagagcaacttgtctgctttgagaaatgcagatctatcaggatccagaatcggactctgaaaaagcygtcatttcatgtcyctaaaacagcytttgatttaatgtacaagatgtcaagaagtaaaggacaataaaataaaaacsaaaaaaggagaactatttcaattaagaagcattcctatatcaattcttggaaatcacataaaataaaagctgtcagaatcaatctctgtttaaaaggctgatttttttgtggtgcttacatacaacatgcaagaccagaaaaaaatacaaattactagcacagagcagccaaacttaaaaaatcctttctcattagagagatatctggttattaaattttcctaatggatctaggaaaagtgtttttatggctggggctgaggactgaggagagaaggaaagaaataaacccccatacagaaaaaaagtcacagatgcaatctccaattctatatgaaggagtttcatgcatttccaaaaatttcatctttaattgacaataattaaaagcctcatataacattctaggaatctaccttttattgctatgggttttcaatgatgtttgaatgcctttttcagagaaagataaatatttcttgaaagattgccctatcaccctagtaatcaaatatcctaaaggcgaattgagaaaaaaatctttataaaatctgaggcaacctttcagttaagagtataataatattaaataaagatacaagcattgccaaaaacaaataaataaagctcttctaaatgtgacttcttattatggaagacatcactttcattttcatttaggttttttttgttttgttttgtttggggtttttttctgaaatttatttattttttaaattgacagataaaattgtatgtatttaccgcatacaacatgatgttttgaagtctatatacacactgtggaatggttaaagctagcttattaacatatgttcatttgttcttaaaatacactgtttaagaaacatgtgttacacttccaactttactcctgtccttaaaatttttattatgcattttattccacatcttttattgaaaaggctaatgggcagggaaagaaaagataaattcatttgctgtcccccaaaaggtttgtatacatcaggggtatacccctttcagtggcctatttctggcacctttattttttaaaaatcaagtttttctgaaggggactatttaaagaagaaaatccactccttcatcatcaaatcaagaacttttcttaaagtaagccttccacaggcagtaagagaaacagcctaagaagttcctccaatcaaaagaagaaaaataacaaaatcagctcacccgtgatttccttaatatacttaaaagagataaaatcccactgatgcctctaaaaataaaaatgaggaaagggcaactttattgattccctgcaaaccaacgaacgtgtagcttattgataacactaaacaccatctaagcctttagtgattttcaaccaaaagtctgtctctgaatgatggtttaaatcatcgtattaatatattagggtaaaattaccatgggagacacttggaaattaattaaaaaccctgcactcagtttgtttgtgagagaagataaatatcacacatgggaaaagatgcctgacaaccgccatagttttcagatccaaattagaccctgacagctatgtctttgtatgactctccttggggtatgataagcagaaatatagaatatgaagatttctgatagaagtatttattactgacacttccgaaacattccatgtgtggcatcagcaaagcatgcttcacctcagacagaaatgtcaggttttcttccaagatttgtttttttctgttcctcttcccccattcccatccctccctccccatccgccactaccccccttctcctccaaaagatgatctttttttagaagttcaacagcagcccctggtggaactcagcagttgtttcagcctgagcacagttgttaaagcaattccattcatcttgtcaataaaaagaaaagtctgtacatgtgtatattaccccctcagtgtgctgttcctgcaggtcagggatcagaatacaaccctgaatgtacaaaggcagtgctttatgatggtaatttcagccaatttcggtagctggagttttgaaaaaatatatatatgtaacaaacaataaacatctgtctccaatgtcacattcattttatgcatgaagaccgataattaactgctcgtgaataacgcttaccacagagtgcgtcaaagtgaagaggctccacacatgtgagggggtgatcgctattttgtttggctcatgttgtgacagattcagctttgtcrcttagcaaaatgagctatacaaagtgacaaagaagggattcctctgggtcagagctcagaaagcaccacagtatgctactgctccatcagaatggcaagctaggcttaacaagaaagcccaccaacatgctcttcagagagaccatctctactcctttagggcttggttggcagccccagattaccatgtggggcaagagggagatgtgtggctctttgtttgcattaggcagggtcagtctctgcacttcacaaaggtgcctggcagaggggctcaaagccaactctactccctctggagccatctccctagagaacagtcacttttttcttagcacaaaggcaatgtcctatttctaaaccccatgcctttggggttgcatcacaccaaaggagttgccttcccaattcacacagaggtgccatataggctcctggtggctcagatgctaggcaaggagaaggagacttgcatagtgaagaggatggctctcttgccagagtctcatgtgcgccggggttgaggaacatagcaggcattcaccctccagaaggctcatgttacgacagaggtaaaatgagaaatttactcaaagactcaaaagtctacttgagtaaatttattcaatgtgtatttcactcgtgtattttgacttttctcttcttaaatgatgagtttattaagaggaaaagcaaacagtactttcaaagcttaaaatagcttcatgataaatgctaggatcgaagaaatattattttaagtgaaaacatggtttttaaattttgaaagtattgtacttcatattagcccttcgcatgaccctgaagccacttaaatctctggactgatctcatgtgaggctaaatcagggagctgatgttttgagaccagagagaatcccacgataggccacttactgagtgcctagtggatgtcatgcactggggaggaagagggatagaaagaaacaaggcttagtcactaatgaattacaatctagtagaagagacacatgtacccaaataattttaatatagtgtgggagcaatgtgcagagtcctaagaaatacatggatgcccttagctcagccaaggggtcagcaaaggcttttcacagggaagacacttgcactgacttaaagaaagattagaaattagctacagaaaaaagggggagaagacattagagggcaaaatagaagaaaaattactatgtccccaggagtgaaggtgtaaaactacatggtatatccaaagaactccaggcagcttgatattgccagagcatgaagtatggtatgagaaagatgggagtgaggcaggaaagactaggaaaaccttctctgccctcccagagagatgggatctgtcctatgggtcacggagaacaattaaaagactttatgtaaaggaatgaccatatagggaaggaaggagactgaaggtctgtagactgaccaggagtttgttgtgaaagaagataaggatcaagagaaagaggataaggacctgaattctggtggtgaagatggggctggagacgaaacggtaagtataagaaatgttcaaaggtcaacactgaaagaagatagtgttttattggatatggaccctgagggatgggtcttagataactcctaggtttccagcataggagacaacatagattgtggtgccatcaacagggttagagactgcaggggtcggaataggtttgaggggagaagatgacactctaaagaagtacttctcaaaatacgtcctcaaaaaccctccactggcctccagacagctccttgtaacactgattattagcactcccyttgaatgtcacagctggagagtgacctaacagatcattaagcctggtcactttacagctgtgtgccgtcaagttgaggggtgctagggcaggtaggactccagaatgcctccccagatgcaacccaggagggtctacttttacctagtgtgtatattataattcttcataagacttagatcacaaaaagaaaatcacagtttgaaaaccactgacaacctcttcttttacagagaggaaactgaggcccatggaggtgaaataatttgtccacagatacaagtctatagcagaggctgagctagatccgtgacacagagttcatcacatgtcaattccaagtgtcctccatgctgtggtttcctccatgaagccactgcttttgctgtgttttttggagctagcttcaaaaacctcctttttaaagaaactcagttatcagcttcttcagttgtatttatttaataaatattcattgaacatcttctgcatgccaagccttcttttttcaagaacacctgagcatctctgtttggattcccagttgtaatttttgattctttgggagttctgacagggtcttcaactagtgttccactataactggatgtggttatgacccaagaggggttttagtccctagtaaagagggttaacatcaaagacatgggtttcctaattcactggaagattacagctgatttacatgtttaaggtaatttttgaaaatatgtttttaaaaatctataaatttcctaaggtattttaagattctattcataattttttaaataattacttttcagtgttacattaattttttcatatatacatataagaactcgctggaaataatgccccaaaactcaataaacctaactttacaaaactgagaactggcatctgaaataattacaggatagattgttttccaaaaaatgagaattcacataaaataaaataaatttgataaccccttcctccccatcatactaattcaacagctgcttgtactgacagggtaattcctaaaacaagggaaagcaaatccttgctcaatctagaaaaatagagacaaatgtagctaaggggttacaacaacctgttgacctctttccagtcttgagaatcttgtctcaggactcccagaagggagcagcggcttgcttcgttgtaaagcgtgtgagtcagggtagaaacaggagccagccagagaaagtcctcctgctcatggactgccagagatgagattcgcacaggccttttcaggaacattatataacatctcgctgcaggaaggaaaaccactgctcagtctctcctgttggggaattcattcttcatcttatgaagctctttaaaatatagggccaaggaatcagtctttcttccactgcctctttacacttcaccacccagccccaccccgttttctttctgtactcctcccatctgcaaatggtttttaaaatcagaaattctgtgtatatcaacaagtataaaacccagctagcaggggtgggttgcaagaacaaagaaggggggaaaaaaggagaaaatccaagattatggtacaaatcgattacaaggctcactcattacagcctatttcttttttttttttttttttttttttttttgagacagggtctcactcactctaatcatgcaggctggagtgcggtggcataatcatggctcactgcagccttaacttcccagacttagctgatcctcccacctcagtctcctgagtagctgggatcacaggtgcgcaccaccacacctggctaattttttagtagagacatggttttaccatgttgcccaggctggtcttgaactcctgggctctagaaatcacctgcctcagcctccaaaagtgccgagatcgcaggtatgagccaccacacccagcctaacccatttctttataggtgagaaatcaaagtgactcatctaagattactccacccactgttctcacacagtggtattattgagtataggagacaaataag

SEQ ID NO: 8751 - DNA, 13432 bp, Homo sapiens
ccgtgattgtgccactgccctcaaacctgggcaacagcgtgaaactccatctcaaacaaaacaaaacaaggaacttatcatcttttttgaactttctacagaatgcataatataatgaagttaagatgccttgttgggttcttattaaaagatattatttacattttaatccaagtcttgtgtttatgtatttactttcagttcctggaaactctttagaataaagaattacaagtttccccccaaatatgtggatacttttaatggaaatcaattattactagtgttcttttaatgaaggtgagaacattttatgaactgatttttcaggtgagtaaatagtaatttaaggaggtgaaataatgtgatgataaggaggacacctggggatgaagcccacagtattgttcttacaggttctaaccacctaagttccatgcctcattcattattcattctgggataatgatactacacttcataaataaacatgacactattgtacatagcatttgcttttcattattggcccagtggtatcactgatctaattatattttgtcatagattccccaccaaaacaaaatatatttccaagttagttagctgatgcttggggtgcagctggtgaatcagaacagaaagacccatccagccaaattcactcatctttttcatgtccagaaaagcctgaagggaaatgccaaggtgtcaatgtaagcacatgcaatcataaattaaagctttgttatattcaaataaagtaatacaacatttattacttgcttgggaaacagcttgggaagcagccacattgaaatttcttgtagccatgaaaataatacaagttgcttgtggataacaaaattcacacagaaaccatttctgagatatcttatatttgatgtatttatgcattcatttaagtcacatattacctctttttaatggaattccaagtacttcataaatctcctgtatagaggaaaatgcttaattaattggggatgagggcaggaagtgcattaaatatcactgaggaaagcagtatcgtgaagtatttgcccctggggaaatctcaattaattcttaaacatgaacaggacatgatgtcttccattttcacatagtaagagcaaccattcaaaaccacagaggcaagaaaacttagaacctgccagatttgagctgagaattgctccgttactaagcagtagtctccctgttcaccaggtcattgctgaaggtgggtacgtggttattgcagcagagtactctggaaaatatttgctaaatttgcctttgtctcaatccctcataggtctgtgacctcaaggttgcatgtctacataagctgttgcaatactgcactaaagtatctcctttcaacaaacaaagggtgaagctaggagaaggacagagaggtatttattaaaattcttgcaatttctctgtagagtataaactgttcaaaataaaaagtttggggcagaaataaatataattgaatcaaaaaacaaacaaaaagatgtattgcctgttcatcacatcttggctgggagaagaaaagaaagtgtctgatggtgaatatccgtaccagttaagattatttgcataagtatatgactcccagtgtaattacttacaaattaaaatatttgtatagaggaaaataccatgtttctgattgctatcctacatattatgaaatgagtaattcatataaaagatgactttgctaatggaaaattgaggaaagggccaggcgcagtggctcatgcttacaatcccagcactttgggaggtcagggagggcagatcgctttagtccaggagtctgagaccagcttgggcaacatggcgaaacccagtctctacaaaaaatacaaaaaaattagttaggtatggtggtgcatgcctgtggtcccagctatttgggaggctgaggtgggagaatcacctgagcccaggaagcagaagttgcagtgaaccaagatcacgccactgtactccagcctggggaacagagcgagaccttgtctcaaaaaaaagagaagagaagaaaaaacaagaaaaaaaagaaaattgagcaaaggacgtggataggcaattcacagaagatagtaaaatagtcattaaacatttttaaatctcttacttgtactactaattcaagatattaaaattaaagtaattactaatattttaatcataatattagtgatggagaagcaaaataaaaattaaatatgttattctgtgcatcaaaggtaaattggtacaatctttctggagagttacttggctatatatatatatatatattttttttaagtttaaaatgccaaaaacattttttttgaggcaggttctcactctgtcatctaggctgtagtgcagtagcagtagcacagtcagggctcactgcagcctgggccaagtaatcctcccacctcagccttccaaagtgctaggattacaggcatgaggtactgcgctgagcccaaaaccttttatttcctccagatattctgcttcaagtaatttatcctagaaataaataaataaatattataaatatacatttataatgtgtaaaccatgttataaaataaatattttaaaatataaaataaatttatattataaataatgtatacaatatattatataatatatatgcacaaaaggtttatggagaaggatgttaatgtcagtactctctttaatagaaaaaggttggaaaaaacctaaatgtgaaatgagaggagacgtttaaataaattcccataatggaatatcatatggccattaaaaagcaaattacagaaaatgatactatagaagaatgttaaataatatggaaaactttttgtgactcagtgtgaaaaattcaggcactaaaacatgtacagggtaagacaaaaaacataaatgaaggtattagctattccactgcttgtgttgaaattataaatgggtctaatcatttctatatttcccaaaatgtctgcaaagaatacgggctactttcattatttaataccacaactaatgttgttaaaataaatgtcagttggccaagcatggtggctcacacctgtaatcccagcactttgggaggcctaggcaggtggatcacctggggttgggaatttgggaccagcctgaccaacatggagaaaccccgtctctactaaaaatgtgaaattatccaggcatggtggtgcatgcttgtaatcccagctactcgggaggctgaggcaggaaaattgcttgaacccaggagacggaggttgctgtgagccatgattgcgagtgccattgtactccagcctgggcaacaagagcagaactccatcttaaaaaaaaaaaaaaaaaatcagtgattccactttccatgtgtctgcattactatgtaccaattcattgctatttggtgcagagctgcacaccacaagaagttcaagcaagagcatcagatcacatgcaatagtgaggggggaggatggaattcaaaaactgaaatgtcagctctatgtacacatgagaggtagcatctgtaattcttttctacactgcaagagaatttgaagtccaatccaaagaatcaccagagactagcggaagtatagtggaaatagtgattctagcatttggagagatgttaaacccaagtctggtcttaaacataggcagtggtcaccatgaagttattcaaggtaactttaaggatgactatttgctcaaaatattgcctcatggtcaccatttgagtgaaaaggatagtaggtaagaaatatcaagggagtctcaggtaaatacaaatgtagcctctatcagtaactctgaaatccaaccagtgatcagtcactctcagggacatttattttaaaatggagactcaggctctttgcccttagagtctctgatgtaataaacctaggttagtaccaagaaatctgcatttttttttttgacttggagtctcagtcttatgcccaggctggagtgcagtggcgtgatctcagctcactgtaacctctgcctcctgggttcaagtgattctcctgcctcagcctcccgagtagctgggattacaggtgcacaccaccacacccagctaatttttgtatttttagtagagacactgtttcgatttcaccatgttgtccaggatggtctcaatttcctgacctcatgattcaccccccttcggcctcccaaagtgctgggattacaagcgtcagtaagtttaaatgatcagcatacaggatattatgtgtgtaatgcttaaacagaaatgtgagctgagctactgcagctggtgatgtgtcatgtcacccatatttttgccccatggtgggaatctgtagtcagtttaaaaacaatccctgagttagctgtttctcttggttcataaataaagaggaactagaggcttatgtcccaagtgcatacatccattatagtttgttgcagactttcagtcctaattgtataattatatatacatatatataattatatatgtatatatatatataaaaataaaatagttctcataccacagtgtgggattaaaaactttcaactaatctttctattatcatcttaaaatcatgagttatacaatcttgttgttactgttttatatattctaaataggggaagctaccttttttattatattcaaaattgtgcatgggcaaaatcagacacataacatttcttaccaaatgacaccttaagaaagtgcatttcttttttcgttactgtattttcgtttgtttttacaagttttatagtagagacagggtctcactatgttgccaagctggcctctaactcctggtctgaagcaatcttcccacctcatcccagcaaagtgctgggtttgcagatgggagccactgtgcccagccaagaaagtgcatttctttctagatagacttacatattacctgggagtggtctctgtgttttttctatttgtacattaactaagaattgaccatcagattatctactttagtggtttttcttctatggcattacttcaagctctagggattcatttgatcctctgtgaacacgtaaggagtgagcaaaggtctgatgactgcagtcttcccaacccgcatttttcattcagtgaacttttgcgactctcagtattgccccaaaagttccatattcaagaactttgcatgttgagtttctgtttgtggctttattggaaaatgggttctacatttaaaaagaggatgttcgagactttgaaaatcactggatttagccatccagcattcacaaatgcatgaaaattagccattctgacaggctgatgtttctggaatcaaagctggataagcctcaggcattcattgtcaaaaagtaataaaatttgcccaaaggttttagaaagtcttctctgggcggtgacagttaaagtgaggtttaaaaacaaatagcagtttgtcagatggtgttgggaggaagacattgctgcaatgagggcatcatataaaaggacctgaacattgtgaataatgttgcaatgaccacagatgcacaaatattgcttccagatcctgatatcagttcttttggatatatgcctaaaagtgagattgctggatcatatgataatcagaattttttaaaaaattttttaggggcctccacatttcttcccatggtagctgcaccgttttacatccccacaacagtgcgaaaggatactgtgtgatttcacttatatgaggtatctgaaacagtcaaagtggaaaatagaatggtagttgccaggggatgggaggtagggggaaatggagataaaatttcatttttagtagatgaatatgttctagagatctactgtacaacataatgcctaaaattaataatacagtattgtgcacttaaaaatttgttgataatatttcatattaaatgttcttaccatgaaaaactaaaataaatgaacacaaggaaacttttggaggtgatggatatatttaatatcttgactgtgccagtgatatcatgggtgtatgcatatttccaaaatcatgaaatcgtatatgttaaacactttgtatgacagatgcatccgacagcattaactcaagcataccctgagaatgactgtatggtctaagaagaatatgtgttcagagtctaagctaaggaatccgggaatggccaacccagagagattcacttcttatctgtgaaggacacttgaactccctgcctgtccgttggaactcaggatgtgcaaggaaccaaggccttttattttgggttaaatggaggttgctaagtggagagtgctaagtagaaatgttatataaactacatactctttacaaatagtagcggtcctgtccagcccactgmcactggaccacatctgtatttaagtcctaaataaaccctatgtcccattcactggctctgggtctcttcttggacaaggcgccatccctgttggaatcaatagggctccagcatgacacatgtgcaggatttttwaaattatatcaattatatctcaataaagctgttgaaatttttaaagggcctgacctgtcctggaatrgggaaaaacttaatgtgacaaaaatgtaggttrtagtgaagggaacaggaaatggtactgggaccatttttactccagctaaaaaatttgaatttaagaaatttggatatagataggaaggagctaatgttaagcaggaagtaagttgataagagttttctgttaaatgtgatggcaaagyggtaggtgagtatgggctccagtgggacagaacttgtggcagagaaaccaggtcaaaagttaaagttggatttggtgagtaattaaagagagtagtagcatttccaagacagaaattaatgagctttgcttacatgaaaagattaagaggataagcttaagaacaataagtaccataaaaatgggtggcaatgatgatacattaggggtggaggacctagggtcataaggttgcccgtggcgacttggagtgaagtgttgagatgatatgcccatttcatggggagaagtagaaagaasagaaaaaccacttttactttagttctggtgtaactatgaagaaaaaaaagcctaattgaggacaagaatagacctcgtttctatgggcaacaggcatattctgctccctatttcattatttcgcttaaaaaacacttggtgaagacttgatscagattgtcctcttggaatctctgatcctgatgtttatttaagtggcagagtggtggcttttccatggtatatagtcagattcttttttttttttttttgaggtggagtctcacgctgttgcccaggctggagtgcagtgttgagatcttggctcaatgcaatctccacctcacaggtagctgggactacaggcacctgccaccacgcctggctaatttttgtatttttagtagagatggggtttcaccatattggtcaggctggtcttgaactcctgaccttgtgaccgcccgcctcggcctcccaaagtgttgggattatagtcgtgagccaccgtgcccgtcctagagtcagattttaaatcttcaaatattcaagaccggtttattagctatttgaggttgtgaacgcttctccttccttacaagtgcaaagcctaactcattgaatgtgtggattacaaaacaagaaaacattaacttattgcaacagagtctggtttaattaataaatctttttggaagttttctttgacagatcctacataaataaatatagttttaaaagtggacttttaaacatcagtttttcctttccgtcatggttttcctacgacaaggataaaagacccctcttccttatttgaaaattctcgcaatcaactagaactgaaattatgaacaccaactctgtcaaaactatacttttgttacttcttggtgagcaagagaaatgaagaaaacaaaagaaaatcatgtgctattttaatgtaatttatcctatacttttttcaaaaagtcacactcacgtctgcttgagagttttagaggaatataatgtatgaaagaaaattccaataacataatgtacaaaaatgttgtcacatacagaagagcaaaaatctacgtattggggactattgctgtgggaagaagggcctgatcttcatactcatcttcctcattgagtaccatgaccccttccaattcatccatactacaccatcatctgtgccatgctttgccatgtcccaggtgtactgtccaccccagtagtatctgccgtttggattggctgcatgacatctattataccaccatccaccaccgtcttctttagaacactgttttctgggatctgatgttaacctgaaagaaaatgtgtttggcgttattagaaacagaactacggtggtcaagttacgttttgcagattacccataaaagactgctacactcgtgtgcacagtagtctttcctttgggtgctatacatagagtcacactaatacaccaaagacctcctgtgccctatagcaagaaagagagataactgggcctttgtggccaatccatctagggactgtgtttgttactttatactggaataatagcttttacaacccttagtatcagagaaccctggaaatgaaaatgaaagttttcacacacactttagaatatagagatataggtatttatctaaatgctcattattcagaaagtaactgtgctcaaattctagttttatctctgggtagttgtgtgacattggacaaatcacgtaatctctctaaatctcatctgtaaaatgagaataagaatgtctaccttatagttgaaatgctttcgagtgatgcataaagagcttaggacagtggctgacagtaagtgcccaggaagtggtagctattaaaaatattgttaatgattctgagtaatgatattagtgtgatttttaaagcaggagcaaagagtgccacacataccagccgtcattgtctctgtcatacgtgctgaagaacatgccgttgtgaatggtcatggtcctgttttctcccatcagctgagatgctccatccatgagggcattaccggctgttcctctgtatttgttcactgagatctggtatttgttggcttcattctgtacagtgaatcctccatagtgagcctttactttgtctcctttccagtcctccatttctatcaaaagttctgtgggtcccatcctggtaagctggctaattttatcatttccaagccaatattcacctaaaagaaaaacaaaataaaatctcaccaaaaataaaattttgggaaactaaaaactgcctttcttcccttatctttagcttccacatttttgtcaggaaactcctcttaactgcctaaaacaggcttccaacaatgaatgttttttaattaaaaaaaatcccatttcaaatagaatgattttattttgcatgcctgttcgttacctggtaggccacagtaattcttcccatctgtgttggttgcaacatttccaaatccctgtttatatggatcccatttcctgccaaagtcaacactaccgtcttgacggttctgaatcactgtccatcctttggttgacagaaacaaaaagagcatatattaaccaacagcaaataatgtcactttgaaaataatatctgaatcccctgtccattccatttagtatatatttggtgctctaaaatagacacaataaggaaataaatatgagaggtaaacttgtaaaatctttggaaactgcaagtgctttatcttaccccaaattgtgaattatagatattttataactttttaaatatcaggttgaattccacatcaaattactctttgtcagctatgttagatgttagagctaagtcttgtttcctggctttttaattaatttttttttttgagacaggatctcactatcctctgttgcccaggctacagttcagtagcatgatcaagactccaggttgtgggctcaggtgatctcccatctcagcctcctggatagctgggactacaggcacatactaccaacacagctgattttttttttttttggtattttttttttttttgtagagttagggtctcattatgttgcccaggctagtttcaaactcctaggctcaagctatcagcccactttggcctcccaaggtgctggaattacaggtatgagccaccacacctggccttgtttcctggcattttacggtatccaaataattacagatcaacaggtcaacaactgtcgaaagcttacctccattttctgtattcatgtcacagtatactctatacggtttgacagaactgtcaggttgaatgagatacatttcagatgtttcacctcctttcctgataatttcctcacattctgcaaatgtaagacaacattatgttcaggggtttatgacataattactttgtatttagtcaccaattctttaaaataacattacataagttactaaggagtgtgttattatagacctttgaaaataatataacaaatattagattttcattttactttagtaagtccaacccagttttgaggacgtttatctgctaagaggatgaacaaagctcttctccaccttttgtgtcctggaatatccatgagctcccagaacacacaaaatggagaaacttctacatctatctgtggttctgccatctgttcaagccagtacgcagatgcacacatcagccacccctgggactacctgtgccccatcctgctcatcaaaaccagcaaatgcaccaggccagtccaaaacacaactggctaaggatatttttatgatgtactgtaatgtcattatgatctgttgggaaaatccacttagcatttttgttgttgttgttgttctcttatttttggtgtgtgagttcttctggaactctctaaaaatatgtttatgaatcagttacctttgccagacaccacaggaatattgcaactgacagtgcatggggtgcgacaatattccatttgagctgagacatcagattctaacttttgtattttgcttctcaggttttccaggattgaacgaagcacacgaaggttagttgggatattgctattcacagtctcatctatatataattggtgcttttccagttctgaggagtactcattgactacattttcattatctggaaaaatgaaattatgtagaaatagttagcatttttgcctcataaaactaatgtatttaactatacaattttgattttctgagaataaactattaaacactgagctatcaccaagcagttatgatatatagtcatatttagtggaaatgatttggcgcatgacatatacaaattaacataaatcctaaccaccatactagtaatttaccataggtatacgctaaagattgtgtccagtaataaatgaaataggttgtttatttctttggtgagggaaaagaggagaaagcagtattggggtcttccatctgagaagttcaatcttacagagtggatatgcttgatttatttatccatttcacataagtatagcagaaccttgaaatttataagatgtcatgattcctttgatttctttgaaaaatttccaactgtgggtatgctactcactgagatgcctgtgccaggctcacgcactagctgtttcctgaccaccaagtcaacagcactcaacattctgacctcaagattcacaggttaggtgtcattatccacaacacaattgaatatattatggataactctctcattcaaaacctcaaatgttaaaactataaatgctaggggtttttttccactctgtaaatattatcttctgagtcacaagtttcttgtatacttaaaataaggagtcatagtagaatttttcatagaaaatcacacttgctgatgtcagactgggaataagagctgaatagtgcttatctggcaagttgcaggggaaggtgcccaaaagcgtatgaatgctattcactaacccagaaatgttaatcttctcacaaccatgcattctcgtggcagtctaacggttccaattttatagctgaaaatcgaatggaaagcacaaggatatctaccttttacttgcttctgcctcttttgccacaggtctttcagcaaatacatgtactgaaaggaagaagaggaggtctgggaaacagcttccacattgttatttaactcatcaacactatttctgattggcctttcctgttgtagcaaagcctcttgcaactgacatcctgtaggacacaacaccccctaaaaacaaagaaaatagcaggcattagatgaaggatttgggtcatggacatttgttaaaatagcacataggaaaattcagcgatacgattagccaacataaaaatttattatttggttttctgtaagaccagaaattcgaaagtcatcatcatactctcatagagatttaaaatattacttaccccagaaaaaatataattgggctatgaaaattttaccaactaaacaaaggcagtggcaaaatacaaatggaaaggtggcacccacatatcctaatttgaaattttgggcccagaccaaagaaaacaagaaagaaagcctaaaccaaaggcccaatatgtttatgttttgaattttatttccaaaataaacaaacaaaataacagtgatggtaatgtgggtcagtgaaacattagcagactgccatgactacaggctttctctgcatgagagagccaccactgcaagaaacatcagtgcacccaccaggtctgggtcagcgtgaagacagcctccagcatcaggggcttttctttctactttcttttgagtggcagctgctttggctggacgagcccgatagccacctccactgatgggcggtggggcaggcctcaggctgggagcctcttctctcttcttgtcaaggggtcgatgaccacgggcactgaagaaaccctacaaggaatgaggcagaaatataatacagagtgttatagaagatttggaatgtaactattccaacaccctcattttataatttaggttatcacaagcttgataatttgcttaagatccatcaactggctggttggtgatagtgaatctgtaggttgcttactgttcagtaacagtagaaagaccaactgcacaaaaaagctatgatgcagtgtagtttttaaagagaggccttaggataaagctgtatcagattatgaatagtaatgacctcatattcctaaaacatacattggaacttacgaaattgtaaagaatctatactgtcaagaagaatgaatattctcaagccacttggattgttagattcctatgattattgttaatcatttccctactttcatttttgtgaattggtgattagactcctatat

SEQ ID NO: 8752 - DNA, 17700 bp, Homo sapiens
gacaaaagcaaggaatggggaaaggatttcctacttaataaatcatgctgggaaaactggctagccatatgtagaaagctgaaactggatcccttccttagaccatatacaaaaattaactcaagatggattgaagacttaaatataagacctaacaccataaaaaccctagaagaaaacctaggcaataccattcaggacataggcatgggcaaagacttcatgactaaaacactaaaagcaatggcaacaaaagctaaaatagacaaatgggatctaattaaattaaagagcttctgcaccgcaaaagaaactatcatcagagtgaacaggcaacctacagaatgggagaaaatctttgcaatctacccatcagacaaacaatcccatcaaaaagtgggcaaaggayatgaacagacacttctcaaaggaagacatttatgccaccaacagacatatgaaacaatgctcatcatcactggtcatcagagaaattcaaatcaaaaccgcaatcagataccatctcacgccagttagaatggcaatcattaaaaagtcaggaaacaacagaagctggagaggatggggagaaacaggaatgtttttacactgttggtgccagtgtaaattagttcaatcattgtggaagacagtatggcaatttctcagggatctagaactagaaataccatttgacccagccatcccattactgggtatatacccaaaggattataaatcatgctactataaagacacatgcatatgtatgtttattgcagcactattcacagtaacaaagacttcgaaccaacccaaatgtccagcaatgatagaatggattaaaaaaatgtggcacatatacaccatggaatactatacaaccaaaaaaaaggatgagttcatgtcctttgcaggggcatggatgaagctggaaaccatcattctcagcaaactatcacaaggacagaaaaccaaacacctcatgttctcactcctaggtgggagttgaacagtgagaacacatggacacagggcgggaaacatcacaccctgaagcgtgttgcgggggtgggagcctgggggagggttagcattaggagaaacacttaatgtaaatgacgagttaatgggtgcagcaaaccaacatggcacatgtatacctatgtaacaaacctgcacgttgcacatgtgtaccctagaacttaatgtataattttaaaaaaatctcaaagaattagattccctagcatgaggaatttatcttactggattttttttttttttttttttttttttttttgagacggagtctcactctgttgcccaggctggagtgcagtggcgcaatctctgctcactgcaagctccgcctcccgggttcacgccattctcctgcctcagcctcccgagtagctgggactacaggcgcccgccaccacgcccggctatttttttttttttgtatttttagtagagacggggtttcaccgtgttagccaggatggtctcgatctcctaacctcgtgatccgcccgcctcggccacccaaagtgctgggattacaggcgtgagccaccgcgcccggcctcttactggattttttaatgccactatccggcagtgattaaatagcaagttcaagtgattaaatctgatccaatcactacacttttcctttaaaattgctattaggttttgtaagtaaggaagtggaggcatttttgtaagtgcattaactctcaaaggccacaaaagtacgtttttaaacttatggatcaagttgtgtggatacgatttcagacccccagaggttctttcaacgtgtctagtgtccagcacagcgcacctggtcagagtttcgttgtaacttacagcaccatgttttctttggagtgttgttcaggggtctcttgcatcagaatggcctgaactgcttgttaggaatgcagcttcctgatcttaccgtccagtttctgattcagtaggtctggagtgagccttggaaaactgcattttatttagcataatcccctgggggattgggggctccccaaagtttgagaaccaccgctaagggctattatgtttctgcaggcaaacatatttttctttttttgttttatgtaatacaaagtaggagtttaaaaatttatttttggtaaaactagaacactgtcttcaaattagtaagagccttgtgtaggagaaatattctcttcaaaaatccctccacgaaattgatcttaaaaagactagctgagtcaaatcctaacagatctgtcctgtatctggctgccacctttcaaaattgctgaccttatgcttacatattcgaatgcttcctggaagtcaaaacatattttcaaaagtttctaatggaaaagaactaagcctgtcacttggttttaaaaggtggaaattgaaataagacaaaatggttgagattaatttcacatcacaagaatacaggtaagaaaagaatacaaatttccataacttctatcaactatcttttaggttgaggatattatgaaataatccttcccttcccaaccaacaatgaagatgattgatacagccatcatactgaaggattcctactgtgtcagcaattatattaatttcttatagaaatataaagagtataaccttcaaaaactgggtattgttaaattatacattggattctgttaaatgataacaaataaatatgaatataaatagttaaattaaaaatatatagatattacttaataggtataagacactcaaatttatgaatgtacttaagtttctttgttttacaatgagaacacttggacacaagaagggtaacatcacacaccagggcctgttgtgcagtgggggggagggggaagggatagcgttaggagatatacctaatgtaaatgacgagttaatgggtgcagcacaccaacgtggcacatgtatacatatgtaacaaacctgcatgttgtgcacatgtaccctagaacttaaagtataattttaaagaaagtttatttgctttaaaatttcatacattatgaatttactatgtcccctattacaatggtctccgcaatgaagagaccctcactgtcctattatgttcccccaagtagttttataatttctttcatatgagtcctctatctttcttcagtctacattccactgttactattgttactctcgtatataactctattgctactgattaacttgttttggtggaagtgtttccctgttgtattagatagggttctccagagagataaaaccaatagaatggatggatggatggatggatggatggatggatggatggatggatggacagatgaatggacatacagacagacagttcagaaggaatttgttagaggaattggctcactgggttatggaaactgagaaggtccaggacagggcaattgtaagctggagaccctgggattccattggtgttgctcagcccaaatctgaaagcttcagaatcagggaatctgatggcataattctcaatacgaggccaaaagcctaggaacctggggaccactggtgttaagtcctggagtccaaaggccagagagcctggagttctgatgtccaagggcaggagaagaagaatgttccagctccaggagagagagagaaatcacctttcctctgcctttttcattcaatctagcccccaccacacacacacttacagctgtttggctgacgcccacccaagttgagaacagatcttcataactcactccaccaactcgcatgccaacctcctctagaaacaccctcacagacacacccatgataatgctttaccagttttcatgggtattccttaattcaatcaagttgacacctaaaattaaagataacacctgtgctatgataaattggcaacattgattaaatgtccatgaacaccaagtactaagataaaaattgcagtgtccaatgaagcataaatgaaggtcatctaatccaggcaagaaaatggcatgcaaattgttgaaagaatgcctagaaacacacacacacacacacagtcacacacacataggtaagtccaactatccacaagcaatctctctgtatgtgttttgtatcccaagtcagacaagtctaagctcttctggtttgaggaggtagctagtgtgggtcaatgtacctatttctatgaagcccatggtccacgcttgcctgtcacacttcctcacttagcatactgggagccagagccctgatattttgaaatgctgtttattaataacaagtccatgggtctagctagaaattcgtgagattatttgcattaaggaatttggggcctgggagtttacttcatgtctttgtcacttcttgtaagacagcaccatttcttggtaacaatggacactatgagttggacactaaaaaggctctggttacattagtaactttatttcaactgtagcacttactctatgcttttttttcttctacctagtgttttaaaatgtatatctatatcttctctttaaggatatgtaacttagtgaacactcatcttctttctcactactttcagcctaccgtgtttatctaattcctatttcatttcgatcagggctttacacatttttataagttgaaagacttaatcgaattacttctttactcttactttttagactgtatttttaaaaaaaatctcatgtgtttatttgattttggaatactctttttccaaaagagggctggtaggtgtctttgtgttgcaaatattctgattgttaattgcctgagtcaatatcaaggaattgtctataggccatcacatttaaatgccagtttggctagatataaaatttcagtttcaaaattatcttttcttcaagttagattggcggcacctctctgaaacccttggagtcacataaagtttcagaatctgaatgacttaagaaaggctccttaatacacacaccatatgtagagtgttacatagctagaccaattaggtccaggttatgactctcaaatcaaatacaccaatatatctgcagcaagacatataaacattcttgctaaaatggggtttttcaaagattatagacttttgccacctcacattagatatttttctaacaaattttgttaccaaattttcacaaatgcacaagcttttatttccatttggagggtgtttcaaaagtatatatataagatttagcgtgaacagtataaaattacttcaggtatttttatttgattttgatccctccttcttttctttaactgtttatgttaacaaattctaaacttacagaaaagctactgtatcctcaactatattttctaaatggacttatttttttctcctttctcaggtatgccaatgagtcacagatttgatctctttgcataatcccatatttcaaagaagttttgttcatttttaaaattcttttctctttacttctgtctgactgagttaattggaagactctcaagctctgagagtctttcctcaatttggtctattctgttgttaatgcttctgagtgtacgatgaaattcttaaagtaaatttttcaattctagaagttcagtttttttctttcttaaaatggctattttgtctttcagctcctggattattttattgaattcattgtattgggttttgactttctcctaaatcttgatgagcttccttacctccagagtctgaattctatgtcagtcatttccgtctgcttaattatcattactgtggggttggggtattygtttggagataaggcgacattctatctttctgaattgccagagttcttatgctgattctttctcatgtgtgagggctggtgttcctttaactgtaatgtaagtttagtatagacagttggcttcatttctaggtgctttcttagggccaacactctgcattgataaaagaaaaacttcagccaaattaaatttaaatgagtttaattgagcaatgaatgatcgtgaatyggggagccctcagaatcacagcagtttcagagatactccaggggtgccttgtgatcagaacgaatttatagacaaaaaaggtaaagtgaggtacaagaatcggaagtgmggtacagaaagagtgagattggttacagctcggcgtttgccttrttttaacacaatttgaacattccgcagtctacgagtagttgaagtatggctgctgggactagccaacactcagccattgttacaggtgcataccattaagttaggttttcaattttgtctcacaaggttagggttcatccacaaggactcaaatatagaagtatggagtatggagttcttctaaggccrtgtttagtttgctttaacagtacagaatctttatttgtggctgaaatttttgccttaggtttcacaggcactgtatactggcaaaatatttttggtgttgtaatttgggtacaatatagtaagagtggtggtcagcagacagacttactcagctgcacagctctcgcattttggcatgttcacagtagtgctctgttggggcggaggggaagagaactaaccccctcaccagatccactcctgaatcttggaggatccccctcaaatcactggcaccatgctctcattttccttactcgggtgttctgggccacagggctccctcaggcaggggacatggctgacaagctgtactctttccagactagccytgcagaaagagcaacattctgctcctccaccagcccagatgtctcatccttctcagtgttctgagagtgtggatttttttttttccagatggagttttcgctcttgttgcccaggctagaatccaatggcgtgatctcagctccccgcaacctgtgcctcccgggttcaakcaattctgcctcagcctcctgagtagctgattacaggcatgcgccaccatgcscagctaattttctatttttagtagagatggggtttctccacrttggtcaggctggtcttgaactcctgacctgaggtgatctgcccacctcagcctcccagagtgccrggattacaggtgtgagccaccacacccggtcgaatgtgggtgttttaagagtgtgggctcccccaactgcttgaatgctttccaagctggcaaatctgccaggctaggagcagcagggatgggttgagttgcccaatctgccatccaggtgcttttcaggggaacatggagatgtatascctagcagaggtcaggtaggggtagagctggaagctggtactgagcctggtctggtagagaggagtgtagcaatttgacttctccccagcaccatgactgcaggctctattgggactatggcagctggtactgggctgctctggggttcaagacctgtgaggctccctgtggagtaaagtgttgcctccatcaaaacttctgggggctctctgaattcatctagaggcctgggagggccaagggaattctcctcttcycaggattgcaaaggtcccttttagaaactgtgtatcctcttggggggtctcactcaccctttctccttgttagagagctcctgctggctccaggccagrcctcagtgggcygttgcttggcttcactctcctctgttctccatgtccctttattcccttgatggatctcaacctggtttcttagataatcttcctgtacagtcagtttactcaccactttgtttcctctccatgagagcagcacacacttgctgcttctagtctgccatcttgactccatcctcctatatttccaattttttagttccaccctaactccttatgaggaagttttctatcagatcctatctcattctataactagaataatttatattattattatatagcaaactattatgtgtggagccaggtcttttgaactccaaaacttaagctcttaacactcatgttctctttcttgtatcaacatgttaaaggaaaatattggagagaaaaagaagtgtcatttttcacaaatagtgtttctcatatgctatattatattcagagttttggacattatatataaatatatccaatgtaaggtattccatatagttggtttcaaattgagtatatcaacataattgtataattttgtataatcttaatttaaacttcattaattttatgaagttcatatattctttatatctacctttcaagaagaaaggcaggaaaatatttgatgcagaaagctttaaaaggcaagatatgctatataattctgggtcttaaatatgcaaaataaaaaaaaaacgaggtaaaacagagaaattattgagggctttccatgccagagtgaggagyaatgcacttttcccaaagaaaatggagaagtattcaatgatttcaagtagggtagaaatatgaattatagagagagctggctcaatgaaaacaactgattagagaaattaacctggaaaggggaagatcaagcaatttttgaaaatatcccagtcagtaaatgctttgattctacattttggaggaagttgatttccagcaaagggacaatgatatggccacagaggacacagagaatatggtccaacaataattgagagagcatcttaatgagagctgattagggaaaagccaaatgagcaagtcagtacctcaacaagactttcttgtgctgtggcagaacrtttcttctaaaatgtaagaagctacagccyattttgtgcataggccacataaatcatagtaggtggaggaagagtcaggtatcaatatgcagatatccagaaaaaggttccagcctcctaaaagatggcaagaataaccagagttcgacaccacacacagcacatactctaaacactggaacagttacctatttccagacacacttccaccacatccaccctaacccaactcaactatcataatatagggaaaaaaatttttagatcrtcttgatgcaacaattcataatcaataytccaaatgatgtaactggtgattacagtccatcttcatcacacacacccaagagcaacactttgacatcggccactcactcacataggcatagccagtctttccaattgtctgtataaatgtgtgacactgtacgccacttttctcttgtaggttctacccrtcacctacagataatggtgagtaaatacaagaacaatgttctgctgaaaggattagaarccatcaatgactatcacttcagcataattaattccttactgatcaatgatttaaaacttaattcaacaaggagagacgaatatgacaaaattcagattgccgacttgatggaagaaaagttcccaggtgatgctggtttkggcaaactgagaactcttcaaagaaataccaacactgggagaggagaccttgctgaaactcttagaaaagtcaaaaggtaattgggaaaagggaattctcccctccctgccactgtccctaaacccttcccaaccttgaatagaacctcakcttcattatggttaatatatccatttcccaatttatgcctcagcggtcatgatattgttggtactttgcatgtcaacaagttgacagcatagagcattcccattccagtggattcatatgttttgaagggtgtatctggggtatggagtaaaagcaatagataaaagttgtcgatgaaagaccgaggcttctggtatgataaaaaggttagaaggtggtgaatcaagccgggtgcagtggcttacagcactttgggaggctgaggcgggcagatcccttgaggtcaggagtttgagaaagtggtgaatctaaatttaaaaatgatgttttatatgttaaatatatcaattaacctattgtttcacttgctctattaaggctatttacactatcaccattatcctctgtagtaacaaagaggagacaatacttcaatgaaagcctacctgtcagagagacaaactacctttttaaaaaaacacagatttaattttttttcaaaaggcaaagttyagaatcaccatatagtcacytcataaacctatatcatatttcatttcactggtttctgtaatttgaatagattatctctggagcatgtccaagaagttagacttgtgaaaatatgacagttttacaagtaaatgataggagaaccgggattgggaaacatctgactgaggcacatggagttcgcaggacagaaaggatgttctccgtgaacaggggaggagtaatgaaagcactgaggagcatgagactttgcctgtgcctgtgcctgtgcctgtgcctgtgttatgactatcgacctcattgaggccaggctggattaatacagttgagtacactaaagcacacctgaatgcttaagcaggaactgagacaaaacagcatagagattgtttcacctcccatagatcatctgctctgggtttagatgtcctccttttttctttattggttgtgaataaaattaaatccattccagcaaaaggaaaaacctcatcaaagaagaggaagcagagaaaagtaggtccaactacacctttagcaaccacagacaagaagttcacagctgaagraggagaggagactcctatagctcaggtaagcttgagtaagaggagcaggcttcaattcccacagaagaaactgccatggctcttccactctgtctctccagcaggcagtttttcttcattagtttctcatcaagcttcagatttatcaaattgcataataattaatcttgtttgtaaaaagcaatgagctaaacamtttagtaaatatatatcgcacaaatatagtatcttcaccccccaatagagaagagtgttaacttcaggttcagaggggaaaatgctttgtycatatttataaaaacctagttttttaattgcaagtcagtacatccccaaacactagtacttagaggaatgatgtgtataactttcyagtgtctctttttttttttttttttaatkaagccatctatgccctgtcttacaataggccaggaaatgtgcaccaatcctttgtttccagaaagacaattgacatataacaaacctactacccagtaatgaaaatgtgctctacttcatttgtcactgaaaacaaataacaggaaaatcaaaccactttcagaaaagaaaaaacccaaccaaagaaaaggctggaaccaaaaggagtaagatatccgaggagcagactcagcctccctgtcctgcaggagccggcatgtccacagccatgggcattccccacctccccagacctcatcatcagctccacccaacacttcctcaactgaggtacactctccctggtccccttttgctttgttttcttcaaccccaaatataaaaattttatctcctacttaaaaataacatggataattagccaaataatccaatgtatatactgagaattagctagagtttaatcttttgcttccataggatactcgataaatttgatattatctctgacatcaggaggttttctgtcctgtgttgtttgggagaaatatagagaggtatggagttcagaatagtacaggtagatacagcagtgtgttcacagtttactgcttcagtctcttttacgcctcttccctctgctcaataacctgttaaagtttctttgatccacaatatgttcttttcttcctcagcgttttcacacaccatagtccctctccctgtaaaactcttaaatggctaaatagaggtactctgtggatcccaatattgatattccgtcctcagggaatcatccctggaaccacgttcagactaggtaaaatatttacggtgttcactttagtagaatctcattttttcctaccaattatgttaactacaactaataaatgtttgtccattcaatttattctgtgttgtaagattacaagctgcttgttgatctggtgaatccctgtaacccagagatttctttgagtgacagaaagtactgaaatgtgaatctgcacagctaatgaaggacaaatgagagttatctaatccagccatgaaaaccatgaaggttatatttttgtgaggcctaaaacagtacaaaaacaaacaaagtggtggaataggatggagagttgaaattgtggaaatccaggcagaaggaagactatacaccacgtcttggaaaataaaggaagtgggttgcaatttataattacgtgttcattcttattaggttgtactacttttaaagtggcttctcatattttgctatatctcacatcattgttcatctgataatatatgaaaactacaatgtgtttcttattccagaaaggggagtaattcttattcatgaataaacactgaaggagaaagattatggatcatagtgggaaaagccacaataccatctacattctctctctctcattttttctacttaggtaaaacatgattactttagaacttgaggaaatggttaaaacccacaagtcaaacaaaaagtaattaatttttaattaattgaaaccttcccaagcagatattaataaatttttctctgtatttttagatatactctttataagcttgcattttttgcaatatagtatcctataatgattactattttagtacttgttttattcatttaactatcagatckatcttttcaagtctatgaattaaaatacaaattattatttagtggcaatgtaatgttgaattgcacaaatattggaatttattttmaaaataattctctatttacttccaatatcccaacctcaatgcctgtcctaggaacattcatgcacctgtgccctttgaggctcctattatgtcctttagagtagttgtataatttatttcatatgtgtactgtaactttcttgtcaacttgaaatttgttgttactagtgttttagaaaagtgttccttgtgttatgttatttggcaatattaatataatcmattaaagttaaatcctagtaaagtccaaacacccacagatgttgattgtgttcagtgtgacaggacagatcatttgcctcacttctggtgcacagagacaactagcatatttctatacaatacagggtctaaataaktaggttacgtgccaataatttcatctctttgtactctatcccaactggagctcataattttactttggattttgatatatttactttgtataatgaattgtactaccaaggttgaattctagttgtgacgtgcaataagtataataaatggattggctaactttctcctaagtgcaaatactttcagcagctatgcatatgatctaaacatttgtgctgtctcccttctgtcttatttacttatttatttatgaagatagtattgaataaaaattttgaattccatgatacttagaagataaggtaatcgaatcctctcatttacaaagtaataataataataataattaaaaggcacagttttactgatatgtccatgtccaaattcaaggtgacagcatgacacattcaattcctccctaacagtcctcaaaaaaattacaaactgctatgaattcaactaacatttcacatgattgactgctttgtaaccctacatacataccttctaagttagccccttaaatttacctccagattttcctacacactctataagagatctcgcaaagaaatggaattatacagttgatgaataatagcttctgtgtgtaagatactacaatacaggaaccatggatgtagtcaggaatgaaaaatggcacaatatcaagtgtgaggaaggagataagttttgattattctgctttcatctaagaacaattgactacaagctaaaattgatttgtagaattcacatttttatcaaggtgggaactggatagaggaacattagtttgccaaagaagtaaatgattttgtttaggcttcaggaacactagattcctatcctgttactcagacagtccagcaggtgggaggaaaatccaaacaatgtccctgcactcacttctacgtagaagagtttttaatgatattaaggaaatagtattcttataagcttcaaaggaacattcaaaaggattataatacttgtgctaagtaataaagtatttaaagaaattaggatgacagggaagtaatttcatatagtgttcaagagaaagggttttgaataagacaaatctgatttgaatcctgaattcaacactcattagttgattgatattggagaaatagtttcactgatcccctaaaataatggaagtctccacttcatcagcatggttaaaatattaagtgagacaatgcrtatttatgcatataagtttacatatatgtaaaatttatataacatatctcactgcctagtacatcatgagaaattaatctatggtaagcactacttttcctatcacggcaaagatattggaaggggatctaagcaatgaaaatgacacaygcaaatgctctaaagtgtgaaactgcactgtgagttctgtacaactaaaattctataaagagtttctatgaagaaactatggaaagatgcagcacagaataaaaattgggggcgggggcaggtggtagagtatagctgtttgtcagaaataaagaaacagaaaattcattgtgaaaaacagataaaacctaaagattttatgcagaagaatgtctgatcacattgacactttagcaaaaaaaaaaaaaaaaggtattatggtaacaattctagaagtatgcattagagaggcattaggttagagcagagatatcaattagaagcaatgatgtgcccaagtcagctctcaccagaacacttattgctaagtatttggggattttatgaactgtttgtaaaatctttggaagtttgaaattagccatagtggaaatatttatgccagcaaaatatgcaaaggctacaaatagatattttctaaaattgggcagctagtttaccaggacaccacgaaaggtttcttcagatttctatttaagaaggagaaagacaaacagggctgtgatgaatggagtaaaatattttttgaagctatatcctcatgattgtgtgactaattaagtgatgatgttgagaaagataaaagatttaaggagcattcaaagatgattcaagaatattatccaggcaactgtataaatggtgctactgttcactaacatcaagaaagcagagaacagcacagtctaggaagtgaaaacatgttgtttggacaagttgactttgagctacctgttggatatctaagaaatatctctctatcaatctgaagatatatagatctgtataaacagatctggaacaaaaaaagtaattttgtactggcgagttatgcatttgtacatttagagatacatgttaaaattatgggtttagatgatattatctaaaataattgtataattctacatttatactaatagaaaactgagcactcactatgtttggggaagtgagacaataatgaagctataataattattcccatatcatagataaagataccgatgctcagaaaatgtaagcaatacacaccaattgaaacaaccagttagtggtggaactgacattccagcccaggctgtgtagatttagaatgcagattcttaagcaaggtgaatgagaagatcaaactgccataggtggagccatagaaaagttggatatatatttgggggtgactacaagtaaaggatgctacaaatgaggatgaaactatgtacacagagaggtcaaagawaaagtggaaatatgtataatatgcatcaaaaataagtttaacaaggaagagggtcaacacagctcatgtcagactcaaataaacaaggaagtcttggaataacttcatcttagaccaaaaattgctatactttagtgaaaggcaattgctgattcacagaagaaaacatggctggctctccataacatcatactaaatatctcattctccaaaagcacactaacgacaagcacaaaggttcacaataggagccttgataacactaaccaaagttaaatttaagtacaaatgattaaaatggaaatagtgacataatcaggcacacagacatatatatgcacgtaaatcgttccacatctcagattccctaattcaataatcctttcatttcaattgaaacaaccatagttgtactgtgaaaaaccttacctaatatcctcctgccaacattctgcctaattaaaatcttccctgaatgttttgcactgagtaaataagctattccctgtcacctgtggtactgccttactgcctttgtttaactcctgctctgtttaaatgtacccataatgggcatgagagcatatctctattcagactccagaccacagctgggagcaagcagactcaaaagatggtaatacgtcaaaggagattgctgagagagaagcaatgaccattgagattggagtaaaagaataatgtagccgaggaggaggagccaagatggccgaataggaacagatcgggtctacagctcccagcatgagcgacgcagaagacgggtgatttctgcatttccatctgagataccgggttcatctcactagggagtgccagacagtgggcgcaggtcagtgggtgtgtgctccgtgtgcaagccgaagcagggcaaggcattgcctcacttgggaagcacaaggggtcagggagttccctttccgagtcaaagaaaggggtgacggacgcacctggaaaatcgggtcactcccacccaaatactgtgcttttccgaccggtttaaaaaatggcgcaccatgagattatatcccgcacctggctcggagggtcctacgcccacggagtctcgctgattgtgagcacagcagtctgagatcaaactgcaaggtggcagtgaggctgggggaggggcacccgccattgcccaggcttgcttaggtaaacaaagcagctgggaagctccaactgggtggagcccaccacagctcaaggaggcctgcctgcctctgtaggctccacctctgggggcagggcacagacaaaaagacagcagtaacctctgcagacttaaatgtccctgtctgacagctttgaagagagcagtggttctcccagcacccagctggagatctgagaacaggcagactgcctcctcaagtggttccctgacacctgacccctgagcagcctaactgggaggcacccccagcaggggcacactgacacctcacaaggcagggtattccaacagacctgcagctgagggtcctgtctgttagaaggaaaactaataaacagaaaggacatccacaccaaaaacccatctgtacatcaccatcatcaaagaccaaaagtagataaaaccacaaagatggggaaaaaacagaacagaaaaactggaaactctaaaaagcagagtgcctctcctcctccaaaggatagcagttcctcaccagcaacggaacaaagctggatggagaatgactttgacgagctgagaaaagaaggcttcagacgatcaaattactctgagctacgggaggacattcaaaccaaaggcaaaaaagttgaaaactttgaaaaaaatttagaagaatgtataactagaataaccaatacagagaagtgcttaaaggagctgatggagctgaaaaccaaggctcgagaactacgtgaagaaatgcagaagcctcaggagcc

SEQ ID NO: 8753 - DNA, 253869 bp, Homo sapiens
tggaatacaaggtctcagccaggcgaaaaggctgggaatcaattctccaacagccacatatgatgcaagagtccactcgcaacaaagcctacgacacaccaaatatcagaaacgaaagtctctgagaacttgtgcaaataagaaacgtatttgcattggcaaggatataaaatttaagtaacaaatagaagaagacaggatcttctgcaagttacagacagtaatatttatggacatttctaagaaagcttgtaatgagtattttctacactcagaaacacttttttgagtctacgtaaagaaaacacttcaagagagataggaaaatggggtcttcccactctttatttatttattgagaaagactctcgctccattgcccaggctggagtgcaatggcacaatctcagctgactgcaacctccgcctcctgggttcaagcaattctcctgcctcagcctcccaagtagctgggattacaggcaccaccaccacgcccagctatttttttttttttttgtatttttagtagagatggggtttcgccatgttagccaggttggtctcgaactcctgatccacccgcctcagccttccaaagtgctgggattacaggtgtgagccactgtgcctacccaagtcttcccattctagctgaagaaagcataggcatgttagaagtatgaactgccactaaaaaaaaaaaggagaagaaaaaattccatcttgaatcagacccatggtctagtgagtctatgcttctttcacttcccccaccctgtaaagtcagggacagggattaagattttgtcatttcgacaaacccagaacctgccacagggcctgacacacagcaggtcctgcataaatgtttgctgaatgaatgcgttaaagatgggccctcgtctgtcaagaggtggaacatttgagttcatgtgggtgaagggcgcagggcggtgcacagcacaaagtcaatatggcctaagtcacagtgatcaccgtgaccctcaagcatctgggtttcttttataggaaaaataaagatctgcctatactgtaggtttttcttttcttttttcccccaaaagagaatagctatatgaaatggaactcttgcgagtttgggcctttcaagttcacatcccatcggtggttatataaagtctactgccattattctgaagcccgtctttgacaccaacccaaagtccttgaattgtcatcaataagactaccagaaagcacaggcgaattacacgttcagagaacaataagaaatgctcacatatcacaccctcttgatcatcactactttgctccacacaaacctcaaaggtggttccccaagactggtctctatgggaggaagggagagagagagagatgaagaaatataaaacataaaatacaaagaatctgagcccctgtaacttacagaaagcaccaaattgtcttttgtaggaaaatgatgtttaatgcatggtgaggcagaccctggcttgtggtgggcgaggagcctccccttggaggaggctcttggtgaaccacctctgggtgctcccttgcccagcctgctgccttgtttaggaatggatcttggttaacggcaaaggttatctttcatacttggggatactttccaagaggcacagctgcagcccctgaaactctgccccagcagtttatttccacatttttcaagtagcacagaaagtgccactatagaagagaaattctctacctgaaaccagcagaagctcaatgcaaataaagaatctggaaaggtcacagagggagtaaaaagaaggttctttcttctatggctatagggggtttattgttgctggtgcccaaactggaaagggaatcgcaggagattaataattgaaatgttgctattattggttttcgaaactatttgtgggttattctttccctggagtcatcatgtctgtaagcatctcagaagatagagggatttaacacactctgagaagatgcctactacagccagggactttacgtgcactagtttctaatggagttcctgcacagtccaataaagcccaaagtcgtatcactagattcaaactcaggtttctctgattcaagtatcatagcacattgtctgaaatcaaggataaaattaaggcaccttactcactactcaaatgtggcgagaagaaaagcaacatttatacttactcatttttaaaatataaaacctaaacacaggaacagatattttagggcatgtgtcatcaaactctgctaacccaagatgattcagaatctcatttcttggtagacagcttggtagataggcatcttcaggtccatctgatgatgaattgcagcagacagtttttggaagtctgtgaagtgttcctttacataagccaatagtaatcaacacagcatatctcagggagaggaaaacataaataacttggaatttaggctcctctcattcagaacccataatagagaccttggtggttggcctttgcactagatattgaaaaagcctcgcaaagcaagttgatggaggaaatacaatcacaaggcaaatgtttaaccttctaaagaaaataaacctttttataagaagttcagttccaaaccaccaaaaactaacatgctatttataaacctatccttcaagcaagccctggaagactgattctctttgccacccattaattggtattatcaaataccccttgtttcaaaaacagcatttctgtctaaatctctggcggttcagaacgctccattaatgtatctgggccttcacctggtattccaacttggtgcagcagcaccccattgaaacaattccctctcgtgtcgttatacttttcctgagaagaatcatgcacactctttaggagctcaaaacccacaaggaatccctcttcttatagaaatctacaggaaaagctctgctcgtttagcatgcacacagggagtccatgtgctctgattgagacaggggaaaaatcaggtttcctgaacccagaggatgtcaccacggcaggagaaaggaggtcatcagagtcttggcacactcatcacagtgagtgaatgcgggtcctagcaacctaatccttgattctagaagtcacctgtctgttttagagcatgtccaacaatctctttcaaaaacacccagatctgggcttttggcagactgatgtgggccagttgaggtgggatggggaggaagattagaaaaataattataaaggtgcacagataaacatccggaataaaagggtgcacagcgcaggaacaatgaagagggcacacggacaagatggagggaaactgagggctgaaagaggccaccgcggaggtcacctgagacagggaaggaaggctggcaaataaaaacagttcatgagacttttgagatccatgattattcttaaaccgtaacaccctacacacctgcagttctttatctggcgtaaggaactggaagaacaatgtagcaggaacggggagagccaagtctcagcctcgggggcatggcctaccttccatatggatttaaaatgaaaggagcaggaggagaacagtgcagttcccaagatggctttccacaaagttgacaaaatacaccccaactcacatacccggtccctagtaacagggaaaccagccgtttactatagttctgaattcaatgccaagttccttctctcaactcaccgggagtgtccagcagagggagtctcaaggaggtacttaataaagagaaaattgtttcattttaacactctagacagtgggagcattgactgtagccccctcctgtagacgcagatgaacaatgaacgcccgacatgggttctcccgcatgttcacatgtccaccggcatgttctattctgcgtggtggagtgatcagaaatttcgttttgttttgtcgaatggttaaatggaccttgtgttcttcagaatcaaagaggaaagcccctggaataacatctctctgttgccttctaaacagcccctttgtttctaagagagtctgaaaaaaaaatatttacagtctataggttatttacagcctcgttatccagggcctgactggtaactttattccggccagaaacctaattcatttggagccctgaaactaataacagattttcttttaagtttttttttttttaatcagcctcttataacagagataaaactattaatgccttccctgtctcactggccacaactgttctccggatttacaggaggattacattcccccctcgtgccctcctctgtgccacacaaaccctgtcccctctcatttgcgatttcatccacagaatatctgaacaaaaccgaaagaaagccgggggacccacgctaaaagtatgtgaaggctgcgatttcaatgatttcatgagacaaacatttacacgatgaaacgactgaaaaatcagacacacttgggtttaaaatttctcctactacaagcacacaaaaacacatcgaagtgtaaaaacttagttgattctgggttgctttctggctggaagctgacagaacggactgaagagaaacgaaagacagtgtgcgaggcagacctactgcttttctgccttgcgttcttttctttcttgctaaaggcagtcaaatggggaaaaataccccgatgccaggtgaaggtgcacaacacagatcgacccagaccgagccagaaaaacgtctccgccgctcccccggctggaaaacccaaagtccacgtccccttccacacgctaatgaggggagattttcgcctatttcattgttctgcctggctctgacatggacttttcatctctctcctctctccccacctagccccgtgcattccgattccacagcccccccaaaatcggaggctcgcggagaataaaggagcgtggggtgggcgcggaaagaaatgggaaggggcgcggggcggagagcgaagtggaaaggaggtgctccgaaaggtaatgtgggggggcggtggaagctaagccgcatcaccttcatttatcgcaaataaataaaaagcacagtcaccggtccgccttccccggcgtccctgccctccccgggcagccgcccaccctcgcacacgccccctcccctcctgcgcccccggcccctctccccgccctggaagcaagaccctgccggcgccgggtcccggtcatcttccgggcgagggagggggtcgcggccccctcgggccccgggtgggggctggggcaggcgccgggggctgcgggcgcggggccgcgggcagaacaaagctgcgggggccgcggagggcggcgggcgcggggtcggcggggccgggcgccccttaccttcgtacacgggggccatcggggccggggtgtccgcggttcatggcaacggggacgggaaagcggcgcgcgagctcggcccccccagcctcagtcggaatctgccatcttgagcctgtgtctccgctctcggcgcagccgaggccgcccgcgcccgcatcaccgcctcccgtggccggcgccgggggagggggccgggcgcgccgccgccgccgccgccgccgctgccgcccgggcccggcgcggggggctcggggctcggggctcggggcggccgggcgggcggagcggccgaggccgaggcgccgagcggccgcggcccccgagcggatccgcggaggggcgggagccgggggcagcgcgcggccagggccggcggggctcagctcagcatggctgggcgcgggggctccgcaaaagttgctggcggaggggggcggcgggcgggggcgggggcggggcgcggggccgggagagccacagggagtccgcgcgcaatcgagcgccgatggcacggatgcgaggcggggaaggccgaaccgaagggcagagccgcgccggcggcccgaggggaccgcgctgggaggggctgccgcgcagcgcggggggactgggcgcagggcgggccccgggtagtgggtgagagggccggcctggacccggcgggcgcacggctccgagyccagcgcagccgagccggtctgcagaggggcccccagaactttgtgtgtgtgtgtgcacgcgcgcgcgtgtgtgcccaggtgcgagggtkcgcgcgtgtgctggcggggagggaaccgacccgaaagagagccccacgctggcaaagtggctcgcccatctcacagccggttggcgctcgcggaggtaggagtggaatgaatgaatgaaggagtgggcgcgcgccgtgctccggaggagggcgggtgagtggaggagcttcggaaagccacacgaggtcagaggcaccgaagccctgccgtgcacgccgcggaaatgcagcccccggggtggtcgctgggttcctgccggagtctggcttccacgccaccctgatcttctcctcctcgcgtctacactgtcycgagggccgccactccatcacttgaatgggagctcacaactctctgggtcctcgcttttctcagcgctctctcctatcagggcttccgctaaacactctccagactctccccagccgggagcctctccaggtttgcttctccagctgcctcccggatgcttggataggatgccctgccatcccctccaacttaggaagacttgttgagtctcctcttaggcactgtttttaaaactgtgggtcgtgacacagtaatagatcataaaataaatgcagcggaaggcaaccagctttcaaaaagaacgaaatggaatccaatagaaaatattagagtccattgcccttagtaagggcaactattgtttcataaaccttttgtttcgattataggtactggacaagtgtactggaccatgatgtcaattttatttccgtctgtgaatcgtgggtttaaaaaagttgaaaagctatctgtgtaaaataatgatctctaacactgtataactttcttaaaaacaacctcgtgattttctcactacttcttatcctttccggtctccatcctccgttcccatccttcagtccttcccaaaaaaggcaagctctttcacacttttttagtggtacatcacgacaccttcctctgtgtgatcttgtactctgcggtcttccttgcccccataatcaatgctacacttcctatcccttctcttaacctaatgccattcacgtttgcagaatcctagactactgttgctaaaaggacctcagaggtcatctgggccagccctgcccttttagagttgaagaaatggagtccagagaagtaaaatctgttgcccaatgtcacacagtattgaagcttaggaataggtctcgtggctcccactctagtgttttttgctccacaccggtcatttatctccttcccttctatyctccctgcaatctttaactttagtcttggcccaggtcatcctaaatattgccatcttcataatacgtggttctggccatgccacgctcctggctaacatcctctaaggactcaacctctgcaggtggggctgagtgccttggcttttcatcaaggcaggcgagtcctgacttagctttctaaggacatgagttcagcaagtcactgcttctctagccaaactggtttacttgtagcccagtgccagcttcacccatctctgtcactgtgcctttgcccaagcggtcactttcccacccactttcccagaggggtaccttctccatcttctctctttaagcagattctacctgtgcctggctcacctcctmcacaaaacagcccgagatagcgtgggagtaagtcagacctaggttcaaatcctagctcttccacttaactatgtgatcttggtcaaaatgcttaacctctctgagcctcagtgtctgtattttgattatgagaaggagaacaatagtaatgttctccttttgcatctgtaaatctctatcatagccttcaccacacaggtatgtaactccctgttaatacataccctacatgcatgtctctctgcccctttctagtgctggccattagaacttgctgccataatggcagtgtagctacttatgtctgtggagcacatgaaatgtggctagtatgactgaggaactgaatttttaattttaataaccatgggtggttagtggctaccattttggacaaggtgtctctagactgtaagctcagtaaggacagaaaccatgtttttcttgttttggattgtatgtccaataactgcattgcctaacgcatggtgagtactgcacacatatttgttgaatggatgatagctgcaatttgttgcatgctcccttgtgtccagcacaacactacaaactcgataaaaggcatttcatatagtcctcatcacagcctctgaggctgggttagattagagagagagttttatatagagggcagacacatagtaggggttcaataaaagttattattattctaactcctccctctgaccagccccactgacttttgtctcatctttccttaggctcacagaacatttcctgcctgttgctcacactctgttgtccacagcatacccgcaccctagatggctgactcttgtcttctgtgtaggtaccctgtgttcataactggattggcagcgtcttggagcaaggccctgctttataggactgcccctgaattcagcactgaccagtgttcagtaactgcctctaagtccatcccagctgctgtctagcagtgagtgattctaggcagtcttaaaatgaatatcacttgtgtcaaccgaaaacattttacaggtagtctcctccccataagaagggaacaatcttgggcaaggaaatagagtcccatgraaggggaacaagatggagccatacagacagaggtccaccttctcttcagaccaccatgactgaagctgtatccatgagatgcaaaacatgcattcaattgagctagcgaagttcgtatgatataacggaaaaatattcttgaaatgagcttagattttccttcatgaattggcagactgagtatactaattgtctcctttccttccggtgactgcagtcaagtggcagcaaggtataaacctaacagtgaaatgtcactgaaggagagcatgggagctgggaggagagaggatctgtgacagaacctggggagtaccagtatttgagacatgggaagaggaaaaagagctccccatggacaagagggcagagaagttggaggacagccaggacgggggattcctcaacatcccagcaaggtcaacagtgctgcatgctattgagaggcccacgtcagatgaaagcagaaaagcagctgggtgctgtggctcacgcctgtaatcccagcactttgggaggctgaggcaggcagatcacctgaggtcaagagtttgagaccagcctggccaacatgatgaaactccatctctactaaaaacacaaaaaaaattagccagacgtggcggtgggcacctgtaatcccagctacttgggaggctgagataggataatcgcttgaacccaggaggcagaggttgcagtgagccgagttytagtgccattgcactctagcctaggcaacaagagctaaattccatctcaaaaaaaaaaaaaaaaaaaaaaaggcagaaaggcatcaattggatttagcaacaagagttgcattagtgactttggtgaaactagtttggagggaaatacaggtttcttaaattctacctgaatatgtgtcctgttttatgggtggagatagtagaaggatggggagggctaaggaggtaccagaaaagagcaccagagattgctccaagcagagagggccttaccagtcatgggcctgagacaatgagaggggtctgggagctgtcccatttggctagagatagtgtgcattgtattttatttatttaataagcacaytagcagtcagtgttctaaggagtttaatcaatcatttaaaaaaatcacttttttttttttttaacagtacatggaactctaggttgccaaaataccatttaacttcagggtgcattgaagaacaataataaaggcaagaaaactggaaaggatttagtaaccatttataccagttacctctccttaatttgcctttctacaaaatggtgcaagtcatatctttctcaggagttggtagagtgaacatgggggagctttgacctcatttcaagttcattttgcttacaggacatggaacaaagggtcttttttttttcatgtatgcctatagttgtgaaactgcacaacatcacaatatcttcaaggccacaggatagagataaccctctttttggtgtatgcatttaggtgtgtatgtctctcttactctcagggtattcttagcatgatgtctgtgtggcttgtatcttattctcacttggtgtgtgttgctcttattttcctgacagctctttattttccatgtgtgagcctgtgcctgtggtttatctctggaggatgtgcctgagggaggtaggtcactatctcaagttctgtcttttgatatcacacctctcttttggtctcttgctgtatctctattttcctctctttctgactgtgtgtctaattttctttttctctgtatctttctatcttttccacacattctttatttcttcttcctctccctttattttaattctgtttcttaacaagtcataatagagacctatttttgtttggattattcttaagaaattaccttgtctttctgctttaaacctttgatcggtttcaatgatacagtttgtaacagagtagtatttaataacaaaactctttaactgaaagcttcagtaacaagacattacactcacagagaatttaaaagagtagacatttcattcaaatgaggaacaatagagctgtggctttaagggcaaaggggagagcgaggcttggcagggtgaagggaatctgattgtggaaatggcagtcttggagaaattacactggcaaaatcaggggaatagggaaacatcattcatttttctgcttttgctcctagaagaaaaatgatcagacacctgaacaggggtgcaggaaaagcaaagcgatgccataagagcattgagcagaaaggaaatatggcaaaaaaaaaaaaaatgcaatcagcctatgaatgaaaagaagctgtaatgtagatgcacagaaggtagggcgattttgttggaggttgcgggaatggcagattaggatggatttgcacatgagaagcagttcagagaagcaacccaaccctgcagagaaatttctgtgattatgggaggtaggtaatagcttggttttcctgacctgcagtccaggctgaacttggacagactaggtagaaatggtgcagaaagaagcttggggtggaggcagaaataaaggtagactgaggagagctcttttaaaagcctgcaggtcctgttaagcctacctcagccatgaatcagtggacctgtgcatttctgtacagtgtgaagtttcaattgtaaggtttcctcccactgacatgaaagagcttgctcctatctggcaacccctggaggggcttgactgtcacggcagagggcagttaggactgactctttgctctgaggttgccagtggcttcttagattgcaaatcgcatgccctttcttagcccctcccctgcttgatctctaagcaaacatgagttagttagacactgttaatcacctcactcttcttgaatcactcccctcccttcacatccttcacatgcatgcttgtttagttttttttgttttttttttttttgtwttttttcccaaaattcctagtccttcctcctttcacatgcttgtttaggtttttgtttttgtttttgttttcaatactcctagcctgccttcctgccttcctgcctgcctgcctgcctgccttcccccttccctccctccctcccttctttctctttctttctttccttctttcgtttgttctttctttcattctttctctctctctctctcttccttccttccttccttcctttctttcttcctttctttttttcctgagaaaatcaattcatcaaatgttcagctacagcttactatgtgctagattctgtagcaggacctgggagtataaaagggaataagccatagccctggctttcaaggagctcaagttcaaagaaaaaccaccaagcaaggagcatgatacaatataatgagtgcagcagtaaaaaggatgcacatggtcaaaagatagtacagagggacaaatggcaaggagtgtgtttggggcaggggaggtggcacgtctgtgcctggcactgcgagttctggcaggtgacagcaaataggatagaaagatatgaatgtctaggatatgtaagaaattataatattgctaaacatgcaaagcaaggccgagacagtggtcaggaatgacgctggagattgtatgccaagctgaagaacttatactttattctgaatgcaccagatgtggggaaaaatgaattcaattttgaacatgttgagtctaaagtacctatgagatattcagatagggatgctcagttgccaggtgggtgtacaggactggagctcagccaagggtttttaataggagatagagattgttttgagtcatcagtaagtgtataatgcgtggctgatccataggaggtgagatcacacagggagaggttacatggcagcatttctcaaagtgtggtccttgggctgcctgcatcgaaggggctttctaaggatgcagactcctcaggcagaaccccaaacccactgactcaggaatctctgggggtggcacctggaaatctgcattttgaatttactccctaggggatacatttacacaaagcagttccataactacaggtgtggagagagaggctaagaggctaaaggagggaactaagaagagagagacctgatcatttaggggccgtgtccttctcccttcaccctgtttcttgatggactggacctaagctctcttctgttccctttctgcttgttctcttggcaagctgatctctagatctctgaggctggtatttgaattgacatagtctcattagctcttgtcccacatttccacctgctttccagacactgctaccaaatggaactcatctcctcccaaacctccttctggtaaacaataaccacctcctagtccttcagctccagccattgcaggtcaactgccaggacccattgtttckttgttgttgttgttgttgttttttgtgtgatagcttttcacattcttccattcctcttcctttctactgccagtacctgattgagcctatccctacctcctccttggactgctgcgctatttttttaacagatgtccctgactccagtctctccctcgtctttaattcacataactgattgttgacaacattggcttcctgcgcactgcataccattgctcagagatgttcggagtcaccatattactgcacaacaaccttcatcaccttaacctgacacctaaatcccatcatgatctgcccaaaatccccttcccaatctcatctcccactcttgcatctcgtgcatcctaagcaatagctgcacagctttgtctttgtacatgccagcctctgcccagagtgtcctgaactccacgtcttccccatcctttaagacccagttcacatgctatttccttcatgaagcctttcctattccccagcccacatccccagaggtcatttatcctttattctccccaaagcatattttaggtctgtttctgctgcattcattttttcctatctagtattagagggttttttttttgtttgtttgttttttgtttttttaatgtctcgcctttccctctatgggagcaatgaaagagggactgaccatcaggaacattaggtccatcacttttaactggatgatgataagggaaatgatttcatttctctgcacctcagttttctcatctatagagtgagataataatgtctgcctcatcagtagaaattattcatgtgaaggaaggggaagataaactatacaaggcaacaaaacaccgtagtgtcaggtatgaaggagacacttaataaatctgtactgaatccatgagaaagggtatacttctagacagctttgaaccgttctgggaatataataattaagtgatagaatgcaaggaagaatttagttttgggattacctgtttttattttagtgaaaagtttcacagatagaccttttacttccaacaacttcaaggcttaattttattttttaagcctagggttcttttttctttctttctttttattttattttttcatataatcctgaagcttttcactctatgtggaagacacacgtggttgcctgctgcctatctctggtgccttcttcctcagttgtagaactctgattttatttaggcagtactgtacctgcccaagaaagtaaattatgattggtttaagtcagttgcagcaaatcagtcatgtttccagtggtggtcatgtggcccaatgagataaaaggtaaaacttggagacttctgagaaagtgtctcctttctcataaaggtgtgttccatgggaagaggtggtccatttcctttccctcttttcagccatatcctagtaggatgggatgctttaggtgggatcaattagagtgatgtcttgcaagtaaggaagtaaactggctttggaaccactgacctccagccttattgagaggagagctgtctttatgaagacacctttagcaaggatcccattacctacagctaacagcatcttagtcatttttaggaagaatttagttttgtgatttccttatgtgttttatcacagtctgtgtatagatcttttaaaaataattcaacagcttcaaagtgtaagttaagaaaaaaacaaataatcttttgtcatagaattctgaggattttcgtttgtatgtatgagatgaatttgaatttttaaagaatttcttttggaatatggcaatatcttcagcttgcattccacttgccctaggtggtacacttcatcaactttcagaagctgctgattggttttgcttatcttttctttaggagacatatactgcctggactgcctggctgatgtgagctagtttgtctggttgagttggatgtttaaatagaaggcagaacaacaacaggtaagatttttaaaaatatcctttaatttctttgggctctattgacattattacattcattacaaacttctggatgttaagtcctgtgtttaatagccagagaggggaaggtggtgggcagctgggagagtggtgactaacaagatggcaccaccgggttcctgagtttgagggttgggtaaagccagggcaacgactgggatggccaaggagagcaagcagtagaaactcaggtccaaagggcattaggcgtgaaacctaacctgaccaccctatttcatattgcaacttgcccctctacccatgctgtcctctactgcaccccattttcccttacctggtgttcttaaccttttttctttttcctgtggatttcttctgcagtctggtgaagcctgggattgccctctcagaataatgtttttaaatgtattgaataaaaacacataagactacaaaagaagctaattatattgagatacagttactaaatgtgtatttctttattgatacaattttgagaaacagttactaaatgtgtgtttctttattgatacattaaataacaagatttaaccacaggtccaatagctacaaaatagtgatgaatgtaaacaacagttcaagaaatctgcaacaattgtcaatctgatacaaaatgtctgtgatttcaattggtaacaaagttataggtattgctgtggcttctgaggttgttagcctacagtcaggtttgaaggtttaagattaatgaaaataaacgtgccatttttccccctatccaagttcacagatcccctgaattctatccatgaagatgctatgagtctggaactccaggataagaatccctgctcttatcttattctgctatatctgcatagtatttattctcttctaacatcatttattatttacttatttttaaagttcatttttatggtctgattctttctattagaatgtaagtttcacaaagtcattgtctgttttgttcactgatacatttcaagtgtctagaacagtgccttgtacttacttgtggctcaataaatacttgttacatgagtaagtccagaatgcaccagcatctgagtctagacagaggagccaggcccatggtccttctgaatgtggggcaccatgcagctgcacccatcaaactgcccaccagccaattctcttgtactttggagggagccagactgctatgtggaggtggacttggagacactgagttctgcccatggcaccattgggattggatgtgtggaggagaagaggaaaggcttagggctgggaatgaaaaatgcacatggcacatggaatggccgtgccctagggttggcctgccccagactggggccaggtgttagacaacagttaatacaaaatatgtttagacaaatagatcgggcctggactggggagggcctttagtgcccagcagaagtatttacatctatttccaaaagcaatagagaagcactgaatatttttgagcaggagtccaagttggtagaatgaaagaagggctggaaataagggctataagattttgagtktaagtgcccaccttataaatcattagcaaaagcagaatataaccytttctccaattctgtatgggtgacacccaccagtctggtaaatggaggtcgttagtgtgatggggtgtcattctcactttgtttagcacccccactagatatacatattcactttttgccttttttataataatttgagaagttatagaaaatgcttatacatttaatatgtttaatctctctctctctctctctctctctctctttctttctccctttctccacagggtcttgctctgttgcccaggctggagtgcacttgcagtagcataatcacaattcactgcagcctcaacctcccaggctcaatcattcttcctgcctcagcccccaaagtagctgggactacaggcatgcaccaccatggctggctaagttttaaaacttttttgtagagacatggtctctctgtgttgcccaggctggtctaggactcctgggctcaagcaatcctcccacctcagcctcccaaagtgctgagattacaggtgcaaactatctcacccagcctttaatctttttattagtgagatatctgacccaacggctaggatctgatggtctttttagtatggcctcaaatcactgtatcctgtaagcatttttttttttttttgagctggagtctctgttgcccaggctggagtgcaatggcacaatctcagctcactgcaacttctgcctcctggattcaagtgattctcctgcctcagcctcccgagtagctgggatcacaggtgcctgccaccacacccggctaatttttgcatttttactagggatgcggttttgccatgttggccaggctggtcttaaactcctgacctcaagtgatctcccctcctcggcctcccaaagtgctgggattacaggcgtgagccaccgcacccggcctaaacatattttcttctagagtgtttttaggtctgcacacggagtcctaggtcaatgccaacaccaactcacactgagccctaactatggaatcggagcaacatcattatttaggcccatggacaaaataccaaagtaatctgtttctatgttccattatttcctcctctccatacattatacatacaacaatttccctttatcacacgtacctgtgactacgtgggaatcattctatcccaaattgctgcagcacaatctgaggcttactaaatatttgcctcagccataaagctgatagagcattagtttaaaatgcaagtagggaccatgaggatcttttgggtttcatgttgaaacattcaagctgctcttcctactacggctattactactaaatgcattatatgatttttgaaaactagaacaatccaagtctggctaattttttaaaattcccatttctttcactttcccaactgttgtctattcaccctttattctacctttaaagcaagaaaaactgaaataattatttggaaagttttttcacttctgtcaaaacaacaaaacctatatcgtttgagtgattagtcaaggacagttgacaaaaggacagtagtcaaaaagaaaaatggctccctaaactcttagagaaaagaaatcaagcttgcattgtgatcaaactaaatgaatgtacatagtaataagcaaaaattcaaatggcagaccatgtttttcttgcacctatgaattcattctgatggataagatagatggcttaggactccatattacatttgtatgaattaatagatattaggggaatgtgtaataagtgactgcatgattgactgatacaggttttggatttttacttttatttttctgagacagggtctcactgtgtcacccaggctggagtgcagtggtgcaatcttggttcactgcaacctctgcctcccaggcttaagcaatcctgccacctcagcctcctgagtagctgggactacaggcacccaccaccacacccagctaatttttgtatgtttttgtagagatggagtttcaccatgttgtccatgctggtctcgaactcttgagcccaagccatcctcctgccttggcctcccaaagtgctgggattacaggcatgaaccactgtgcctgggcttaggttttggatcttatatctgattatccacaaaaaagaacccagaaacactaatatagtggaagccattgcctcagttaggtaacactagttgtggtgacagataaatgctaacggtagcctaacacaatgaaagtttatttctcgttctgacaacagtcagcataggggtttagtgagtggccttccacatagtaattcagggacttaggcgtcccctacctgtgagtgggagcctcggaggccttcacttccagctggcagatagaaggagagaatggaggatacccccacgggagatttttacgggccaggcctaggtgtggagtgctggttccctttgcactctatgggccacaactcagtgacatggctacctctaaccaaaggcaggctgggaaatgatcacatatgatgcagctactaaaaataatgtctgagttatacccattggccaaggggaagtgtccgtgatatattcgtgagaggattaagtttcagagtatgttgtattgtgtaatatttataaaaagaaatgtgaaaatccctaactatagtgcatgtctttgtataatcctagtgaaaggtgcaggcggctgtataacccaggccccgcacatctattaccacggatttgggtatggaggcagtggcagagacatgaaattattaactttttctttacatatctttggaatgttttgttttttttttttttttcatttcttgcagtgatctcatacttactttggaattaaatttttaggtataattttaaagtatgggtggtagtttttgtgaaatttagaaaaaagaagtgaagaagaatgtgtttgtgcatctccacactgttatatttttttcctgtgggaagatatttttcgaagtggagcagagcttgtgtgtgttccagggtatgctatatcccatagaaagcacacctcaagactgattccatgtttagcaagttatctccacattaaaactttaatttatcagtttcgtgcatatcatatcatgcacataagtgccctgaacctgaatattcctgtcctaaaaggatatacttctcattctaaatcaatatattgatattctgatttgggaaagataaagccagtctggggttttataggaatagatcagctcatcagatcctgataactcttgagtaaactggtaaaatagagttaccaaaaccacaaggctaagacctggactcctggctttacagagattcatccaatatccaccccttccaaggagagccagccagcttcacccatggtcggcttggtggtttgtttactggcctgcattatcacctacctacttgtctttattctctctgcaggtcccagaggtttgtcttttatgtcaaatttttctgtagaacttcacccagcatctagatacagtttattgacaatgaaaacaaaacaaacagacatagaacacagtgatgggaatacaggtggttattcttgagggactgcatgaagcacagttggacaaatagccagtcctctttatctgcagggatgagggcagggacagaaatcagactccctgtctgcttttactcataggagactgagtttgcttttcaytgggtcctagacttccaagtcaaccctactacatccaagtcatcaaaggatgaatgagggaggagagaagggtatactttcatccctgtcctccaaaagagatatcctggaaaatgcacttttaaagtcataastatcatttgaggcccaggtaagagaacatcaataggaaacaaagcaagatggtaaaggaaaagaagagcaataagaatgcttggtgcgaagtagggtcatgtggctgtttgtctgcagcctgcctgattcatggctaactagacaaaatgttcagaccaggtcaccagtttttagatatgtaattgaatggttatctactatgggaatggtataaactaaaaatattataaaacatctctctagaaatcctgtgtcattaatacaatttaaaaagtactaactgggccaggtgcagtgggtcacacctgtaatcccagcactttggggaaggctgtggcgggcagagcacttgaggtcaggagttcaagaccagcctggccaacatagtgaaaccttgtctctactaaaagtacaaaaaaatttagctggacatggtggcgcactcttgtagtcccagctactcaagaggccaagccaggagaatcacttgaagctgggaggtggaggttgcagtgagccaagatccaccactgcactccagcctggatgacagagcgagaatccattaaaaaaaaaaagtatttattgaacacctactctgtgccaaacaccgttttactgagtggcaaacaacagtgaacacctttgtagtgaaaggcaagacagagacccagaaaaaacaaacaagggagtgtagtttgtgatactggggccaaatgaaagactcttgttataaatttgatggacttttaggggatgggaagatcacaatctgctgaaagagtcaaagaaagcttacatgttgagccaggcatttagggatggatttgatttacaaaagcagagaggaaaaggaaacatatttcatatgagattgaatagcataataatgaaaacatttacaaagtgctttacagtttgcagagcattttcgcattcatgattcagagtgaaaataagccaagcttttcagagccaagtgttgagaccaatctgacttagtagaaagtaatcattccttcttacctctctctcctgtcttccctttcctgatcagggttcacggtttcatattgacttcttaatccaaagcccttttataggggatttcttctacaaagaagtggcaaagagaatgagaaggctgcatttcttaaagaaaatgcatcttaatgcttgtatgggtgtgtgtatggtgcacgtgcatgtatatgtgtttgctaacagttggcacaagacactttcttttttttttttggtctgtttatttgagatggagtttcactctgctgcccaggctggagtgcagtggcatgatctcggctcgctgcaacctctgcctcccgggtttaagcaattctcctacctcagctcccaagtagctaggattacaggcatgcaccaccatgctggctaatttttgtattttcagtagagatgaggtttcaccatgttggccaggctggtctcaaactcctgacctcaagcaatccatctaccttggcctcccaaagtgctggtattacaggcatcagccaccacacccagccaacactttctatatgggatgaacaagacattttgtgctttataatcccagtgtagatatcttctggactttgaagaacttcccttttctagccaatcttctgtcttctccctttcttttttttttttattatactttaagttttaaggtacatgtgcacattgtgcaggttagttacatatgtatacatgtgccatgctgatgcactgcacccactaactcgtcatctagcattaggtatgtctcccaatgctatccctcccccctccccccaccccacaacagtccccagagtgtgatattccccttcctgtgtccatgtgatctcattgttcaattcccacctatgagtgagaatatgcggtgtttggttttttgttcttgtgatagtttactgagaatgatgttttccagtttcatccatgtccctacaaaggacatgaactcatcattttttatggctgcatagtattccatggtgtatatgtgccacattttcttaatccagtctatcattgttggacatttgtgttggttccaagtctttgctattgtgaataatgccgcaataaacatacgtgtgcatgtgtctttatagcagcatgatttatagtcctttgggtatatacccagtaatgggatggctgggtcaaatggtatttccagttctagatccctgaggaatcgccacactgacttccacaatggttgaactagtttacagtcccaccaacagtgtaaaagtgttcctatttctccacatcctctccagcacctgttgtttcctgactttttaatgattgccattctaactggtgtgagatggtatctcattgtggttttgatttgcatttctctgatggccagtgatgatgagcattttttcatgtgttttttggctgcataaatgtctccttttgagaagtgtctgttcatgtccttcgcccactttttgatggggttgtttgtttttttcttgtaaatttgtttgagttcattgtagattctggatattagccctttgtcagatgagtaggttgcgaaaattttctcccattttgtaggttgcctgttcactctgatggtagtttcttttgctgtgcagaagctctttagtttaattagatcccatttgtcaattttgtcttttgttgccattgcttttggtgttttagacatgaagtccttgcccatgcctatgtcctgaatggtaatgcctaggttttcttctagggtttttatggttttaggtctaacgtttaagtctttaatccatcttgaattgatttttgtataaggtgtaaggaagggatccagtttcagctttccctttcttaactcaaagtagacctgttcctcctcactgtttcaccaccccgcctccctttcacacctctcctggttctgtccactcctctgcctacgtaaccaggccctactaccacccttctgttttcaggccaagccctacctccttcacaagctcttctccagttacaaatgcaactgattatcatttgcacccctcttcatctctgcagtagttcttaatttcgtggggggcatattatatacccttaagaatgtgatgaatgccttggaccctggacacatatacacaaaaaatatgtgtctaatctcaggggatcatgttcccctgaaaacattgcttttctagatcacatttgtttagaacaaaccatatacttcactgccttaaaatatacttttatatcattttgcctaatatatatcttcataattagactaaccttgaggagaaagctgttgtagaattttttggtatcctcatagaacttggttaaatgtagagcacatagcggtatttaatggaaaaggaatgaataaaccaactagggttcatctatgcaatggcatagcattcagtgataaaaataagctatcaagccacagaaagacatggaggggccttaaatgcatactgcactgtgaaacaagccaatccaaaaaggctgcatactgtgtgattccaactatgatattctggcataggcaagactatggagacatgaagaagacagtggtttcccaggatctgggggagacagaggggatgaacacgtggagcacagatgattttcaggccagtgaaactatcctgtctggtactgcaatggtggatgcatgtcattaaacatttgtcaaaactcataaaatgtacaacacaaagagtgaaccttgatgtaaactatggtcttgagttaatgataacatatcaatattggctcattgattgtcataaatgtaccacattaatgtaagatgttaatgatagaggaaactggaaggagggccaggtttatatggaaatgctgttttctgctcatttttctaaaaatgtaaaacagctcttaaaaaataaagtctattaatctaaaaaaagaagagaagtttccgattttggctgcagcctctaatgaccattgggataaagaagaggcaatgccttaatacaatgcatgtattttaactttttgaaaattgtatccgtcattgttaagctcagttaaacttgcgcttgacatgtcgacacaatgtccatttttaaatgaactaacagaattggtaagatatgctctcatgatagagactcagccaattctaatgtcaatgaaaggctccacatttaatgtacacgtttcaacatgaagaaaatccattaaaatataattagcgagttttacacataaatagaaagaaggcctacctagaccttgctgccatttaaaagagttctttcttctttgtctgtttttgtatttttcacagaagctttgaggaagagccataactacctggagcagaatgattatttggagccacagaaaatcattttagggagcagtgggtccaggttcagtgttgtgtgttcaactcggaaagaacacagttgggtggctgaccgggttacttctcccctgtggctctgcttgcattggtcattgaggtcaggcaggggtttggccacagtgttagccattggccctgcattgatcctcacatagtaacatcttgtttggttattaaagtgactgaattgttggaatgaagcattgcaaagtcttgttattccatccatcttcacaaagactataaactaacttcaccatgtagtgactcagctggttggctagaaagtaccttgtaagatggcctattctgccaacatttcctatcccaaacaaatctcccaactctcaccaactctttacattcctgtgtagtctttagggtgaggggctgggagtgggatggaggaaaaggtagacgaatgaagtaaagggtcagtgcacaggcagtaagtactgctgaccactgtaatgtccactcacagctgagatacagtgttcaaacttccctcaaaaaagccacactgccctcagagtgactccttggaccccagccatggatctggccacagcattcatttgattccatgcattacctccttgaataattataaaaattatgttttccaaatagaacaaagagatgcttcctgaaattcttctccttggaacactcatgatatgcattcaaagtgcttagcctgggggtcgccattgtgtacacacaataaatcttagtgtatcaagaattcaggcagtcatgaagctcaaatgacaagaatttttatttttattttttttaacagacagaagtcagggagggcagtcattgcttagacaatgagattcaagcaagtgctgttctaaatctctgagctctgtaggggagaagatggatgaagcaggcagcttgaagagggagacacgccagccagaaggaaaagaaagaagccggtgaagcaggaagagaagaaaacacgaaagggtaggaagatgagaaatggatgccaaggagagggagaaagagattgtcagcaagggaggcgaaccgaggagaaaacagggagattcccgcatgggtggagccaagtttccactgtgctgtgagcagaggaagccaggtgtattgttcctgaaactacgttattaactgcctaacatatggctcacaaggtacacgtggaagcgagagcaggaaacaaaatgcaagtcagctgggctaacgctgaaaaatagtgatctgtgtcagttttgagaagtgtgagaatagaaaccttctatgcaggagatcagcatctttgtctgtttcctacaccgaggctcaaagagaacatttgctcccaaaccatggtagttctgtttcagataaagttgtctcataccaaccataattcatgttcctgatcgtgaccctgaagcacaagaacccaaggaagcttcggaattttcaaagaaaaatgaattacgtagagtggtgtgaccagcaaatgcagtttgaattttaagtgtgtattctaattttttagaagattctgattccgtgtgtgaaagattgaattaccctccattttctaggatgtggcccatttgccagccagtctggacctcagatcttagttctggttctgtaacttcagttgcctgccagacatttccatctgggagccctgtcctcactctgaaacattctcagaaccagcctccttctccacctgccgtcagacattagcaccattcctctcccattgtcacctttgattgtctcttctttacttccatacactgcttttttttttttttttttccgacagtctcactctgccacccagagtatagtggtgcaatccctggtcactgcagcttccacttcctgggctcaagcagtcctctcaccttagcctcccgagaagctgacaccacaggtgcacgccatcaagcccagctaattttttttttttttgagacagtctcactttgttgcccaggctggagtgtartggcacaatctcggctcactgcaaactctgcttcccgggttcaagcaattctcctgcctcagcctcccccaagtagctgggactataggcgcacgctgccatgctggctaattttttgtattctagtagagatggggtttcagcgtgttgcccaggttggtcttgaacttctgagctcaggcaatctgcctgcctcggcctcccaagtgctaggactacaccatgcctggcctaatttttaaatttttttgtagagatgggtttttgtcatgttgctcaggctagtcttgaacttctgagctcaaaagatacacccccctttggcttcccaaagtgctggaattacaggcatgagccaccacgcccagcccaatatgctgccaaatttttcttcaaatgatttcctagttccttccttgccattcttgctgccctgaattaagcccaggtcctcatttattggcttcccacttgactccttctattttagccagcacacatgttgtagaacaacttccttaatgtggctttcacttggcttctgactcagagtgtatgaggtctcctaatttcctagggcagtaggcctggccctaccccacaagcctcattaccgttttatctgcccatatcccatcaccctctatccacatcttgttatccagtggagagtttccacttctagkttccaagccagaaatgtgtggatcattctgtcttccctcacttccttaaacaacccgtcggcaagtcccacagactggatctccagagtttccctgtagctcttttctccatgctcaccaccctagtttagggcaatgccaccctttattgagactctggaagaacctcctgacagttcctgctcccctctggcccckycaatccattttctacacagtggcccagaatgtttaaaaatgcaaatcaggttgtatcatgcctccagtggcttctcattgcacctagggtaaaatccaagatccttatagtagcttccaaggtcctgcatggcttatcctctccctccctcctcgaagacctcaatgcacctgactgaactgatctcagcacgtttccacctctggccaggctctctacctaatgaccctcctccctgctttttgatccattccacctctcatctcctaggtcttggcttaaatatcttcagagaagcccttctggacttccttcagtagtgtcattcccacttcccgccactattcttattacctgtttatttccttcatacctttttatcatttgcaatgattgtgtttgtttcctcatcttttttctgcctcccccagacctgaagctccgaaagaccccggagtgtttgtcttgttaaccatcgtttctccagctgtccacgcaatggtcaatatgttagctattataattactattttaatattactgtttcttgatgatttcagactctttggatagaatattctcccttctatctgagagtgtttgtgaccttctcatatttcctcatgtcctctggaatcctgacctaaatttttagtcttttcctatcagttatcaattgcttacttgttgttttcatgtttaaaaactcattcaactccatccaaactttcttcttcttcttacaaaatagtttatagctaactatatttccttactctcatttgttccttccctgtattcagtgtctccccatcaatatcttttattactccagaataatttcagaaacagtttgagacagttttaaaaataatgccgctggcattttactagggatgacattaaccttatcagttagtttgagggaaatcagtatctttgcaatatcaaaactcttcctaatcaaggacagaccacatttttccatttatgtgtttttaaataaaataatgttttctttgtattggctttttaacattattgttaaattccccttcaacatttaactgtttcactacaatatgtctaaatctaggtctgttttttattaatttgggctaacatatgatgagctttgatctacaaatgcaggtcttgcttcaacttaaaaatattttcttttctaatatctttaaatagctcttctgttctttttttctctctccttyaaaactagatttctatcacctgtctttctatgtctagaccttgtttctgatagttttgatctctttgtcctttttttttcttttttgtgaggcaggttcttgctctgtcacccaggctggtgtgcagtggcacaactcagctcactgcaacctctgcctcccaggctcaaacaatccttctacctcagcctcccaagtagctgggaccacaggcacttgctaccatgcccagctaatctttgtccttttcttttgcattacagaatacagtcctatgcttagctttcttttcactgattgaattatcttccattgccagttgtaaccactgtggttgctaagtttatttacaattcttccatgtcattattattattatttgatacagagtctccttttgtcacccaggctagagtgcagtggcctgatatctgctctctgcaacctctgcctcccaggttcaagcgattcttctgcctcagcctcccaagtaggtgggactacagatgcacgccactgtgtctggctaatttttgtatttttagtagaratggggttttaccacattggccaggttggtctcaaactcctgacctcagatgatccacccaccttggcctcccaaagtgctgggattacaggtgtgagccaccargtccagtcacattattttcttaactgtgtcaactctctcatatcactttgttggcttatctcattcttaccttttatttcatggagtctgagatttttatctgtccctccatcaaatgtagtttaaatattgttttaagtgttgttcaaatgtatttccattttctacagtaacattttttctttaaaatattcaattttaacacttcttgagtgctaygtgtatccattttctcgttacagaatagttgcataggttacacgtgatatagtttggctgcatccctaaccaaatctcatcttgaactgtagctcccataatccctacatgttgttggagggacccagtgggaggtcattgaatcatgggggtgtgttttttccattctgttctcgtgatagtgaataagtctctagagatctgatggttttataaaggccagttcccggctgttcgcagtggctcatgcctgtaattccagcactttgggaggctgaagtgggtagattacctgaggttaggagttcaagaccaacctggccaacatggtgaagccccatgtctgctgaaaatacaaaaattagctgggtgtggtggcgtgtgcctgtaatcacagctactccagaggctgaggcaggagaatcacttgaacctaggaggtggagttgcagtgagctgagatcactccactgcactccagtctgggtgacagagtgagacttggtctcaaaagaaaagaagaagaagaagaggaagaggaagaagaaagaagaaagaagaaggtggtggcagttcccctgcacatgctctcttgcctgctgccatgtaagatgtgctcctcctttgccctctgccatgattgtgatgcctccccagccatgtggaactgtgagtccaataaacctctttttctttacaaattacccagtctctggtatttcttcatagcagtatgaaaatgaactaaacagtaaattggtactggtaaagtggggtactgctgtaaatatacctgaaaatgtggaagtgactttggaactgggtaacagacagaggttggaacagtttggaaggctcagacgaagacaggaaaatatgagaaagtttggaacttcctagagacttgttgaatggctttgactaaaatgctgatagtgatatggacaataaagtacaggctgaggtggtctcagacggagatgaggaacttgttgggaactggagcaaaggtgactcttgttatgctttggcaaatagactggcagcattttgcccctgccctagagatctgtggaactttgaacttgagagagacgatttagggtatgtggtggaagaaatttctaagcagaaaagtattcaagaggaagcagagcatgaaagtttggaaaattttcagcctgatgatgcaatagaaaagaaaaacccattttctggagagaaattcaagcctgctgcagaaatttgcataagtaaggagcccaaygttagtcaccaagacaatggggaaaatgtctccagggtatgtcagagacctttgcagcagcccctcccctcacaggcccagaggtctagggggaaaaaatggtttcctgggccaggcccaggcccccactgtgtgcagcctaggaacttggtgctgtgagtcccagccactccagctgtggctaaaaggggccaaggtaccactwggacttgtggcttcagagggtgcaagtcccaaatcttagcagcttttacatggtttgagcctgcaggtgcaaaaaagtcaagaattgaggttggggaacctccacttagatttcagaggatgaatggaaatgtctggatgtccaggtggaagtttgctgcaggagcagagctctcatggagaacctctgctagggcagtgcagaaaagaaatgtgggtttggaacccccacatggagtcccctctagggcactgcctagtggagctgtgagaagaaggccaccatcctccagaccccagaatggtagatccactgacagcctgcaccatacaccaggaaaagctgcagacactcaactgggaaagcagccagaaggggggctatacccagcaaagccacagaggcagagctgcccagggctgtgggagcccaagcttgtgtcagcatgccctggatgtgagacatggagtaaaaggagatcattttgtaactttaaggtttaatgattgccctattggatttcagacttggatggggcctgtagctcctttgttttatggccaatttctcccatttgaaatggatgtatttacccaatgcctgtatccccattgtatctaggaaataactaacttgcctttgattttacaggctcataggcagaagagatttgccttgtctcagatgaaacttaggacttggacttttgggttaatgctggaataagttaagactttgtgggactgttgggaaggcatgattgtgttttaaaatgtgaggaaatgagatgtgggaggggccaggggcagaattatatggtttggctgtgtccccacccaaatctcatcttgaattgtagctcctgtgtgtcatgggagggacacagtgggaggtaattgaaacatgggggtgggtttttcctgtgctattttcatgatagtaagtctcatgagatatgatggttctataaacggcagttcccctacatatactcacttgcctgccaccatgtaagacatgcctttgctcctcctttgctttccaccataattgtgaggcctcccasccatgtgaaactgtgagtccattaaacctctttttctttataagttactcagtcttggtatttcttcatagcagtatgaaaatggactaatacaacatgtttgtttttccctcttaatatattttggaatgaggaaagatctctcttgactatgcattcccccaaaagtaatgtgaatggatttcacagcttacctgaagtcaattagaataatccttttccatcttgaattggaggatggaatgagataagttcagtgatccatcaggcagatgggtgtagcagggatcctggtggtgctgggggtgtcctaacagcaatcctgatcacagccatcagtggcgctagccaggtgccaggcctgatttggaacattgcatgtgtgtttccttgtttaatcctcacaatcactctatgaggtatatatattatcatcattcccactacatagatgaggaaactgagggctcagttaagaaagttatccaagctaataattagcagaataagcattcaaacccagactatctgactccagaattcatggtcttaacttttatgttatattgcctcacttgctcctgggcctggggctccagtgccacagcccccaaggtaggagtgcttcctgttcctcagtgggctcaacctgagggttcagtgggatggaccttccactttcatcccatgacacacaactctttgaagtgagttgaattgtgagtcttccttctagttcctccttgtcttaatatctagaatgaaagtctagaacacatccctagattttctttctctctctttccttccttctttccttccctccctccctccctcccttctttttctctttctttctttctttctttctttctttctttctttctttctttctttcttctctctctctctctctctttctttctttctttctttctttcttgtctttctttctttcttcttttttttttttgaaacagcctgctgcccaggctggagtgcagtggctcgatctcagctcactgcaacctctgcctctgggttcaagcaattctcctgcttcagcctcccgagtagctgggactacaggtgtgcrccaccatgcttagcaaatttttgctttttttttttttttttttgagatggagtctcgctctttcacccaggccagactgcagtggcgctctcttggctcactgcaagctccgcctcctgggttcacaccattctcctgcctcagcctcccaagtagctgggactacaggcgcccgccaccacgcctggctaatttttttttgtatttttagtagagacggggtttcaccatgttgaccagactggtcttgaactcctgacctcaagtgatccacctgcctcagcctcccaaaatgctgggattacaggcatgagccactgtgcctggcctatgttattttattttattttattttattttattttattttagagacagggtctcactctgtcactcagtctggagtgcagtggcacaatcttggctcactgcaatctccacttcctggattcaagtgattctcatgcctcagcctctcgagtaactgggattacaggcgcgctctaccatacccagctaatttttgtatttttagtagagacagggttttgccatgttgcccaggctggtcttgaactcctgacctcaagtgacccagccgtcttggcctcccaaagtgctgggattgcaggcatgagccaccgtgcctggcctgtttttattttggtatttttaggagtttctaggagctggggattgaacacctatgctctgttcccctttttccaggtctctccctctgccctgtctccctctctgtctcctgcttcctgaaacactcttctgccttgcctgccattctgcttcattatctccagggtctctggctgtgccctccccatcctccctctcatctgtctgcaccttgattcccccttggctccattctcagttgttcttttctgtctccgccctccttggtgacctcacacactctaaagctttcaccgccatccacactggtgtgtggtccctggcctcagcccagatgtctcccaaacttcctttgaacagtgattrtctgccgaatgcttctacctagggggttcacaaactggacagcacacactcccatatggaacactgcactggtcaccttttctcattgaatgtgccttccacttgctggggagtcatcctggattcctgcctctggtctggccactctgcagtccaactgccctccctgctgtgggcagatgatctctcccttcctcgagtcctccaaagcctccagcgccagctcttccatgtggtctcagaggtcatcagggatttgatcacttttcacctcattgaactttgctctttgctggattctgtttcctgctctgccacccaggctggagtgcagtggcacgatcatagctcactgtatccttgaattcctgggctcaagtgatcctccagcctcagcctcctccagcctcagcctcctgagcagctgtgattacagaggtgtcccaccacacctagttaattttttttttttttagatggagtctcgctctgtcaccaggctggagtgtagtggcgcaatctcggctcactgcaacctccgcctcccgggttcaagtgattctcctgcctcagcctcccaagtagctgggactacaggtgcccaccatcatgccckgctaattttttgtatttttagtagagacagggtttcaccatgttggccaggatggtctcgatctcttgacttcgtgatccacccacctcagcctcccaaagtgctgggattacaggcgtgagccaccgcgctcagccaatttttttcttttttttaaagacagggtcttgttgtgttgcccaggctggtctcaaactcttggcctcaagcgatcctcgtgcctaaacctcccatgtattttcccagctttctgcacagcttggagttccctgtgtttattttccatggccttgcccctgtctgctggtaaatggccttctggggaggggaataatctctgctctttagcatttgctgacatctgtggtgtaaatattcccatcaccgccaatctcaaactactaacatgacttcattgaatgtggagttgggtagagatgttcaatagccaccattagacagtatttccaccttacagatacaatagacctaaaacaaaccctcagccaggtgtggtagcttatacctgtaatcccagtattttgggaggctgaggcaggtggattgcttgagcccaggagattgagaccagcctaggcaacatggcaaaatcccatctctacaaaaaaaaaaaatgcaaaaattagccagatgtggtggtgcatgcctgtagtcccagatacttgggaggctgaggtaggagaatcacttgagcctgggaggcagagattgtggtgagctgagatcacaccactgccctccagcttgggtgacagagtgagaccctgtctcaaaaaaacaaaaacaaaaccctcaagggcatagataatagtaaatagtagtaaaataattagggagtgatatatttttagcatttattatctttagtattttgtattttagtatttataacctttatttttaatataatttatttaattgtaaacttacataatttaattattaataatgaccacatgtaacagcttgctggcaaaattcctgaacacttagcgagcagccctcctgagctggtttgagctagctccagcgtgctcctggctccccttcctagagatccctcatctccaccgacatctggtcaatacttatccttcccttaagtcagctctgctcacagtgggagtgtgtccctctgccactccatcactgctctccccacattgcaatgatctatttacacacctgtctcacctcctattccatgaacttcttgagggcagaggctgtgtctcatttatctttgtaatcccagtatagtgcctggaacatagtacacatttggtgaattatgatttaaagaattgatggtgccttttctgttagcactattcttttctcatctatctctatttctaatcactttgggaaatgctcttggctgcatgatgaaacagagtgccaggtcttcataaaaaaaaaaaaaaaaaagcttgttgattgggtaaactcaccaagctgactagagcagttttaagtataaattgtttactcatatactgcctgtggctatagaatgcaaattaatcactttggcaaagtgttgtattagagttctccagagagacaggaccaataggagataggtagatagatagatagatagatagatagaaccaataggagatagatgatagatagatagatagatagatagatagatdatagatagatagatagatagatagatagatagatagaaccaataggaaatagataggtagatagatagacacaaccaataggagattagatagatagatagatagatagatagatagatagatagatagacagacagaaccaacaggagatagatacataggtaaatagatgataggtagatagagatagagagttatagatatatgagaagggatttatttggggaattggctcacaaactatggaggctgagaagtcccatgataggttatctacaagctggagactcagtgatgctgacagcatggctcagtccccgtctaaaggcctcggaacctcagaaccaggggagctcatgctgtaactctcagtccgaggctgaaggcttgagaacttgagggggtctgctggtacaagttccagagtccaaaggccagagatcttggaattctgatgtccaagagcaggagaaaaagggtgtcccagctccgagagtgagtgtggattcacctgcctttttgttctatccaggtccaaagctgaatgggtggtgcccgtccatgttgagggtgaatcttctccactcagtccaccaactcacatgccagtctcttctgaaaacaccctcacagacacacccagaaagaatgcttcaccagctatctaggcatccsttgagccaatcaaggtgacacctaaaattaaccatcatagtgataatttaaggcattaaggacatcatttcatgtcctgcagctctttaagcccaggcttggtcattttcaataagtggaaattaacttttttttttttttgagacagggtctcgctctgtcacccaggctggagtacagtggtgtgatctcggctcactgcaacctctgtttcacgggctcaatcaattctccaacctcagcctcccaaatagctaggattacaggcatgagccaccaatgcctgactttttttttctttttggtagagatggggttttgccatgttgcccaggctggtctcaaacttgtgagctcaaaacaatcctcccactttggccttccaaaagggattacagaggtgagccactgtgcccggcctggaaattaccattctaagtcatctttgtgactgctgtgactgccaggaaatcagagtagtccaccaggaagagttatctcttgggctgaacagaacagtggttgagtgtctctggtgtgacaggtgctatattcgccatggggatagatgaatggaaaggaatttgtaaaggtattgacaatgttttttgagtttttaaacaggatgcttgtcattttaatgacacagactctaatttctaagcatttttagagggatgcatatttttgtatactattaactgcatagtcttctttcttagaatgcctaatttaccagacattgacagaactttagctcaagcctcactaagaagacgtagcagtgcacgctctgggattattttatacttcactaggatgacttatttatagaacagaatctttttgctttcctacaagattcaacagttctattaagcaacagcaaaagaaacagctacttctccagagcagacttcaatcttaagcaagatttatatttcaaaaataaatatttaaaagcaaatcataacagagctaaaaccaacaataccacatatacccaaactatgccagtgagtctgggtccatatcttgtaggaattatatgtttctgaaaacctagagagattttattctctccctaaagaaaagtttaaggtcttattctatccatacacacacacatcagactgaaaagcaaaatcagaagactgagttcacctgaatttaattcaaattcgaggaagtagcatttgaaatagcttattttttgactggattcaacctgaagtatattgtgatttctcaatatctccttccacagggaaacattatttcttgcctatgatgggtacaaatctatatatactctgcacatacagtcactctttgtcacacttgataatgggtcacatttgtggtgaacagatgtttcctgagagtctgagactcatgagcaaagccgtggtgtgggtaagagggatgagctgttctcactggatgcttcaaaaggggctgtgcttacaattagtctgaaagccaaattatccttattgaagaaggacaaaatggcatgggcaagctcttatctcctgtcttaggacagatgctgcttatgaaaattgtctgtacctgtctttgatgattctggactagaaatggttccctggcatgactgggtgtcttagaaaggacactgtggagttaacttctggaaggaaagtctaacatgatctgcaggctcaataacagataaagggaaaaaagaagggaaagaagacaaaaggaaaggagtttttcactctgacaagaaccacatgagtgactaaccctaaagatggaaatagaaaatgacctttggtgagggatattttctgaacattcaaagctggatttgactgctttataacatttcaaatggcatggaatgtactctgttgtgaatgagaaatgccccctttaaaatgagcaaagccttaagttagtctacatgacagtgactctggccaggtagaatatttcaaccctgcacttcctggcctgtaccctttcgagcaattgcatttcataaatttcaggagcatgcctgaagcagatggttgagacatgggaaggatcataaatccgggcctcaatgtcttccagctcccaaattcaaggctctgaaatgctggccttggcacaacttggcatccatgccatggaacagtcttccacaggtggtagttcagtatcttatgtttagttcttattgccgtccttgaaaagcagcagtatataggaatggtaaaagacctctctttttcttgtgtgccataaaaatagctagatagaaactctttccagagcaaagaaaagtaggttgaaatgttctacactttgtggttgaggctgaattccgactgagcaaatacacacaaatgaggggagacaatatcaaccccacaatgttggggtgaactcctcggtgacagatgaagaaacaaacactctcagtgcagttatcctcatatcagatgctttaccctgaaccaaacgtttttccagaaatttttttctctgttaccaaagtaatacacattcattctagatttttggaagttcagacaaacataaggaagaaaatctcctttgcttttcctgtacatgtacacgtggaaaaacgtcctttgccttgggtcgtgttttgtggattatgcctaattaaagacagtactcttcttagagaccagtatcaaaatgagttgaggggacttgcaagaaggaatgaatggaatgtattcatttctccacattcctatccccagtttttggggaaaggtggtgagcccctgtgtcttgcattgataacacgagaagtacctgagagtttcctgcgagaaatgagcagtcactgtacctcatctaaagtgctttgaagccaagcacggtgactcacgcctgtaatcccagcactttgggaggctgaggcaggtgtatcacttgaggtcaggagttcaaggccagcctggccatcatggcaaaacccggtctctactaaaaatacaaaaattagccaggtgtggtggtgggtgcctgtaatcccagctactcaggagactgaggcaggagaatcgcttgaaccggggtggcggaggttgcagtgagccaagaccatgccactgcactccagcctggacaacagagcaaaactcggtctcaaataaataaaataaaataaataaaataaaataaaataaaataaaataaaataaaatagtgctttgaatgcttgagaagaacctggtgggtcactcagttcatcctctgaggaggcgctcattcctgtttgaggataagagtggagaagaacattttggggaagccctggacctttcgtattcggcctttcagagaccttccagtactgggtcactgatgtcccttcaggatgtgagtaacctccactgactactgcagacctctgatcacttcctttagtgtaactcgctctgcacagccacaaaagatgggctgctgcctggctgaggaaacacccttctggtcaaggggctgaagaaaatctgttgtccgcttgactgaggacgacttcctgacaaatgtttcacatggaagaataggtccaggtttccataggtttgtccaaaggtttggttatgttatatcctgcttcttttgaatgataacatccatcatagagttataggctgtggtcacctgttctcggacctttggttgggtccctgaatcacatgtaactgtttttctgtaatcatcatcaaatccaccttacctgtggctctagaactcagcaactctagaacacagggctgttagttttccagatcttctttgtaactatgttaagcattaagaaatactaggttcagggatgacaggcatacaatgtgtatgtatctttttctgccaaaatgaggtgtgaatcagttagcacatttgagacctggtacccaaaacagccaggatgaatgaggtgaagaaggcacagtgggagccctcaggtgccacttcctctccactctacaaaatcagaagtctctgttgcttgcatgttatgtggatgtggttttcatttttctggcccttttggattggctttcttttggaccgtttgtgtggcattgatgctgccttcccccagcacggcctttgcttctgcctctcctaaatgaagcaccccactgtccagatggtaccatctcttcattacagaaaaatcatctaagtagaaagaagtagcgtttgagccacattgctatgtagtgttgggaggaacagtctctatcgaccctcagctcacttcctgatcaactcagcctatggctcagacaattggtttgttttccacgaaggtttaaagtgtggagtacatggttccaaccctcaccctctcactcagtttttctgggaaaattagctggcatgatacatttcagattcaaaaagctggactctgggatgccctccccaagatggcagagctttgggatgaaaacagtgtcaggtaaggagttaagtagccttatcttggcctaagttcactgaactgaccaagcttgattgtatccagttggtcaagtggacactcaacatgactttgctggaatcacaaggtggttgttgccattggaggaaagaacagatgtggaaggcctcatacraggtgggaaaatatagttctctggagttccaatgagagagttccaaggcctcactgaattagggccttggggaaatatgacacagattctagagctgagcaacaagasaaagcatgtctaatgagaaagtgagctccccagaattggaggatttcaagcagagaccaggtacctaggtgccaggggtgctatgaaggtagaagactggactaggtgcccagagtctctgtgtggtgatcaaacttttccaaagattgtagttcttggcactgacctggagtcctcaacagcttctgcatccttggtctcaacttgggtctggtgtcctggtccctaggtggtgagctccctgagcacagggcactggtcttgtccatcatcctcccctagcacctgtctctgtgcctttcaccttaagggtgttctacaagtgtttcctaaaggggtggtggcatgctggctcctccaaccccagctgtgagctgaaatactgtctcaaatccaaactgtctacatgatactgataagaaacaggattckaatctcaattttgctacccaaggattttgatgtaagagaatgtaaatttaaaaccaacattaggactgtgagtttgagactaaaactctggccttgctgttccatggccttaggagaagcacaggcatcaggacagatggaaagagagagagcgagacagacagacagacaaacagggtgctctgcaaagcagccagtgggcagaggagcctccatggagctcctagaacttatcttagcaattttccaagtttctaggcagcctgaccaagtaggaagaataatttggtcaattccatgaagaggttccctcttttgaaatgyatgattctaatccgcagctctttcatcaaagcaaaggcagtgaataacacagcccaaactgattttgttggtaaacaccacccaactgttttcttattagtttaccttggcaatacctctctatgatgtaattatgtgaggtttcagagccatatttacttccatcccacacacaccttatgttacctcatcttccactgccatattgagagaaaggaacacttctcagttcctgcagaaacttgaagaatcctattgggagataaggcagacattgactccaaatagttgggtggtggtgaagtgcaagtatgagaccagggcttccgtaggaggaggtcacttcagaggaggaggagaggggaagaggaaacccccaggcagccagtgaccaggaaagcagtaaagtgatggctaattattgtgaaagaaccaagttggaaacagttcacatcaatcctcagagagggttggacaattctggccaatttggtacacctgtcaaggaaagatggtgatatggtttggctctgtgtccccacccaaatctcatctcgaattgtaatccccacttgtcaagggagggatctggtgggaggtgattgcatcgtgggagcagtttctcccatgttgctgtcatgatagtgagtgagttctcatgagatctgatggttttataaggggctcttcccactttacatgctctttttctctctcctgccgccttgtgaagaaggcgcctgttttcccttctgccatgattgtaagtttcctgaggctaccccagccatgcagaactgtgaattaattgaattgcctttgtttataaattacccagtctcaagtagtatctctagagccgtgtgaaaatcggctaatacagatgggaagtcagggtctctcctgggggacagaggagcgtgcttgagacagaataggaagaaattcatacagaatcgaaagagttgctgacatgctgctgcccaaatacagcagcttcttcagacctcaggtgtcccccagaggtgccatctttgaatctaatgtgtagattcttattcagttggtctgggtagggtgtgggctttagaattttaaargatctccctggtgcttctaatgcacaggtagggttgagaagcacactgttctcaaagagtggtcccagaccagcagcatcagcatcacctgggaaattggaagaaatgcaaattctagggccccaacccagaattactgaatcagaaactctggcaatggtgcccatcaaactgtgttgtatttaacgagttctgcaggtgattccgatatttgctgaagttgaactactgcaatagagatgtttgaatctcaggatgctcccatccctgcccctgctccctgccttccttagttctccaagaaatcctgtctctgactcccccatccaggcttggaaccctggaggcttcctcgtagggctgcgtagagcaggtggggagggcaactccasagccctagtcacctgtgagctgcgtagacaagagaattttccagcaagtagaagtcaagtgtcctggggaaggtctgatttgcagagtcagggtttagttcaatgattgggcttcctggactccctcctctccttgtccttcccaatcagttgccaagcccccagctgtttcattaagaaatatctgaatcctcctccaccgatcactgtccattttctcactagtctcatgcttcagccctacttcctagattctggtagggatctcccagtgggtctcccttgctgctgtctccccccgtcccagccccccatcagctgtctttctcgacagcacttggcgcccatcccttcctcttccaccctgcttcccatgtgagcttgacacatgcacgctgcccacctgtacatgcatgcacacgtgcctgctccacaagacgccgccagcaagtcctgtggcctgtcctgtgggcaaagtccatgatcctcagcctggtatccagagacccccctgccggcccctccctaccacttcaaccttatctctcaccatcctgcttcatgaatcttgtgctccagccaaactggtatactggtaaaaccccgataagataagcaagtaaaattagagcccataaacccggaacaggtacaggcagccacggggtgtccagaggacgcagctttagtaacttcaagtgctcaggggtgggaatgggtacactccagtctttgagttaaatagcatgaaagtgagatgatgtggagaactgaactaattactcaaggactcaagaactcactgctctctctgcacctcttcttttctttatggtatttcactcattatatccttcttagaaaatctaggttgagaaatgattttatggttatttcaataaactgatatattttatagaaaatgagccaggttcttggattatggaaacaaaccttaatttatgtcaagtgttcttgcagaaagagtggtgccacctaccttcataacctgaagagcaccattgttacctgatggcagctacctaaaacacaggcagtagtacattcattcatttcagaaacatttcgtgatcacctactgagtgacaagcaggcattctcccagtcactggggatacattgttgaaccagatataactcttcttctcaaaaagcttacatctagagtgttggtagaggcaagctcactgagtaggattggggtgctgtggcaggacacggatcgacaatggatcatctctgggaggccctggagggttccttgaggaggtggtggctactctaagtcctgaaaatgcacagaaaggagcctgccttgttaggagagggtgaaggtataggatggcacagggcctgttgtaactcaggtgggtgcaggtacaagtcagactggggttcagtacagagaccaccagtacagacagggatggaactaggatcagtaaagacagggacttggctaaatgttcaaggtaygaaggtgttggccaggctgttctctaactcctgacctcaagtgatccacctgctttggcctcccaaagtgctaggattataggtatgagccaccacgcccagcctccctcactcagttcttatttctatactgccattctaggtggagactggtaccataccacctgctgacatattcccttggaggcagctgctgccaaaacttaggattatcttctacttgagggtttaccattattgggcctgtgcctgggtcgcagtgccccctttgcagrcagagtgaatatttctgatttacattgttcattggagtgtggagaattgagccttgattcaagtagaaaccacgttctcagagggtccagctgggctggtgagatgaataccacacatagacggctccaatggcttcatggagctgggggaaggctcctggtggcacatgtagagcagacccctggtagcaactcagcctcctggagagagagttgggaatactgggtcagatgccatcataccagcatctcagaggctagtccctctccatccctgatccctgaactagctactgggccttggctttttagcagagggctgcaattgccaccctccagcctgttctagtggcttgtttcctatacaggaattggtgaattgaggacatacccagaatgggaccccacctgtggcaggaatgctatatgctttccaaacctctttccttttcctcctgggctggctccatttctcagcctcctttgcaattaggggtggtcatgtttccaaagagtgtgtacaccacctccaggcctggcctgtaaaattcttcctcatatcatcttctctgttttccacttgycagctggttgtggatgatccagcagaggcatctgaggttccagtggacgacagggttacaagatggaaaaagcctgaattcctgagtcactgcatggaaggctgcctactgaacacacacatttgggctgttacatgagtgacagacacacttctgtagtgtgaagctcttgagatttgggggcccctcattacaacacttatgctattcattctttcccccaactctsttcttttgtttgtttgttttttgtttgagatgcagtctcactctgtcgcccaggctggagtgcagtggcactaycttggctcactgcaacctccgcctcccaggttcaagcgattctcctgcctcagcctccctagtaactgggattacaggtgcacgccaccatgcccggctaatttttgtatttttagtagagatgggttttcaccatgttggccaggctggtctgaaactcctgacctcaagtgatccacctgccttggcctcctaaagtgctggaattgcaggtatgagccaccactctcagcctccccaactcagctcttatttctatattgccatactaggtggagattggggccctaccacctgctgacatatttccttggaggcatctgctgccagaacttcgaattatcttctgcttgagagtttctattattgggcctgtgcctgggtcacagtgccccctttgctctgtagtgggacttcctggtcctgacaacttgcctgaaatgccatttgtgatcttgctgtcaaactctggattctaacttttgctttctgagcatgctgtctgtctccttatgcctgctcccactctcactcccagtgactaggaggtgaaaaatgactgttccaggcaccaacttgcctgaaagctctaagacttgccttaaggcagtcaagccgtctgctgactctccacttttgcaaggagaactacgtctagtcatcaacatgtagccgcatccagccatgaggaggggmgggagagatttgacaacatctcaggaagtgctaacatctgacaagctgagatcatgggtgtcataaattgatagagaggctgaaatgagaaggagataggatgggccatgtgtggttagcaacatcaagagcaacttgtagttgacaacctcattgctcatcttctgctgacacatacagccaaagtctgaatggtggcattgcttcaactcccctgctgtgtgatgggggcacctgattgatgttgacacgccaatgttgggctatcatcggaggaggtctgtattaattttaacaatgaaaatagacgggttacagttaccytaaatagcatcaagtcaccccacttcataaagcccttcaatggctttcctttccttttggaaggaagtagtgcatttttcacatggtccactgggtcttagatgtcctgaccctaccttatctctcctgtgtaggccagtcctaccctttcttctgcttaatgcctcccagccatgctggtgttttctacattcttcatgcgcacccagcacagtgccaggcaccctgtacaaattcaataaataattcttggattaatgaataagaggtcaatcaggagatggctgcaatctaatgagaaaccatggagctgatatttgggtgggtgtctctaaatctaagccctaagaaaccttgctcgttcactgttctagtgtcttcccattgcctagaacagtctcccatgcccagtagatgccaaggcatttgttgaatcaacgaaatgaagtagaatgaatggataaaaggagtagtgaccagaatgagggagacttcataggcaggaccagcagggcttgctgactaactggattttgagatgagggggctgagagaagtcaaggatgatcccaagtttctggcttggggctgaagggaggaaggtacaatttactgagacgggggagatgggatgaggttaatggagaaaggaggctgcggcaatgagtctagctttagatttttcgagtctgtagcatctgtaggctggttgtcagaggatgtccagtgggcagctggatatattggtctgaaactcaggaatgacaattgggctggagagaatagatttgggagtgaacagcctgtgatgttaacaaaagccaagtgagtggatgagattgcaatgtgataggtggtgtggttgtacaatgatgtataaaatatggtccctgccctcaagactaatacaaaatcaagatatgacatagaccttaaaactgtttatgagcccatccatatctccatagcaaccttgaagcagagcgatagctctgcccttatcacaggcaggggaaacacacagatggctgctgtctcccacaagtctcccactgcaggagatgtttcctcttccccgtgggacccacaatgagtggcacctgcaaattccactcttctagccagtccaaacccgagtcttcttccacgtctcagccatggggccgaagagagggagggggacgtcagaatcagccctttctgtccaaacccccttttctctaggtcttgtctctctacaccctccactttgccaaagccaggaaggaggtggccgtaatgaccacattgccactttcccttggtctttctgtggcacgaatgctgtasgtcgtttcctgcttcctgcaactgtccgccagtggcttcagtggaaacaatcacagacctcgtgtattgagtgctccctgtgagccagagctccwytaatcaggccacacgaggaattcattttcctctcaaccatcctaggcagtgtggacagttatcaccacttcacaaatgagaaaccgaggctcagagagatcattttgggttctaagattgtctaagctagagtatggaaggggtaggatttgaacacaggtcatttgaaaacaaaaagctgcatccttaagcagtaaaataaggttcctcagctaatggtcctgttgtctgcttgctctctcttatactctttctctctctctctctctggttatatctgttgaatctttttccaggcatctctttggtattgccctgtaaggctgctcttcttggtgttggttcccccaccctcaactccgtgcttcccttctcagcactctacctgttctctgtagcccacttttatccctatggctttgccccatccacaagcaaatggctctcaaaatgaaaattatttccctacttcagatttttctcctgacctctacagatctggccatctcccgagcatcttaatctgtggggccgcaagaggcctcgtgctcagcgtgcagaacactgaagccacgatagcttcctaacacttgcttccttccccgagtccctgtcgtactgtatggcactatcatgggctcactcaacagagccggacattcaggggtgatccttgacgtccccctcttcttcatccccacactcaatcagcaaccaaatactatggattctgccttcctagtggtcttaaaaaccagccctctcttgctcatttccacatccactgccttattcaggctgtcatcccccacctagctgacccgcagcctcctggctggtcctcatgtcaggtagaaagcatccaatctgcctcctgagtgatatttctagaagccaatctgatcacgttgctgctcaattttacctcctgctctggctttccctgaccctagcatgaaagatgaacttcttggtatggcccgcagtgccttgcatatctccccgtcctccccactcaccccagtttcccatgcctttgagcaagcgtcagccatgctccctccgacaagcacatctatcctactctcttctgcttggtgaattcatctgcacagtctaagctcaaatgtcattagattcaaaccttttgccgatctcctgtcctcctgtttgtgtcygctctgtgccctgcatgtatttgtgtgccatcataactataagacggacggaacttaggtgattatatgtctatttccttatcctggaaggtgagctccttgttggagagatgtggggcttatacactgggattctcatctactgccaggtccccagtgattattcaataagtgttttctagaagaaggactgaaggaacagaggagtcctcctaacctgatctcccgctctcagaaatggaacagagtccctaaaaggatcatattgaagagactggactgcattgggggtagccaaggttttcatgcttccaaagggcccctaatatcttttgtaaggaggtgaagcagaccccaagctcataccacccgtcctctttcttccctctagccactctgcaccctggaggtaaacatcagaataaacgatatcataaccgtgggctggctcggtgaactatgagtattctaaaccaagatgtgatcttagatttagtgggaaaaaaacactgcatgtaaagccaaaagattcgggcttgagcctggcctctaggttgtgttacatgtatgacctcaggtggtcgtgggacatctctgagctccggttttatcaacctgggaatgaaaagtattggtcacttacttcctggggttgctctgaggctgagtaaagttagagaatttcttggtacttgtatggtgctgaggaagctccattgtccctttacccagcatccttcatggcaaagagaatgtgcctgctgacacctctttcagcctctgtttcagcctctgcctcagtccttgccagagacgtcaggcttagcacagagcagctgggagccttcagcagagaaggaaggcaccrcttagacatctgcacgggcagtttttaaacatagggaacatgaaggaaataccacagaatttatggagtgaaagctttaaaaagaaacacaagtctgaagtcaaaacagttgactcaattctaggggagatgtctgcctggaagtaggagtgggggaaaaagacttggagtgagtggagacagggtaagcaaagctctgtggggagccctacaaagtggggcaagtgggcacctccccgcatggctcgagacggaaagtcggtcctgcctgtacacagggtagcacttaccagcattttggaaacacacatctttgggcccagctgttccacttttaagaatgtcgcttgagatagcctcatgcaagggcacaataatatatacaaggatgtccactgaagcctcattagaagttgagaaaacttggaaacaactcgaatgctgtttagcagaggataggctaaacaaattacaacacgtctgtacagtggactgaagcagcaaacggcgttatgtctctaaatatgaacaggaaacatattcattatacaataagtgagaaagaccagttgcaggatggcacaggtatgatgatcttgtttccataaaaactaaaaatatacatatgcctgtgcatgcatggaaaaatacaagaggataggaattaatttgtgaccagagtttgtcagtgggagttgggattataggatattttctgtacagttgtgtagagttgattttttcttttctttctttttcttttccttttcttttttttttttttttttgagacagagtcttgccgtatcatccaggctgaagtgcaatggcgtgatcttggctcactgcaccctctgcctcctgggttcaaatgattctcctgcctcagcctccaaagtagctgggattacaggcacctgccatcatgcctggcaaatttttgtatttttagtagagacagggttttgccatgttggtcagctggtcttgaactcctaacctctggtgatccacctgcctcggcctcccaaaatgctgcgattacagacatgagccactgcgcccagcctgagttgatttttttttaatagacatattagtaaaagaaaaatatacagaaaatagtgaaattacgggaaatatggcaactgtctgaccttcatcctagaaaaaccctgatcagtgtccctgtattgcatcacaggtaccaaaattgtaatacatccttcatcatgctactgtcccagtaaaaaccccgagcatctctcatttcttcccttccactccatcctggctaatttactgtccacaattcacagagtattgtctccactctgcgcagccacagaatggrtgtggtaacgtctccatggcatttatggtttctacaaatcacaaatcacatatgaagggctccaagaatattagaggaatgagccagttaactcagcgcccatgggggagctggcaactccccaagaaagctggacatctccaagctggccaccaacattctatagcctctccatgagcagggtgggagctgtgctgggtgcacagtgccatgtccacaggttgatgtgaggggcacgttctaaatcaagtgcctgagaagggcttcggagacctagatcctatccctaaacaactatgggacagtgtaccggtcactttccctttctgggtttctgttttcacctctgtaaaaaagagtaaggcttggtcagtgtttctcaaagcactctccttggaaaactacatctggkatatgttataaatgtccctgaagaggcctttgtggtaaaatacacttgagaaatgcagctctctgcatcgtgctcttggagatttccaatgcatattagcaggttagagtctctgaggtctggcagtaaataaacttacttatcaatgcttataccagcaattctcatgtttatttcaccttggcatcctttaagatattttttttctgagcatcttggttatacatacactgagttaagtgttatccacagtcactgctcgctccctgaatccgtgaccacgatgagtcaccctccatgccaccccctccatgctgccgggccatcatcctgcagtgttcctgtggctgaacatggattatttcaggtgacccctggaaaaaacgaagctctgttttgtgagagagaatgggttagcctctcagtacagatcccgatggaatgggatgaaggagaggtagcctactgaaaaaggagaggggtggggagtctaaaagggcttgaaatgcagccaggagcagccagatggggtggtgcagttgggggacactaagtaggagtgacatggagggacactaataagcagggaactacagaggaataattttcataatacgtctgttaaaaacagggaggcagggcaaatggtcagaaggaaaggaaggttcttggcacctgtgcggttcactatcttatttgtggctgtaactcatctcttcccctggatttaaataccaaatttatgttgatggcttccacgtttgaatataatctttcgaggaagagcatgggctttagagtcatacagcccatgcctcagtttcttcctctgtaacttggggctaaccataagatttacccgctaggtgtgtgtatgaggattaaatgagttgacacataggaaagctcctagaataactagtgtgtagtaagcactcaaatgacatgatcatgatcaattgttattattcatattttcagccatcagtgctctctggctcgacacctccactcagatgtctccagggcatctcaggcttaacaaaactgaatcagaattcttgattttcccaacaatacctcacctttcccagactccctgtttcaatgaatggcacctgatatacctgtagctcaagtttggaacctgagggtcaggtgtggtcctcctttccccttccctttcatatgcaccccaccaggaacttctgcagagcatgaacccacccccaaaatatatttcaagtccatctacttcttcccacctccctctctcctctagccaagcatcccttctctctgggtgaaggcagcagccttctgtgtgccctccctgtcttttctctcactcctttccagggaatctgcacctgtgaccacagccttctgtaacaaatgtacctgtgaccatcctaagacctgtgggggcacagaaaaggaagcccatagctacccctgctggcttttggtgtccatttgcatgaagtgtctttttccacccctttactttaagtttacatgagtccttawgtgtcaggtgagtctcctgaaggcagcagatagttagttggtgagttcttatccattctgcagttctgtatcttttaagtgcagcatttaggccatttacattcagtgttaatattgaaatgtgaggtaccattgcattcatcgggctctttgttgcctgtgtacttctttgtttgttttttgcttttgttttttaacttgtatttttgttttataggtcctgtgtgatttatgctttaaagaggttctgttttgatgtgtttccaggatttgtttcaagatttagaactccttttaccagttcttgtagtggtggcttggtaatgacgaattctctcaggatttgtttgtctgaaaatgactgtatctttccttcatatatggtgcttagtttcactggatacaaaattcttggctgataattggtttgttgaggagccggaagacagggccccaatcccttccagcttgtaggttttctgctgagaaatctgctgttcatctgattggttttcctttacaggttacctggttcttctgtctcacagctcttaagattctttcctttgtctcaactctggataacctgatgacaatgtgctgaggcaaagatctttttacaatgaatttcccatgtgttctttgtacttcttgtatttggatgtctaggtctctagatggctgcagaagttttccttgattcttcccccaaatatgttttccaagcttttagaattctcttcttcctcaggaacaccaattattcttaggtttggtcatttaacataatcccagacttcttggaggctttgttcatattttcttattcttttttctttgtctttgttgaattgggttaatttgaagaccttgtctttgagctctgattttctttcttctacttgttcaattctattgctgagactttccagagcatttcacatttctaaaagtgtgtccaaagtttcctgaattttcaattattttttctttaagctatttcattgaatatttctcccattcaatattgggggattgtgttgggagaggagggtctccctttcccacttcygcaaatggggcactcacagtatttggagtgtcttctgggtcctgcaggagcagtctggttccttcagagagtctgtgggtccttttgggattgctggttttttcttgcagttgatctggagctaaaattcaccatggaagcctccagatgctgctctgtctgaagctgcaatctagtcctgccacccagccactatgatcccctccatctctctgtccactttagtcagataagctcaaagctagaacaaaggacccatatatgagcctacggatctgccttcaaacacttgagaagccctccaactcaccatgagaacactgaccccaatcgggatctttgctttgctccaacagccagacactcagacaggtcctcagacccagcaactaatggacttggtgggatggttgtcctcaaagcagccagcattttgatcaggctggcgtctggtcctgtatttttctgggatattcagaatctcttgacatgtatcttcacttaattgtgaatttaaaaaattatagatggatgtagatatagatatagatatagacatagagatagatatagatagacattttggagaagagtctctctttgaagacttcctctcagagtacaagtccgtggttacaaccattttgtttctcagcaaacatggggaagtttgcttttcttctctgaggaagttaatataaatgtttattgacagtgcagtcatcaaggaataaagttgctgattcattcctttacactgaaaccctttgttgtgccctcctcttccttcctctttatagggagacactctgagaaagagcacattgtgggggcccactccatgtgatgtttgcttggttgcctgttcccttttctacctgcagagcacggttcccataagggcggcgagatcagcctcctgtctcatctggaagaccaccactctggggtctcagaggaatgatggaagccttggggtttctaaaattggaagtgaatggccccatggtgarggtggccctgtcagtggctctcttggccctcctgaaatggtaagtgcagccagccctagggactgtgacagcgtcagcyrtctcaccctggagccttgctggtgccatggcggggtatgtgggagtgtgtttttcttcttttctaatctagcgggagtgagtattaacacagcttcagaattaaaagcaaacagccaggttaatcttttgctaaaatgcatgagattgaagtgtcaggaaaggctggtgattcagtgactgagaacgctacacataattaagtttgaaagagatggaaaaagaaacaaattggaaaggcattaggtttgggtagaagcatttccttgaaccccgtcatatctcctcacctcatttttctaaaatcctctgtccttgttggatttacagtgaattcagcctcttggttcatattacattcaaaacaaaacaagacgtaggagctgtttggcaaatgtgggcctctttgcaggaagtcattgagggggatttctgtagggttaaggacaaagtggtagatctaatttctcatagttgatagagggagatggattctgatgaacatagtgtgtgcagctcctacaaaatttgagaccctgaaaggatctcaaacttgaactccgagttgctcccctgtggttttgttaattcaacagcaaattttcctaagsctgactctggtgtctgtaggtcgaaggcctcataatatgctacatttatgcatattcgccctgtcagttaaacttattagagttacccattcaatcaaaagcacctggatttagatggctctggcttttgagggcaaagtgagtggaaaaaataatggagractggagtccgaacagaattttaatttatgttttcagtagtaataaagccttctctagattaataactgggaaagcactttgaaaagcatcaagcattatgcaaatgtgaggtattattcttttggaatttgcatagctgagagtggaattcacgtttgatgttctatgatgatgaaattacttcttggaaattggctctgaaacccagcctcagtcccagtgctgtttttctttttaactggtttaattttttttttgaacttttttatctcattgtagcttaccttggattgaaactggccacatgtaaaaccaagagcaaatggtagctccttccctacccccagcccccaataatccatctcaatgtgtttttatgctccgggaagcccgaagcacagtgtctgacatgcagaaagtgcttagtcgatgtcagccactataattaaccatctatcatctatgtaacctaaaagaaaataagtctttagtggtttaggtttatttttaatttcttactaatgtgcttattcatattaatctcatcaatagctatgctctgactgtggttctcaaagcggacacttttttacacttttgtttcagtctttgttgtgtctgagcctccagctcagtgcctgccatgtaggaacaccacaccattcagcagggcagctatgtgtttgctgtctattcttgggccatattaataacctggttcaaagatgcagrgattaagataaatgtaccaagcagaagtggtaaacaggaagtgagagctgacttctatttgttattgcaaaaatatttattaacctgttaatgtgtgcccagtctggaggaggccctggtacaaggtcaggaagcaggagatctggagaaggtgcccaaggcaggggagacacagaggttctgggggtgagctggatgtctagagaggatactgcaggaggagcagaggcagcaggagagaggtcacggccctggctctggtgcttttgggtccatcccttgattcagtgcaaggggaaccacccttgggctttcaacccttctgttccgggtgagactctagtcagccactaagcaacagccaccagcttgaatgaggcaaggcccccttcctgcttcattgtcttgaaaggatatgtgtggaagagacaggggtgcttttcctccagtgagaggattcacaggcaaggaaagatggaggtgtagagacacttgcaggagaaactggcagggggagtggattaaacattgcagcacattagtctttgctttaagtgttacatgtgccatccagccaggtgagatggcagcagagaacctaaaccctgagaaggtgaaatcaaatgggctgggcgcggtggctcatgcctrtaatcccagcactttgggaggccaaggcagacagatcacttgaggtcagaagttcgagaccagcctggccaacatggtgaaactccatctctactaaaaatacaaaaattagctgggcatggcagcaggtgtctgtaatcccagctacttgggaggctgaggcaggagaatcgcttcaacctgggaggcacaggctgcagtgatctgagatcatgccacttccctccagcctgggtgacaaagaaagactctgtttcaaacaaaacaaaacaaaacaaaacagaaggatgggaggatggagggaatcatggtggacaggaggcaggactagactgcagctccagacaaagcagcatctggaagcttccatggtgaattttagctccagatcaactgcaagaataaatcagcaattctgaggggacccacagaccctctgaaggaagcggattgctcctgtagggcccagaagacaccccaaatactgtgagtgccccaactgcggaagtgggaaagggagaccctcctctcccaacacactcccccaatttgagtgggagaaatattcaatgaaatagatagcttaaagaaaaaacaatagaaaattcaggaaactttggacacacttttagaaatgtgaaatgctctggaaagtctcagcaatagaacaagtagaagaaggaaattcagagctcaaagacaaggtctttgaattaactgaatcyaacaaagacaaagaaaaaaaataaaaaaatatgaacaaagcctccaagaagtctgggattatgttaaatgaccaaacctaagaataattggtgttcctgaggaagaagagaattctaaaagcttgcaaaacatatttgggggaataatcaaggaaaagttccccagtctagctagagacctagacatccaaatacaagaagcacaaagaacacgtgggaaattcatcgcaaaaagatctttgcctaggcacattgtcatcaggttatccagagttgagacaaaggaaagaatcttaagagttgtgagacagaagaaccaggtaacctataaaggaaaacctatcagatgaactgaagatttctcagctgaaaccctacaagctagaagggattggggccctgtcttccagcttctcaaacaaatcaattatcagccaagaatgttgtatccagtgaaactaagcatcatgtatgaaggaaagatacagtcgttttcagacaaacaaatgctgagagaattgccattactaggccaccactacaagaactggtaaaaggagctccaaatcttgaaacaaatcctggaaacacatcaaaacagaacctctttaaagcataaatcacacaggacccataaaacaaaaatacgagctaaaaagcaaaagcaaaaaacaacaacaacaaaaaaaaccaaagtacagaggcaacaaagagcccaatgaatgcaatggtacctcacatttcaatactaacactgaatgtaaatggcctaaatgctccacttaaaagatacagaactgcagaatggataagaactcaccaaccaactatctgctgccttcaggagactcacctaacacataaggactcacataaacttaaaggggtagaaaaaggcatttcatgcaaatggacaccaaaagcgagtagagcaacggtagctattctcatatcagacaaaacaaatcgtaaagcaacagcagttaaaagagacaaagaggggccgggcgtggtggctcatgcctgtaatctcagcactttggatcacaaggtcaggagttcgtgaccagtgtggccaacacagtgaaaccccgtctctactaaaaatacaaaaaaaaaaaaaaaaaaaaaaaaaattagaggggtgtggtggtaggtgcctgtagtcccagctacttgggaggctgaggcaggcgaatcacttaaatctgggaggtggaggttgcagtgagctgagattgcaccactgcactctagcctgtgtgacacagcaagactctttctcaaaaaaataaaaaaaagagagagacaaagagggacattatagaatggtaaaaggccttgtccaacagtaaaatatcacagtcttaaacatatatgcacctaaaactggagcttccaaatttacaaaacaattaaaataggcctaagaaatgtggtagacagcaacacaataatagtggcagatttcaatattccaccgacagcaccagacaggttagcaagacagaaagtcagcaaagaaacaatggatttaaactataccttggaacaaatggacctaacagatatatacagaacatttcatccaataaccgcagaatacacattctattcaacatcatatggaactttctccaagatcgaccatatgataggccataaaacaagcctcwataaatttaagaaaattgaaattgtatcaagcactctctcagaccacaacagaataaaactggaaatcatctccaaaaggaactttcaaaaccatgcaaacacatggaaattgttaaataacctgcttctgaatgagcattgggtaaaaaacaaaatcaagatggaaattaaaaaattcttctaactgaatgacaataatgacaaaacctatcaaaacctctgggatatagctaaggcagtgctaagaggaaagttcatagccctaaacacctacatcaaaaagtctgaaagagcacaaacggacaatctaaggtcacacctcaaggaactagagaaatagaaacaaactgaacccaaacccagtagaagaaaggaaataaccaagatcagagcagaactaaatgaaattgaaacacatacacacacacaaaataaaagataaattaaacaaaaaactggttctttgaaaagataaataaaattgatagaccattagcaagattaaccaagaaaggaagagagaaaacccaaataacgtcactgagaaatgcaacaggaggtattacaactgacaccactaaaatacaaaagatcattcaaggctactatgaacacctttacgcacataaactaaaaaacctagttgagatggataaattcctggaaaaatacaatcctcctagcttaaatcaggaagcattagataccctgaacagaccaatacaagcagtgagattgaaatggtaattaaaaaattaccaacaaaaaaaagtccaggaccataaggattcacagcagaatttaccagacattcaaagaagaattggtaccaatacttttgacactattccacaagacagagaaagaaggaaccctccctaactcattctatgaagccagtatcaccccaataccaaaactaggaaaggacacaaccaaaaaagaaaactacagaccaatatccttgatgaacatagatactaaaattctttttttttttttttttctgagacagagtcttgctctgtcgcccaggctggagtgcagtggcgcgatctcggctcactgcaagctctgcctcccgggttcatgccattctcctgcctcagcctccggagtagctggcactacaggygcccgccaccacgctggctaattttttgtattttttttagtagagatggggtttcaccatgttagccaggattatcttgatctcctgacctcgtggtccacccacctcggcctcccaaagtgctgggatttcaggcgtgagccaacacgcctggccaatactaaaattcttaatgaaatactagctaaccaaatccaacaacatatcaaaaagataatccaccatgatcaagttggtttcataacagagatgaagggatggtttaacatacaaaagtcaataaatgtgatacgccacataaacaaaattaaaagcaaaaatcatgtgataatagatgcagaaaaagcatttgacaaaatctggcatccctttatgattaaaattcttagcaaagtcagcatacaagggacataccttaatgtaataaaagccatctatcacaaacccacagccaacctaatactgaatggggaaaagttgaaagcattccctctgagaattggaacaagacaaggatgtccactctcaccactcctcttcaacatagtactggaagtcctagccagagcaatcagacaagagaaagaaataaagggcatctgaattgctaaagaggaagtcaaactgtcactgtttgctgacaatacaatcgtttaccttgaaaaccctcaggcctcctccagaaagctcctagaactgataaaagaattcagtagtttccagatgcaagattaacatccacacatcagtagctctcctatacaccaacagtgaccaagcagagaatcaaatcaagaagtcaaccccttttacaatagctgcaaaaataaataaataaataaataaataaataaataaataaataaataaataaaatacttaggaacatacctaaccaaagagttgaaaagcctctacagggaaaactacaaaatgctgctgaaagaaatcatagatgacacaaacaaatggaaacacattccatgttcatggatgagtagaatcagtattgtgaaaatgatcatactgccaaaagcaatctacaaattcaatgcagtctgcatcaaaataccaccatcattcttcacagaattagaaaaaacaattctaaaattcatacagaactgaaaaagagcctgcatagctaaagcaagactaagcaaaaagaacaaatctggaggcctcacattaccttatttcaaactatactataagcccatcatcacccaaacagcatggtactggtataaaaataggcacatagaccaatggaaccaaatagagaaccacaaataaacccaaatacttagtcaactgatcttcaacaaagcaaacaaaaacataaagtgaggaaaggacacctttatcaacaaatggtactgggataattggctagccacatgtaggagaatgaaactggattctcatttctcactttattcaaaaatcaacccaagatgagttaaagacttaaacctaagacctgaaactatacaaattctaggtataacactgtaacaacccttctagacattggcttaggcaaggatttcatgaccaaaaacccgaaagcaaatgcaataaaaacaaagataaagagccgggacctaattaaactaaagagcttctgcatagcaaaaggaacagtcagcagagtaaacagacaacccagagtgggaagaaatcttcacaatctatacatctgaccaaggactcacattcagactctacaatgaactcaaacaaatcagtaagaaaaaaacaatcccatcaaaaagtgggctaagaacatgaatagacagttctcaaaagaagatatataaatgaccaacaaacatgaaaaaatgctcaacaacactaacgaccagggaaatgcaaatcaaaaccacaatgcaataccacattacttctgcaagaatggccataatcaaaaaataagaaaacagtagatgttggcgaggatgtggtgatcagggaacacttccaccctgctgrtggggatgtaaactagtacagccactatggaaaacagtgtagggattccctaaagaaccaaaagtagaactacctaccatttgatccagcaattccgctactgggtatctacccaaaggaaaagaagtctttatttgaaaaagatacttgaatatgcatgttcatagcagcacaatccacaattgcaaaatcatggaaccaacccaaatgcccatcaatcaacaagtggataaagaaactgtggtatatgtatatgatggaatactatgcagccataaaaaggaacgacttaacagcatttgcagtgacctggatgagattggagactattattctaagtgaaataactcaggaatggaaaaccaaacaccgtatgttctcactgatacgtgggatctaagctatgaggatccaaaggcataagaatgatacaatggactttggggacttggagggaagtatgagaggtaggcaagggataaaagattgcaaatatggtgcagtgtgtactatttgggtgatgggtgcaccaaaatctcagaaatcaccactaaagaacttactcatgtaaccaaatgccacctgtgccccaacaacttatggaaaaataaaaaaacaaaaacaaaacaaaacaaaaaagcaaaaggcacaccaaggttgcttcttgtgctctcaaccagcctgtgagttctctaagggtgagggccaggtctcctatctcattacagttctggaatcttctgccaatggcagggatgctctgctagcatgtggttgaaggtggtaaagtcaagaagtccacaaccatcagccccgccccaggactcactgtgggtctcctgctccttcagcgggccccctgtcrctctctcccccacaaaccctaaggcctcctccagaaagctcctagaactgataaaagaattcagcagtttcttttatcctgggctggggtcagagcgacgctgtctgggtgctgtgaatggtcctttgttgctgcatgaggcctcctctttccttcaactccaagctcaggggtgcttcctcagggaagtgttttctgtttccaaaggcactgaggagccccctctcagcattgcttttatcccatctctgtccctcacaatgcctggcacatagttggtgcctaacaaatgctgactgaaggctaattccaacctctaagctctgcctggtgctttcttcctgtggttcttctcttggccttcacagttccatacagatctaaattctcttgcccatgtgacccactccctttcctgaaagcttgctgtgttttcagtttgtgtcaatttgccatgcactgttccagttgttgaagatggactgtttttgtatcctttcttatcctgtagagcagacaccatgccatgtacttaatgcacacttattaattattaggtgtatgcgtgaatttggaaaaaagacaaaaaaaatctttcatttaaaaagacactgttttaaactaggcacagtacactttgatcgttttcccraaaccgcgttggacaccatttttccatgatgatcatttgatttaaaccgaccagtgtgtggctgagctctgtgaactggggcatcaggggatcagggctgcaccaccagggctggagatggagctggggatagagactgtattagctggaagtacatggagcacatgctaagacgattaacacacaagataacacattttaaaaactaattttttcccatataaaatggtttaaaattcttacttctggaggagatttgatggacaagaaatgagttgtacgagttgaacgttgctcgaggcaaccgtaagtcctagcgtatttaatctttcaagcaacacctaaggactggcagctgggttcctgtggggaggataaagattgctttattctttaagatccagtgtaaagaaatagcccagatagcaatagtggatttctttctgggatggggttgtgggtgatttcttttcccttcttttagtctttctgcatcttttgtatttctttaatgagtgtgaatatttagcaaaaaagagaaattttactaaaaagagtgggaaactgctcccttctagtggtraaggggaaagcagtttcatgctttaggcgtgaggtttcaggactgtagtctaattatttcttccagtggagtagaatgtctgaaaggatttggagtaacagggctgatgaagyggcaaggaaggtgagtagctatctaggcaagtatgtgaacacagcctggaagggcttgtagtaccaagctgctcttaaagctcaggtaccaagacccagaggtacataatcaattcgacatcaaaaataggaattcaggctgggtgtggtggcttatgcccaaaatcccagggctttgggagggcaaagtgggaggatcacttgagcccaggagtttgagaccagcctgggcaacaaagagagwccctgcttctaccaaaaaaaaaaaaaaaaaamcaaatcaaaaattagccaggtgtggtggtgcgagtctgtaatctcagctacttgggaggctgaggtcggaggatctcttgagcccaggaggttgaggatacaatgagctgtgattgcaccactacactcgcactccagcctgggtgacagggcaagatcctgtctgtagtcccagctacttgggaggctgaggcaggagaatcacttgaacccgggaggcagaggttgcaatgagccgagatcacaccactgcactccagcctgggcaacaagagtgaaactctgtctcaaaaaaaaaaaaaaaaaagagatttcagatagagagtgagttagtgttctgatcaagtctcattctaagaccagtttaaattgaaatgtgattggtgattattaagatttaagactatcacagattattaagacttaagtttaccactatgcstggaagttcctttcccagagagtttcttctacatgtaagaactggactctaattctagacccacatctactccagactatatttagaaggcaccattgggatggaatatgggagccaagatgagaaatctgaagaggaagaagccatgtaggtattccctggcacaatgggaggtgagctccggaaaaggcatcccgcctccagcatgtggggactgaagatcaatttgcccaccatttcccaacttcggttcctaaaagtgtttaggaaattaagtctaaatcaagcccttcttggagattcatagaatatcaaaggccctgaaaggttctttaataaagaaacctgttcagcttyatttaacccagtgttttcgcagcgtctttgctaaagtactgctgcatatggccgtggtgggttgggcaactagacccgctgagatggtcccttgaaaacggcggtcggatgcattggtagctgcacaaccagtggaaatggaggggccacaaaacggaggaataagacattcaaattgcccctttgcaagctctgaggttccagggttgacgtattgtttccttcagggcacagaaaatatggagtctagcgaacagaagcagggcccatgcgtaggggtggtccaggtttacaccaaagaaaatgartactactcacagctgtctggcaaggtggcaagagagcgcctcggaggtcgtgagtgtccctcaccatccataggaatgccacaaaagcccttgctgccaggcatgagcagctggtacagaaggccaccgagtgccttcccgatctggactccgtgacttctatgcccactggcgctcttgcatgggtcagtctgtgctgccgctcaggaaaagcaagtcaggtgccataccagcgacccaatggcggctgctgcttcttctgcctgggcacctcatcatccccagcagtagttcctaggtgtgagcgtggcaaggagcccagaaatacagaagsagcgtttaggggcctcacggtagcttcatgcctgactcttttctctcctcttccggcctggcctctaggcctttctggatcgccagccagtcagactctacttcgagaagcagaaggtcttgggctgggtcttgaaatgcagggaagaattgacttggcagaggagaggaaagagaaaatttcaggtggggaagtaccccaggcaaagacaacattagtgtttgtaacatttgctggaacaaaacattaggagtgtgaataatggacacagtttagaaatacattttaaaggcatggataattttcagtgcctccaagcatctagagagggatacatctatttcccttttttttttttttatctttttgtatttttgtctaggatatgatgggtacttcgatttaataactcagtgatgagcttggagataaaattgagcctgctgtgaaaactaggtctgtggcttccttgaggaccatttctacagaatattattttttttgttttctctctcttaaatggttatacacaatatccctatccttctcctcactttattgattttccagaatgagagtacgaggtatgactataaagtaacgtgactgaytattttagcatacactccaatacttatacagccaaatgaattttatgaccttcggaggcattttcctgataggctaaacccttactgcagatatgccactatcagaaaacacattcttagcactttttgtgggaatggcacttggtgcttagatgtggtcctttgaaagccctcaacgcaacacatctttgtggagaatagattgattttttttaaaaaacagtccatattttggcaaatagatgattaaacagagtaatattatttgcaattttaaaaatgtgattataaaacaatacacagcttgcagaagaggtgtatgaaccagttctggaagcctgggaattttgctgaggggccacgctcactggcatacgagttggtttttggttttggttttgttttttaaagaaaacaatagcaacagtcttaatatttatggtcataccttctctcgtctagtaaggaattcaggcttctggtagcatctgttttgggggcagagatgaaagaagaatcttatttgttgtataaacaaagcaaaacatcagattgatgtgtgtccattactgagctgcgtgagtgggtgctcagcgatgccttcccgggaaggaagtgactctcccasaaataaaatgattgaatgaactcttcccctaaccctagtgccataataacaacaaacctaacaactatcgcttgccactgaagggaagtacgckgtctatgggaaccctggtagccttatatggacttgttttttggttgccggaataacatgcatctggacatgggaatgagactggcgagaaagggagggggcagatgttcacactggtattcattggtgcttcaattactaagagccacatctttcctggtttaccagaaataggtgctgttgcacaacttcctggtggatagggtaggggggtgttagctgataggggagttccctggagccctcgrctctctctgttgctttcagcctcagccctcagtgcagagtttggccctggcccgcgctgtggggccctcctaaacctcccctatgtccttgcaaaggtgtgcttcttaggtttcgcttgagcagtcagccagttcctcaacacaatctcagaaagaggccggccccttttttcccctcgaagatatctagaaaaaactgtgtcagagatgatctgaaagcaaagccaagctctaccaatagtggcttccaccaatgccttgtttccctgagcactgcacacagaccccctgggagagccagcgccataccccgaaaccagcagctgcctccacattctgatctgaaaggtgccctaaagtcctcgcatgtgcttccctccttcctgcactgacatgcctgttccctccaagctgcacagcgcagtccctgttgcctgaatgctctcccttcttggtttaactgaactcctgcctaaccttcaaaatcttgtctaaatgtcactcttccataaaggtctcctccatcaggccagccctcaaccagccctgcctcctgtggacttgcttcctatctctctggctatctcggcacttactactttactttatttatttatttatttatttatttatttatttatttatttagagatggagtctcactctgtcatccaggctggagtgcagtggcatagtctcagctcactgcaacctccgcctcccgggttcaagtgattctcctgcctcagcctcctgagtagctggggctacaggtgcgtgccaccayacccagctaatttttgtatctttagtagaggtggggtttcatcatgttggccagtctggtctcgaactcctgacctcaggtgatccgcccacctcggcctcacaaagtgctgggattacaggcatgagccacagygcccggcccactttattttatagcttatgcatgtgacctatcttcttggcttgactgtaagtccctaagaggagggcccacatcttaagccagtgagtgccctctacatagtagctgctcagtaaatgctaatgatcatgattatgcctctggtaaccgagatagcagcactgtttccaaatgattactgtgacaatgtgtgtgtgtgtgtgcatgcctgtgtatggaagagggtagaatcagtctccccctaattgcacactagtggtagtgtgttcttagcacctggcagaatgccttgcacaaggcttattgaaaagggaaataaatcttgattcatgcaatcgtcgaatgctgaaggttttctaggctgtgagctggttctacctcattggtgtgctatggataacattcccatgaattcagatagatagaggaattgccccatttgaaattgaagagcaagactgyaaaaggaggggatgatggaatgcaggacccagccacttagaatacgtggtacatgggggtatatagagcactcaaagtctgagtggggtatcctgacaccagactaggggacaggaggcatccaacccccagcagaggcattgaagaacagacactttctccttcactgttctattgagcacaaatccccacagtttgaagcaatggtatctcaactcttccctaccatccactgttgatgtgatttttccccatagatcctatgttctgttgtcccagcaacaatgtatatttaagtaatgattgattaattttcccattttaattattcaaaggcaagctaattggaaaactctgccagttgagaatagctgatcaatgagataaccagcattagtgtaccaaattataattccactccaaagcaaagaaactcgacattttccttaacctgcaccaccatcgcgttgtcaataaatgcacgatttacattaggctctttgaaatattgaaaatatctcatgtaccctcttcctaccttcacaaatcagtaggcacctgggaaccccaggctgtaaagcagtgaagagggagtgtagtcagttgtacatttaaggattttaactccatccgtacacagagagtgascaaaattggtagcatcatctcatgatctaagagcgtacctaaggagataattgggaggttctcaggagaagtgtggcattgtggaaatcagccaggcctttacagtgtagggacagacacacctctttccctgggtgtccttgggccagccactccctccttgctcatttcctcattggtgagagagggctgggacacctgcctctcagcattggcacattttcccccagccccccaggctatgctgggaatcagcctcacatctttcttggctctcaccctaatgttaaccctccacagtctggccagtcttgactcccaagtgttcctctctctatctgctttgcttctgctgcagttgaggacttcaaaatcactccttggctggaaatagccttcccacgggtctccctgccttctatcttgtgctcccctaatttgtcctgcaactgcagccaccggctcactgctcctctgcataaaaccctttcctggtcctcctgtctaaggaagtgagtgttcctggcctggctcctgaagccccctctgacctggtcccctgcccctctgcaggtttaactcccctcgcttctcacctggtgcctggctcccaggtgctcacagctcctcccacacaccatgcagttcagtgccaatttctttccttctacttgcatgtccttcccccttcatttgggtgagaacttctccaggagcctcttctgcatctcctaggttcttgccccaatgtacctggtaccttccctctctctcatcacttacctggctccccaagggcaggattggtccttcctcakctttagctgagcactcagcattgtgccaggggcactcaacacacttctgttgagtaataggcacgcagttacttgttgaaccaaactgcgttagaagagatgatctataggattttgtgtggcatatgcattgttctttgccgctatgggtatcatcatagagaatttccattaatttctggccgtgtgccactgcaaccagctttcaccctgacttgtcatataacaaaatatcattaaattgaactctagttttttttttttttttttkagacagggtcttactctgttgcccaggctggagtacagtggcacaatcacagctcactgcagcctcaacctccccaggctcggggaattctcccaccccagccccatgagtagctgggastacaagcgagcactaccaccccaggctattttttgtatttttttgtagagacggggtttctccatgttgcccaggctgggaactctggatcttaataaaatatttttttctttagaagtcaggctaggctgggctgtgggttgaagttcatctctgtgctatttatgaaggaagggattgctaaccaaaatcattgtgcaaaggtgacagctcaaccaatttaggaaaataaactactcccgagcacttcggcagcttgctagtttatcaacgatcccttgaaaacgcactaaaaacacttcactctttctgcctttccacactttctataatggcccagggcttaggctttggaatcagatctcctggattcaaactctggctagccttgtgaccttaagcaatagatgtcaggtctccgtgtctcagtttccccatgtgtaaaatagggatactaatagtacctacctcttagcatgttgggaggattacatgagtaagaacataaggtggacttagagcagtgcatggcacagctcagggtcaataaacattagctcttagtgttatctgataactgcacgcttatattcaacaaaaactgcatagacgctgggcagctagatcttggtttttattttgtttatctagttattttgtaaacctcattctgaattctcacctgatccccaggaatgcactgcagtgaaaagtgaggagaggcgtacttcaaacaagtgacctcattttgaataatcctggacttataccactaggtagcttttgaccttgaacaagtaaaattaggttttaaaaatgcgtatcagacttagtaagctgaagtgtcttcgggggtgttggggatggtcaccaatggtgtggtggggacagagccatagtgcggcaggtttagaaatgatggggaaggagggcagatgaaaagaagactgtgggcttttctttgaagaaggtcagagatgtcagccacctctctgggcttgatcacttttccatacggtcaagcggagatagtcattctctccctgtctccttgaaagggagtatgagggtttgtgagcaataamccttacaccaacatatattgctattagtcyattgatggcatctgtttacctctcagttgtaggtgcttcaaaattaaagaaaatctatttcttgaaaagtgcacaataaatcaagctttaaactcaatttgttttccagaaatttttcaaattttcccatgacaaaatttacatttattttctgattttaacagtaagagtaccattctaattttcatckggtctttgcttcattggttgacatttgccttgcccttggacttgagaacttgaagtatcaatgaggcatagcacatcagtaaataagccccgctaagccatactctattctcgcctgttgaccagatcttttgtttcctgctcactctcatccaagcccttacccacatcattttcaatgatggtgtcactgcaaatgtttctttgcaggttcaattctctcctatcataaaacaaacaactgagccagccaactaaccaaccaaccaaccaaccaaccaatcaaccaaccaactcactaaccrcctcttctttgactccaccccaggcaccactccacttatccttctcttcccagcctagtgacttgaaagaggactttgtatttgctcactttctcacctcctatttacccccgacccctgcaataaggtctctgttccattctctactgaaacggctttcttcaaggccaccattaagtctctagtacctaaactgaattaacagtttctaatccttctctttctttggcactttgcaatatttgttgtttgtttgtttgtttgttttgaaataggatcttgctctgtcacccatgctgaagtgcagtggtgcaatcatagctcactgcagcctcaaacttctgacctcaagtgatcctttcacctcagcctctcaagtagctagaactatagacatgtgccaccatgcccagttaatttttaaattttttgtagagtgaggtcttgctatatttcccaggctggtctcaagctcttggcctcaagtgaccctcctacctcagcctcccaagtagctgggactataggtgcatgcaaccatccctggctaattttatgttttacttatttatttatttatttatttatttatttgtaaagacaggattttgctatgttgcccaggctggtcttaaacgcctgagstcaaatgatcctcccacctcggccttccaaagtactgggattacaggcatgagccaccatgcctggccgctttgcaacatttgattctgttaattttgggtatatgtcaaagctgtcagtyacgtaggggtagaaaaaaagttgtgcatcattgattataatgccagggccccattttacagatgtgaatatggaggtccagagaagttatgtgatctgatgtgtattagtcagctactgttgcaataatgctgtgtaacaaaccaccccaagctcattggcaaatgacaatgtttatttttctcatggtctgtatgttcactggagtagctctgttccagtctgacagtggggtttagatctgctccacatgtttgtaatgggacccaggctgaagagaatattagggaagtgctgctcctgacaggtcacagggatgcaagaaatgtaaaatgaaacagtaatatctcttgaggcctcaacctggaagctgctaagataatttctgcccacattctattggctaagcaatccacatgcccaaggttaacattaatggggcagggaagaagactctgtccactgtagygggaggcactgcacagtcatggagcaaggggcattgatgtagaattttgatacagatggggcatgaagcatcaggagcagtgattcactctacctcatgctccaagattacacagctggattctgatctttggcaaaatagaatctaggggccacaagtcacaagacaaaataaaaccataacaaaaaaataaataaatgaacaaaaacttaacgtgaatggacatattaacttttattgtaagtgaaaacagtgactctctgggggaaaaaaaacaacaggccaggcatgatggcttacacctataattcttttgggaggctcactttgggaggctgaggtaggaggatcacttgagcacaggawttctcgagaccagcctgggcaatataggaagtctccgtctctacagaaaatacaacaattagccaggtgcggtgacatgcatctgtggtcccagctactcaagaggctggggtgagaggatcagttgagcccaggatgtggatgttgtagtgagccaagatcgcaccactgcacttccaacagcaaagaccctgttcccccmaaaaaaacacaaaaaacaaaaaacaacaaaaaaaaaacaacccaccaaaaaacagaaacaacagatagtgatgcagaattttcccactgagacactgacatggtgggtcatggtgatcttgcttatgaagtgataacctagcttcaagagtgttgaagcagggtccagagctcagtgtaggggccaggttggtcctgggccgaacctggggaygtacctaggaatttctagccaaataagcaatagagggaagggtctgactgatgacggagcatgagcacactctagraagggcaaagaattgatctgggggatgggatggggcggggccctaagatttcaactccaccctggaaaagcaggacttaggggaggcatgtctgaagttcagaagaccaggggaaacctgaatgcagaaagcgcagcttgttcaccatgtcctgaaatacagcaaccaggggacactcttgtagattgtgagctgtattgcttaggacaaattcattgttctatgctgggcagtaaatttatggatgttgttatgccaagaaaggaatatggctgaaaacataaattgctccagaattgttttaaatattctcatgggtgctggaagtcctctgggttattaaggaaaaaatttgtttatttcttgcccttccggaaaccaccctttggtgctggctagtggctgtcagaagaaagggtgtatccatgtatcacaagggctattacacatcgtgaatttaacttgagttctcaaagataaaaagagacacttgtcttgcctccacgctccttctcgtcctgcacatttgtccactcacctccagtaagttgctctggaatctgaacagggaggtttcttgcaatccagaatcagccacaaaatcccatttccttttttcctataaaaaagatgtgctgactgaaacaactaaaatatagactagttagtgtaataacaataagtagcaaaaacaaaatagaaaaacaaagcacaacatgaaaaaagaagtttttgaattagtgtcttctttcatcaaggtcagtttctctccatctcacatcctctgtgaccctagggtggtgtggaagatccttccccacccacacccacacatggggtattatttgggccttttccagggacttctgtcagttctgatggtctttgcactgggctgagtagtgtcccctcgcccccaaattcatgtccattaaaacctctgaatgtgacctgatttggaaatagggtctttacagcggtaatcaagttaagatgaggtcctactggatgacggtggtccctaatccagtgactggcatccttataagaagagtgaaatttggatgctgagatggacagagggaggacgacatgtagatatagtcacacaggcgagaacactgtgatgaccaaggcggagattagagggatgcatctacaagccaaagaccatggattgccagcaactaccaggagatggacagaggcaaggaaggrgctcccttcgtgtcttcagagggagcatggccctgctgatgtcttgacctcagaattctgaactccagaatgatgagaggataatttctgttgttttaagccacccggtttgtggcaatttgttagagaagccctgggtaactagtctggtctccttgctcccrttggtcttactgagccaaagcatcccattggccttactgagccaaagcatcccattgcatcatgtttgttactgtaaccctcaaatctttttcttgacctaactcttagcaagtttagccactggcctttgatcatctcttagctgcaataatcttcacttgacagacaagccagaggcctggctggaggctcaggcccttcattcagacagctcaggaggcctggactgtggctgggccagttcctgtggccgggctctaagtctcagtttccccatctgtataatgcacacaacagggatgttggtagagattacaggacatgatgtttataaagtgtgtttataattttattttgtgggtcagtacaatgcctgacccatagcaagtgcttaataataaatgttagctattattaaacatacagttttctgaaatctttaaatccatttttatccaccccagggtgaagtttccctgatttttcttttccagtaaaagcatggcagatcctatctactctcttagtgatgcacaatgacatctgggctagtgcctgacacagagtaggcactaaatatatttttatggaataaagaatggamcaactacattgtttcaatatctaatcaaaggaggaaatagcttacagattttatgaggcttagtaaccagcttgatacactcaaggtgaaactttggaaaaggatgtaatttcaccacatttgttcacaatagggcacaggtgatgtggtagacagcctccaagagggccctctggatccttgccctggaattcacacccttgcatagctccctcccccattgtaccagggtcagttagcatgaccagtggaatacagcagaggtgatggtgttatcacttccaagattagattattggagactggggtttccatcttgggctcgctctctcccttggattgcttactttggggaagtcagcagccatgttgagcagccctatagggagaggctcatatggcaaagccagctacagctccataagcaagcatggacaccattctccagcttgaccctgaacccaaagcacctagctgatctgctcgcagactcctgaccctcagaatctgtgagataatgaatgtttgttgtcttcagtcacttaggtctgggggcaatttgtgacacagcagtagataactaatataggtgctgagataggaatggctgggaccaggcagggtcaggactgaggactctaataatggaagggattataagttgcagggagcaggcaagaggccaaacccagaaaagtggtctgttcggaaggtcaggcaggttctgtgggtctccacctgtggctgtgttccagaacccagagaggtgagagccagaagcaaacacactgaggaacaacgggcactgagattcagggctcttggactagaactcttgccttttgactttgtcctgtacaatttccagctagacccacaattgatcattatagctaagagatgatcaaaggtcagtggctaaacttgctaagaattaggtcaagacaaagatctgggggattacaggaacaaacatgatgcaaggggattataaatatttttttgaaactcttaacaatattcttttgttactttgagttacccaagctctttaaactgtctgccaagctcaaaggcaaaattggtatttcccaggccttttggacgggtcatagtgcaatagaaaggtggaaatattgsctgggtttatgaagacataacttcttatccaattggcaaacattttttaaatgcctactcggctgggtacaaaagaacctagaattattctgagcacccactaccagtactcaatgcccctgtgtaccaaccttggctactccaatacacacacacacacacacacacacacacacacacacacacacacacacacacagttggccaaagaagcaacctgtctgctctgcacaagccaggtcttcactttactgaagccccagctgacccctctgggctcaaactttactgaagtgaagacctggtctgtgcagaggagataatgacagatttatctgtccttatttcaagtcttgaagccctgttgacttagtggctaatctgatcaactgatttgaaccctggggatagcgtcctgtaagatggcatctgccttttcacaggggactcagagccctcaacccacagacttgaacaaacaggggcttttcgcatcccccgtcttacagataggttggattctgggcaactggctgctctgcaaatgtaaagtgagaaacagtagggcctggtaatggtgagcacagactccagagccagacagcctgggttcgaatctcagctgtgctactcactagcagtgtgaccttgggccagttacttaatctctctgagcctcagtgttcccatctgcaaaacggagataataataacagcatgttccacacagaatttggggaggagtaaatgagctcatgtgtgggaagcactcagccgggctcctggctcacaggaagcatcctgtaactgtttccttttattacgcaggatccagaggcaggggcagccccagctgacccctctgggctctaatttaactatctgttggggttcaccggaggcagatgtccctctttcaccacaagtctcaggggttctttaaggacttcataaaaacaaaggattaactgcagatgactaagcccacatgatggaaacagaatcaggtacagtaaataatgaacgtagacaggattagattcctacaaayaatacattgtgttctcctgctcttcattggcaatcatccccagtagggaatcagtggaactctttgagtggccaaggaaaacatctccatgtgcccaggatagcctgggtgggctcctggaggaggcaacccttgagcagaaagccgaagagcaatctggcctttgcaaatggagaaagagtggatgcatcagcagagaggagagtgggctgggacaagggtgagagaaggaagcaagcacctaggcccaaaatttaagaaggccctcactctcagggttgtacaagagcaggggtggcacttgtacagccctgagagtgaggacctccttaaattttgtaccctaggtttgttcttgcctctcctttgtcttggccctagagaaaagcctgggaaaaagcccagaacggtgaaacgacatggcgtaactaggaacgtgtgagtcatgcaagattgcccaagcctaatttagggacagagatgacttacagtgaggctagcagtcaagctgtggccggatcaccaaagaccctaggtgccaaataaaggaggttagtgcttgaactgaaagtgacagggagccaaggaagaattctgagcagggctgcaacatgatgagatttgcatatgagcaagcttcttctggcattggtgtggaggactgattggaggatgataggagaagctagaggctgggaggccagttcaggaccctactgaaaactctatgcccaagggagagacgacgacctgatatagggcagtgccagttaggagtaagaatgaagaactcactcaagacatgtgttgaaggcagagttgacagaacttggtgattgactgcagatgaggatcaaaggaaagacccaaagatagcatgaagtttcaaagatggtcatcaatttagaagccaagggggtttattagacaagataacaagcatgtgaaggcagtgatttcagcttccccaagtccaaggtaaacccttagttctcctgttttctgtaggataagctctctggaggctaggatgtatcttattcatttttgtatgatatctactctgtaagtatctttgaactgcattaagtggctttcacacctccgcatcctgctcattggctttcaagtggccttaggggtgttactattgtttgaatgtttgtctyctccaaaaatcatgttgaaatttaatccccgatgtggtagtgttgagaggtgaggcctgtaagaggtgactgggtcatgagggcaaagctatcataaatggactctgtgcagagtccccaccagcaagaaggccctcaccagatgcaactccttaaccttggacttctcagcttccataactgtaagaaataaattctttttctttataaattatctaggttcaggtattgtgttataagcaacagaaaacaaactaagacaggtatcaaagtccttttaaagatggctgtgtagctgggatcagaccaacacagcaatgtgttcaaactcccattctaaacacacagaacctggggctctgacttggccccacggtcttgagttgaagcctgaagtgtgactggatgtcaggcgtgggctgccctggggctttgggaagtagtgaaagggataaggtgaaggtcaagcagagtgggggatgtcaggaggctggggaggcttgggctgccaggtgaagtgggcctcatgaaagacaatttgagatcagaatgtcagacagagagcaggctagaaggcagctggcttctgagctgcagcctagaaaggctgattcagcagtgctaggaggaagtgggaggttttgtcgtcccagaagccatatctggagcaaggggaagtactaagaccacagggtagcatttggagccatacactgggactaacttcctctgacctaggcaacgacagactgcccctgtggtcaaccagagcccccagatccttttctgtgagctacaatgaagccaggcctcattcttcttgaacttgagaagtttagaaaatatctgctttgccttcactagcctccattttcataaaaataaagcgagtgaaaaaagcaagtctgagcgctttgaaacattaattaaagacaccacagtttccttatttaactgagggttgctacctcatctgggattattagcaaagcagagagcctttgttgtgctcgacaaagtgattaattcagactcgaggtgaattttggctttctcaacttcttttgatgtgctaagatcccccaatgaggacaacgtcatcaattacttaagccattaccttgagatcacaattatcggggaggcccagtctactaattggcagacagagagacagaaatggactacagggttgtggcttcaacccttaattgttctagggggagcgagagtcctttaaaatgttttgtggcaatgctcctgctaatctggggtgatcgagttgtttttccaccaggcaaaatgcagcctgggtgacctgcgtctctagaaccaagaaactgcctgtgattccactgacttggcgttctcatgggccaggacacagaactcagaactgagggatgagtgtgtcaatggaagagggatgaggttcataaaattggaaaggagagctttatttctcataaagggttgcggccttcgggtggccattccgacaggctaggaagatattttgatggaggggaaaagggaatgggaatttatgcagagcagggaggccaaatatacatattcaataagctatgggaggagtcatgaatatttatgaaaggagaaacatgtgcatgcgcaattgagcgtcatgcgccttcatgggtcccatgtagaaaaaatggcagccttagcataatctgagggtggagttttcgagcctctgacttcaaaaagtgaagcaaaggacaggaaaaccctcactgagcatcctccatacaatggccagaatcactccataatcggtggtctcgtatcaggcaaaagaaaggggcagcatcaggtggcaggttgatgtcagcggtggaggcttttaacatcagacgctttcagggcgttatggcgtcaacaccaatggaggctttgaaaaggccgctttctatttagcccttaggggagaaagcataatcatggctagtgagggaggggtagaaggagtgtgtctgactccccatcccatcatggccaagaactcagttttcaagtttactctggggaccccttggccaagagatggtccattcagtcagttgggggcttaggattttatttttagtttacaagttctagaagcaaacatcctactcaagaggcaaattctccagcccctggaagctgtctttgggcttccgtgggatgctacatctgggcttactgtcccctgacacataaggaattcaaggaccagatacaagaggctgctttttacattttaaaatatataatcatataatattctgtttaaatagatttatctttgttcatttaactaagccattactctttttttttctctccatcctataaaagagtttttgggggaaggttttatgctgcatggatatatgtcattggtttttctggtgaaaggtggaggaactttgtctggttaaatttagtcaaataaccaatacttaaacaaacaaaagccacccctgaagtgtttcataaatatcagtcacttcaagagttttatgatgtacgtcagttgctttgttctgttttcacaatagaaacacacgttgtgtgtgttttcggatggtggcactactgtttgctgtaccttcatcattcttctttaattctcactgggacagaagggcaagacactttcccagggtcagaatcctgggattggctggctggattttcttttcttcttaatttttttttttttttttaagagacagggtctctctctgtcacccaagctggagtgcagtggcttgatcatagcttactgcagcctctaattcctgggctcaagtgatcctcctgcctcagcctcccaagtaggtgggtctacaggcacacaccaccacacctggcaatttttaaaaattttttttgtagaggtggggtcttgctatgttgcccaggctggtctcgaactcttggcctcaagcaattctcctgccttggccccccaaaacactgggattatgggtgtgagctaccacgcctggccttgggctgaattttcttgggggtgggatgggcattttaaagcactcttgagaaagtagaacacactccattttaaggcagtttctttgcagtgcttcttcgtacacatcaacccyatgctcactctgccccatggcctccaggtgacccatctgttccaaggcagcagcctttccagtgccttcacctgctatggtgccacaacatggctctcgtttattgtgccagctttgacacctctgttctcagtttaatgatttttctggggatgggtccttcttggagggtcctgctttgtttttgtttttttccagattaactttgggggacataataagtggagaccatttatcgttttttaaggctcaacaaatatccaatagtcagacagaagagtgatcaaaatagaaagcatgtatttaaactgggactgacaggtgacaggggatgcctcwtagccacaatgatcataatgtaaatgcttaattaactgtttgtcagtagccattgaatgtctgtctggtccactaggctgtaagtgccacagagcaagggcatgtaggcatggtccctgcagcatcctggtacccggaactcagcactcccccagcaccatgcttggtatctgctctctggccatggttttgaactatcagctgagcccaagcaaccttgcagaccacattttgaytatgtcttcctcggaccatccttgagagtcaygtcttcttggcagtgtcccatagactgtgaatggtgagtgagatcactttagaaggtacacggactttaaaaawctttcattataaagcatttatttattttttaatttttaattttaattttttattttgagaaggagttttgctctcgttgcccaggctggagtgcaatggcgtgatcttggctcaccacaacctccccctcctgggttcaagtgactcacctgcctcagcctcctgagtagctgggattacaggcatgcgccagaattaaccatgcccggttaattttgtatttttaatagaggtggagtttctccatgttggtcaggctggtctcaaactcccaacctcaggtgatccgcctgcctctgcctcccaaagtgctgggattacaggcgtgagccaccgtgcccggcccaaagcattcattttttatcgttagttttttttttttttttttttgagacggagtctcactctgtcaccccaggctggctggagtgcagtggcatgatctctgttcactgcaagctccgcctcccgggttcacaccattcttctgccttagcctcccaagtagctgggactacaggcrcccaccaacacacctggctaattttttgtatttttagtagagacagggtttcactgtgttagccaggatggtctcaatcttcttacctcgtgatccgcccacctcagcctcctaaagtgctgggattacaggcataagccaccgtgcctggcctatcattagtttttaatttatgtaagtgatactgattttcacttatgatcacgacataaaatttccttttaaaatgaattcatttcaatttatctaaaagaaattgggaaataagtaaatgtacaggcaacttgcagatatggccaaaattataaaggggctatacaaataactgaatttagaagattaaggccttaatactcgttgagacttactgactcaactggctttcttgccctgaaaagttaggataaaaatggagaagttagttaactctctgaattacaataaccatcaactagatacctttttaaaagaattgtaatactttctttataaaacgttatctttggccaggcatggtggctsacacctgtaatcccagcactttgggaggccgaggtgggtggatcacttgaggttaggagttcgagaccagcctggccaacatggtaaaaccctacctctactaaaaatacaaaaattagctgagcacaatagtgcacgcctgtagtcctagctatccgggaggctgaggcatgaggcttgaacctgggaggtggaggttgcagtgaactgagattgtgccactgcactccagcctggacaacagaggaagactctgtctcaaaaacaacaacaacaaaactaaagaatatgtattcttggctgtttcagtggtagggctaccaaagcctggttcagtgctgcccaaggcagaggctgggtactgggtgagctctcggctggccttcccccaccccaccccctgcaactgtaccatgtactgttcagttctgtagaaacaggaagctcagggtaactcacagtccccaccccagacacttcttcttttcaggcacacttcaaaataaaatcaggatctacatacactataagttggygtggtagctgaatattggccccctaaaatgtcgatgtcctagcctctggaacttgtgaatgcaaccttagatggcagaactgattttgaagatgtgattaagttgaagatcatgaaaggggttaagtattctggattgtttgggtgggccctaaatgtaatcatgaggtccttataaaaaggacacaggagttgtcagagcgagagaaggcagtgtgaggactggaagcagaactggaaggttatgaccatgacccagggagacaagaaggggacaccccctgccatctccagaaggaaccagccctgtggacaccctgcctgtaaaccagtgaggttgattttggacttctggcctccagagctgtcagagaataaatttgtgttgttttaaatccctcagcttgtggctacttgttataacaaaaatagaaaattaatacagttgggaaatataagtttacctaaaaatattccttcgcagccgggggcggtggctcatgcctgtaatcccggcactttgggaggctgaggtgggcggatcacctgaggtcaggagttcgagaccagcctggttaatatggtgaaaccccgtctctactaaaaacacaaaaaatagctgggcgtggtggcacatgcctgtaatcccagctacttgggaggctgaggcaggagaattgcttgagcccgggaggcgaaggttgcagtgagctgagatcatgccattgtactccagcctgggcaacaagagtgaaactctgtctcaaaaaaaaaaaaaaaaattcttcacttctgacaggattctgcatttgatctattatgtaagacacttactatacatatagacagggtctcgctctgttgcccaggctggagtgcagtggtgcgatcatagctcactgtaaccttgaactccagggctcaagcagtcctcctgcctcagtctcccaagtagttagtactacaggcatgcaccaccacacctggctaatttttttttctttttagaattttttttttttttttttggatctcactttgttgcccaggctggtctgaactcctgacctcaagtgatccttgacctcctttgccttggcctcccaaagtgctaggattacaggagcgagccactgtgcctggcctgtttaaaataattctaatggcaaaggattcaattaacaagtctcaaaatggatgtaagttttgcacaggtattcacatggctgaagtaccaaacatggtatcatgaattaagtgcgtaacatctgacaacggtaacacatgctatttttgtattattgtgaactcatggattcaaaatatatttgatgtgttttggtccattgcaattattattttatggagcaaattgtccatgtatcagtcttgctggcctgaagtcaaggtgtcaggcaggctggttccttctgggggatccaggggaatattggtttcttgcctccttggttcacggttgctttactttaatctctgcttccaggcatcacgttgcccaaagtaaatgaggtggggatgtataatcctccaactgggagggacagtcatgtcttaacccattatgcaatctactgtgtctcaagtgtttctgacttgagaagttggtggattgtggttgcaatggtgatgtagagatgattgggagacaacagatttagtgggtaaattaaaatcagatttagattaactgtaaaatgcctaacagacattcaaagcatccatcaagttggaagttgggtaaggaggactggagctcagtggagaaaatggaactagagttaaagatgtggaattattgacttttagatggtattgaagtgatgggactcaacataaggaaaggagccagcaaagacagtgaggagcaatctttgaggcaggaggagtggtatcatggaaagagggaagagagtgcttcaggaaggaggaatgttcatctctatcaaaatcctactgaaggatcagtaaagaaataatgggattgataagatcaaagtcatcaatgatcttgacaagggcagccccaaggaagctgtgggtacagaagcttagttggagtggggggaggagagactaagggcacagaaggggaggaagccatctagacaatgctttcaaggaaacttactgggaaggaatgaagaaaaataaggcaatggccaaatccaaggagtttgccttttttcctttaagatggaagacactggaatatgtatgctgataggaatgatccagtagaaatggagaaatcaatgcaacaggaaggaacaataattgagaataatgagtaaggacaaggagcaaaactaacaagattggctttagataggtaaagaatccctctgtctctctctttctcatcacaatcatcagttcattagtatatgttattaatacacttttggtttctaagcagcctgcctttgttctcagcatattgtctacatgttctcatgttgtgctttatccacaaagtcttagcctaggggacagaaagggacagtaagtagggttagtgaataacggcacttgtctgaaatgtagctgacctggttttaactctgactcaattgcttagcagcaccttgggtacattatttacctctctaagcttttatttcctaatcagtaatataagaatggtatttatttctatccttatgtgattgttggagggcttgtacaagacagtatataaaaagtactaagcatagtgcctgagacacaggaaactaaaaactattgtaaattataataatagtaatgattgtgtaactcttgtatgtcaatatacatgtwtaatatatttttcttgtgcagtgacaaagttattgtcaggctaatgactgcartgactatgtctttgtggtacctacattattggtgaaagaactgaacaccagccagatatttatgtatttattgagtagtcttctattttttttccagaggggtaaagattataagcggttccttaggcaacaaattataatggctgtcattcactaaatcttgtatatagggtgggacagaattgaaaaaacaataggaaggtcttgtaactccaacatatctgttctcctgaggtttgcatgtgtacatcttatagcacattgatattcagaagtttcctattggaatgcaactatcagacaataaaaccactacattaaaaatgtacagaatgcagataaagaactacttagaggaagatttatagctttaaatgcgttcattgaaaacatgtgaactaaactaataacttaagaagttaaaagaaaacaacaaggaacaaagtctcaacccaaagaaaatagaaggaagtccataatcaaaatatgagcataaatcaatgaactagaaaacaacaaaaatcagaaatgatcaacaaagaaaaagttggtgctttcaaaagataaataaaatagataaacccatagcacgactaatcaagaacaacttttccaggcaagctaggagtagaaggaaatatcttcaacccaataaaggatatctatgaaaactctaaagcaaaacctcacacttaattttgaaacattagctgcattcctgcagaatcaagaacaagaaaaggatgcttactctttctgcttcctttttgtactagagattttagccaatgtaataagaaaagaaaatgagaagtcagacaaaaggattaaaaagaaagagaatggactgatattatttgcataaaacataattatcagcataggaaatcaaagaaattccacatgtaaaccaataaaactaattagaaagtccagaaggatcattgattacaacgctggcattaaaaaaaaaaaaaggtgctcctatacatgagcaacaccaaaacaaatgtacgtaaatagcaaaaagatactcttctctgcacaaaatcataaaatgttactgaaggacagagaaaataaaatcaacagagagatacaacacattcatatatgagacaaattgatgttgtaataatgttggtatgttctaaattaatgtatacatttaatgcaattccagaaaaatccaaatagcattttctcatcaaatcagactaattctaaaattaatatgaaaaagtaagttataaaaatgtattatatggtaaaaggaatttgagtaagaaaaaaagacaaaaaagagaataaaaagaagtaatatataaaaaagagaaaaaaacaaagagtgtgatttagagttataataattaaaatagtgaagcataagctagacaaatggatcagaatagatccaagcacctatactactgaggagcatgatagaagtgacattatgaatcagtgggaaaaagggagcagtgcagcaggcacaacatccctttgctaaccccttggagggatgtaatcagctgtgggacaggattattttaccagggtcccactgagataccgattctgttgagccacctctcattgtagaatctggctcaacacaccctctgatgattgatttggcttctcaagtacctggaaaggaggtactctaggaaggagatgtccgattcttattgcttggaaaaaaaatactcactattataaatttgtaaatgaacagtctcgtttgcaggttgtattttagggcatagcctagttactactgatacgtgagtgagtgtgcatcagatgatttccagccctgagggcaaactgagattgaggtcttaagggaatggagagggggctgaacatgaggatgaggatgccagggtggacactaggtgctaaaagggaaaccgagaagatctcacgtgtaaaatctgtattgcaccatttccccaccaacccttcaggaacatctgccttgaggcgtgatttaagcagtttcaatccttacagtttctcttgtgggtgtgggtgagaaatgggacaaggataaagggaatggaatttacagtcaactaacaaggctgtggttagttattagctaagtcaatgaaaactattcagatttatctgcttatcttcctcttcacacccagatatgtgcgtggagtcagcttgcagtacctatcaatgactgctcattttccaactaatttttaaatcagttagtggagcacaattctgcctgccacctagataaaccatactgtgggaatgagggggagggaggaagaagaaggaggaggaggaggaggaagaggaggaggaggaagaggaggaggaggaagaggaggaggaggaagaggaggaggaggaagaggaggaggaggaagaggaggaggaggaagaggaggaggaggaggaagaggaggaggaggaggaagaggaggaggaggaagaggaggaggaagggagggagggaaggaagaaggaagggaggaaggaaggaaggaaagaaggaaggaagggagggagggagggaggggggaaaggaagaaggaaggagggagggaggaaggaaggagggagggagggaaggaggaaggagggagggaggaaggaaggaaagagggagggaaggaagggaagaagggaagaaagttagttaataatgtcaaaaattgggaaatatttttgagaatgaagaagaaatgataggaaaatgtgttttctctctctagtaagaaaatagatgcagacatcaaaatacattgatgtagcttacaaattagaaaaaagttttatgagagcatttggtgcaaaggatataccaacggtaggactagctgggacaaactttatggaaagcaattagatattacataccagtgtttaaaaccagtgactcatggatctcaggttaagaaaatcttcatgcacaaagtgtgggaaaacctctgcgcagaaatgctaactgtagcagcataactcaaagtagctaaaatatagaaaacacgctaagtatttgacaataagaatggtttagtaaattataatatgtatataagagcactattaagcagccataaaaatgatatttataaaggattaataacatggagatgtttttccttatgttaaatgaaaaaagtagaaatctggataaatagaagtagagaaataagccaggcacagtggctcttgcctgtaatcatggcactttgggaggctgaggcaggcagatcgcttgagcccaggagtttgagaccagcctgggcaacatagtgagaccctgtttctaaaaaaaaaaaaaaaaaaaattagccacctgtggttgcgcacacctgtagtcccagctacttcggaggctgaggtgagaggatcacttgagcctgagaggtagaggctacggtgagctgaaatcacaccactgcactccagcttgggcaacagagtgagaatgctaaaaaaaagaaaaagaagaaaaagtagagacataggaaaaatatagagagagaatgtaatagcaaacatataaaaaatacacagtgaaaaaaaccaagagaatgacaatataaagagagtaggctttctccctgatagttctagcttttgtgcccaaatttctgtgaagcacttcaaaatgtgtcttggaaagccagcaaacctcacaccctgcttccatttcttaacaaaacgttttgaaaaggcaattatttaaggatctgtttctaataaagcttccgatgtggccatgatgtttaatggaattgctggcaaagcccatgagggcatgcgtgttgaaaccatagagtaaccatggcaaagggcctctcttctccaatgtgcaggacactgggttacctggcaccgctgggcttcacctgttcttggagcatcacaagtttttacccctggagaagcgctatttgccaagggaatctttcaccatttcaaatacatccactgaagtttttgaaagcagtgcaccaagtaggaattctttggtagtgacagtgaggatgtaatgaccgagcggaggggccggctggacccttctcctgcacaccacaggagaagccaattcctggaggtagataatttctgttttcttttgttccaaacctcagtcagtttgaccatctccttaatatgtgattcatcaaaataccaatttatcagaagtggcttctttggctaaacaatgggctaagcacccatgttgaatccatcaagagaaggttttaggctgggcacggtggttcacacactttggaatccccacactttggaaggccaaggcaggcggatcgcctgaggtcaggagttcaagaccagcctggccaacagggtgaaaccccgtctctactaaaatacaaaaattagcctggcgtggtgggcgcctgtaatcctggctactcaggaggctgaggcaggagaatcgcttgagcccaggaagaggaggttgcagtgaactgagattgtgccactgcactccagcctgggtgacagagtgagactctgcctcgaaaataaataataaataaataaataaataaataaataaataaagagaaagccttgaggaagataaaatacaggaaattttccagcctttacaaattgaacctgattttgagaatgatccagtggcccgatttattttgagaatggacagtaaattgtaccgctggcacagcagtatttgtgtcctgtagcgtttaatgacctcgttggttgtgaaaataaaaccgaaagatgctgtctaaagctatatatactttctgttgtcgttttccaacttaagtatccttgatgtaaacaatgacaggtgtccataaccataattgtgggaaacatttgcattaattcacatcaaaggaaacccattgtaaacatcagaacatggtgatcgtctgatcattgcgtattacctgctttacacagtagcatccctggcctcctgcacttttttaaatggcacaggacttaataacacaatttgacataaaaggattttttttacaatgacaatttttaaagttacagcaagatatttaaaaacaacttttcattgaccctgtaagactcactcataagtatccctagtgtaccacttaacctagggctgccatatcaaagtactacaaacttgagtggctggaaactccagaatttatttatttatttatttatttatttattcattttttgagacggggttttgctctgttgcccaggctggagtgtactggtacaaaagtagctcattgtagcctcaaactcctgagctcaagtgatcctcccatcccagccttccaagtagctgggactataggtgtgtgccaccacacctggctaatattttttttttttttttttttttgagacagggtcttgcttcatcatcccagctggagcgcagtggcacaatcttggctcactgcaacttccacctcctgggttcaagcgattctcgtgccttagcctcccgagtagttgggattacaagcctgcctggttaccttttgtatttttttttttagtagagatgaggttttgccatgttggccaggctgatctcaaactcctgacctcaagtgatctgcctgccttggctccccgaagtgctgggattacaggcacgagccaccacgaccaggctcacccggctaatttttttacactttgtagaggtgagggtcttgctgtgttgcccaggctggtctcaaactcctgggctcaaataattgtcctaccttggccttccaaagtgctaggtttataggcatgagccaccacacccagaccaccagaaatttattgtgtcacagttctgggccaggagcctgaaattgaggtgtctgcagggctatgttccctatgaaatctgtaggggagaatccttccttgcctcttcctagcttctagtggttggctgactatctttgacataccttggcttgcagtggcctgacaccaatctctgctttcatagtcactcggcactttcctgtgaatctctgtcttcacatggccatcttctcataaggacaccagtcatattggattgaggggcccctgtacttcagtatgactttatttatttatttttttgagacagagtctcactctgtcacccaggctggagtgcagtggtacaatcttggctcactgcaacctcctcctcccaggttcaagagattctcttatcttagcctcccgatttgctaggattacaggcatgcaacactacccctggctatttttttgcatttttagtagagatggggtttcaccatatgggctaggctggtcttgagctcctggcctcaagtgatctgcctgcctcagcctcccaaagtgctgggattacaggcatcagcagccgtgcctggcctatatgacttcatcttaactaattacatttgcagtgaccctatttccaagtcacattctgagattaggacttctggaggttaggacttcaacttatctttttggtggtgatacaattcaacccattacaactggggttcattgattttgggttaagaacgtgttgagacagtcagagggcagcaaggggaccctgagaccagagggtatgaaacaagagtgcagagaaggaagtggtagggagacaaatggaacccatgttgctattttgcccataaatttggtggcaatgatctctccctgcagatttgggtgcaggaacttgagttactgatggcaatatttggccagtttccagctgaagatgctcaagttccagatttgagtcgaggctacaaatgctcaagttccagatttgagtcgaggctgcaaagggaagtttgtggtggtgtccaggacactctgctgatgccatgtgtttgaaaatgtctgaattttgtgcatagacacactagcagtattttcataagtggagttacataattagggcatggacttgcataataattagcatgtgtaattaggcacagacttcttgtcctttagacaatcaagacatctaattacaaaattaagatgtaattatgtggtccaaggtctacatctttttttctacccattagagattacttttagaaaataattcaaaaaagctgatgaagaaatgaacatagacacgaatttgaggatgttaaagaaagtgttaagtgggctggtaagtttcctttggtctttcctctctgttgtaaggggaattatttaaaacattatggtccacttgaaagaataacttttaccaactgtgctgtcaaccttcggtactcacactaatgaagaggagtgttggtatgactaatccttggcgttcacgtgtggctcttgagtgtggtttgtaatcacacttgaacatggacctaaatgtgacgtactgggaattcattcaaacctattaatggagccatacggtggaaatcttaggataacttgggatagaggacatcctgccttcccgttctgccctggttctcccttgtgaccactttaaaaatcgactcatttggccaggtgtggtggcttatgcctttaatcccagcactttgggaggccaaggcaggaggaycgcttgaggccaggagttaagaccaacctggacaatatagggagaccctgtctctacaaagaatctgaaatactagttgggagtggtggcacatacctgtagtcccagctacttgggaagctgaggcaggagaatcacttgagcccaggagttttaggctgcagtgagcctccactgcactccagcctgggtgacagaaataaataaagaaataaatagcacattgctcagaataatgcaaaccagcacttaagctgtgtttcctttccctgaatatttgagtatttttattttaagtactccttattgactgcaggtgggaaagatcaaagagtatagcaaatactctgtcctttgaaaaagagtgattcttatagcagtaatagtttgagtttcaatacacacagaaagctagattgtactgatagtctccatgtttttccttgcccttaaattgtgatttggctgatctctgcgtgatgctwaacaaccagtttgactcattaattttgctgaactaactgaacttttgacctaattggctgctggttagggatcagagccatatgtgcaggtttttctaagccagttctgactttagctgtgttatccctctgttcctataaactgttgaaataccatagtaattccaatgttttgacagccacactgcacttctcagactgccgctttctcctgggaagtggcacagaaatctgtcggaccacgcttcctgatttttggttaagaaaatatgcttcccatatggttgcgggccgagaaaacaaagacttaaagaggttgtaagcatttggtgataggtcttctcctcatggcgccttccctccgttcctatttttactattctctgtaaggccagggaatgtgatgagggacaaattatgtgtgtggcagggaggggttagtcttgaccatgaaaatacacacatttgcacagggagcttttgccattgttagtttttttaccttgccttctgagcaattgctcgtgatagatttagaggcaaaggaaaggaattggagagagtggcatttttaaaacaatctattaagaggaattctaggtcagagaggggcagttggactacatcatctgtaaggcatctccagctcagaggtttcaggattcgttgatctccagcaggtcactcaacaggaggttgactggactcctattctactcactcaactctaggcctccaattttttggttcttagatgtggtgactggaaacctattcttttgcctttacttccagagagctcagtaattctagttcctaatagagcctaaagcatgagtgcaacttcatttctcagcttttgaaatctgcttttccctccaggtactccacatcagcattctcaagactggagaagttaggcctcagacatcccaagccttctcctttcattggaaacttgacatttttccrccaggtaagggctgtcttccattggcttccatcataaaatatgctgagggccaggcacagtggctcatggctgtaatcccagcactttgggaggccgaagcgtgtggatcacctgaggtcaggagttcgagaccagcctgaccaacatggtgaaaccccgtctctactaaatacaaaaaattagctgggcatggtggctcatgcctgtaatcccagctacttgggaggctgaggcaggagaatcacttgaacccaggaggtggaggttgcactgagccgagattgcaccattgcactttagcctgggcaacaagagcaaaaatctgtctcaaaaaataaaataaaatgaaataaaataaagtaaaatatgctgagcccaggacaggctttctgcatgaaacattggtcttgtccaggtccccacaccttgagcagtaaaggtgttctgtgatgccatgagccctcctctacttatatgaattgttatgtgatggcaagaatccatctcttatcactatcaatatgtattgagtcctgtcatccattcactcacccatttcccccaaaccccatatattgtatgtctaaatacgtcagaccctagagtgtagaagaagaggttacttgtgccctcaagtgcactgtcaaatgatggcatgcaacaccagatgagatacaccctagcactaaatagggtggtatagacggtagctgtaatcttctgtcagaggagagggtgatctgtcagggctaaaatcatcctaaggaacttcctgaagaaggaggtccttcagggcctgtggacatagagacgagggtacacacaccaggtgggtggcactatttatgtgagtgtaccaacgtgagaatgwcagcacaggttgaccagcagcctggactgactagaggccaaatgctaaggtgcactgggcaatgcagttgggtgagagaaaggggcactagatgcttacagggtaggaaggcacgtgaagaactatttgtgtgttaacatttttgaggacagggacattgaaatggacaacactctgcaagggagaagaacataggttagagctgtagaacccaactgttgctgaagtccaggggtgaagccacgatggctcggtctggtcggtgatgagagtgaatagagatggataattgggagcaaaatgaagaactcttgtgacaaattagtgtagagaattcaaggcaaagtgagtcaaacataagcctaagctttgagccaggggaacagggagaatggctatgggttgacagaaataaaacgttgggtgggggagtggttcagggagaagacaagttttattttaagtatgttgcttgggatttgccagagtgacatgccagtggaaatggccaacagacatttgtagatataggtcaggactttatggtctacggttattttttctcacattgggttttctcagaagccagatggcttattctgctaagtcacggggacactgactccagacccaacgccaggagccggaacaccctgcatgggaagaaccaccaagccaaacaaaggcaggaagactaaatttgggacaatcctgataatatcccttcaacatctctagaatttcccccatccctacctccggaaaggctggcccttggcactagatagaaaagaaagctgctctttctgtccttttctgcccccaccttctcaattatttcttttccattcctttctgtgtccatcaccttttccatgatttgtcattgttgtttctgtcttcctagcatttttaaacaccttctcctctcatctctctctctggggtgggcggttcacaacttttaagctcacaaacaacagtctcaatgaggcttcctgttagccccttgaaacaagtgtgaagaaattttaaagtgtcaagatagaacaacaaaccagatcggaaagctaaagaaaatgcatttcacacatttctggggggaaatgatcagttgtattccgtggaataattaatttggtattaacattctgaggaaaacggcgtagctgtcgacatgaggagaacgctgtgctcccgcctctggagagcctccacatatgctcctttgcagcccgccatcctcacagctacaagccctgccaagttctttctagaacatagtaatttcgctgactatttttatattcatatatactttccttgatatatggcaagcttacgctgcagaattcagtagatttcatgagaaaggcatgtgtttccatgcaggacatccacactcctaacccccaactttccaccttcattccaccccttatgtatccaccccatactccattctcacaacacaaatctaccatttgccaccccccacacccaccccaactcatgagtattttcaggtctagtccattcccaccacacaatggatctagcattttccacccctccgtcaacccagctacacttctttcccattataaaatgtgtctagccaggcacagtggctcatacctgtaatcccagcactttgggaggccaaggcaggcagatgacctgaggtcaggagttccagaccagcctggccaacatggtgaaatcctgtctttattaaaaatacaaaaattagctgggtgtggtggcacatgcctgtaatcccagctactcaggaggctgagacaggagaatcgcttgaatccgggaggtggaggttgcaacgagctgagatcacaccactgcactccagcctgggtggcagagcaaaactctgtctcgaaaaaacaaacaaaacaacaacaacaacaaagtgtctagcattttgtcttatatatcttaaacatgttgaatttaattaaagtttaactcgaatggatcatgataattcagaatttgtgataattttgatagactcagtagaagttacatatagtggcagtaaaaagggctatatgataatgctaaatcaaatttcagagggcaatgttatagttgagaaagcaaactttttgaatattttagcagcaagtatacataagtagtttaagaactggtgatctctcctgtccaagacttttacatggcaattttttttaaagccttttgtttattccaatgtttcaaagtacctgaaagcaatataacttccattcttttttattgtttctgtaattgtattcttgctgttccaaattgtttactgaataagtttgaataattggaattttgcttaatcttattcttactatagtgctgtgtttccttcagggtttttgggaaagccaaatggagctcagaaagctgtatggacctctgtgtgggtaagaaggaaactcaacgtttctattatgtacgatattttctattatgtacgatattttgattttcacgtgttgaactgatatagaagaaatgccaagattaggaatgttgtatgtgtttctatttttcaaagggcccacaaagagggagtcctgcagtacagacaaggcttctagagaagaccctggggttgcccacggggggactctgctggcctgaaagagtaccactttccagcctttgcagccttgctgggctgggcacagcatcatctcccgttgctgtgctgaggggtgttgccacgggatgtggtggcctctttgcctcagagcacaaactgtccaacttgccttgacagtgcacagcaggtcttaccccatgagcatatctgaaccttactcagactcgggtccttcagcccatggggaaagtgtgctgccagcaacatgaccgtgtaatttatcacccaatccagttcccttttgaaagtgaaaggaagtgctattaataattaccccaggataaccttatcacctaagactatcccggatatgctggggcatatggtcaccctagttcttggccgtgtaaagtaatatagcccttctctttattttctgaatttctcctttgtatgctcctttgtttctaaaattccagattctggtgagcaaacccacgttcagaccacttactctattcaagatttaacaggcttgaattgtattgattctcaacatgtgtctttccacactgaagtcctaatcattttagttggttttcacgcagcttctcttcagccactgagcgatttttttgcagcttttcgtagacctctgggtcagcgatcacttttgtaggtgcattaaagttctcctgtgttgccgacgtacattccaatgggctccagtgatttgggggtcctatctccatagtattcatgatgtctgttctcctgatacccatttttgaaagggattggcttgtcctctttatggaaatggcccctcctaggaagcccacagttttggtcaagttcttctacctactttttggtttgctacgtggtcctgaaaaagtaataaattaagatgttaagatgctctctgtattagtcattgctgcataatggactaccccaaaactcagtgacataagcaacaatttatgatttatcatgtgtctaagggtcagctggagttggctggcctaagctgcacttggctggatggctccgctggacttctgggtgtatctgctggggaggacctcatgtggggcaccaaggctctgcatgtctctcatcctctttggaagtgtaagctcggctggcaggttctcatggtaagggcaaagactcaagagagcaagcctgatggtgcaagaacattatacatttctgctgaatcatttcagcttataccctattggttaaaccaagtcacacggctaaacccaagatgtgggcaggagggcactgtggccactttgaggccaaagcaagacacctggcccagcctgacattgatggagcagggaggtgtactcctcggatggacgagcggggaggcaaggcgtgtctttaaataacaagcaaccctgcttcactccctaagatctctttcaacttggccttcacttactttttcatttttgctttttggtgcatagcttcttgctttaagcgtgataggtgctcgataaaggctcaagaaattgaactgtctacatttctcttaccgttgtgtggttctattgctttttgtttttgttttttgttgttgttgttgtttgtttgttttgcaatagagtcttgctctgtcgcccaggctggagtgcagtggcatgatctcagctcactgcaacctctgcctcctgagctcaagcgatgctcctgcctcagcctcctgggcagctgggattacaggcgcccgccaccatgcctggctaatttttgtattcttagtagagacgggattttgccatgttagccaggctagtctcaaactcctgacctcaagtgatccacccatcttggcctcccaaagtgctgggattacaagtatgagccactgcacccagtctattgctttttttttttttttttttgagacggagtctcgctctgtcgcccaggctggagtgcagtggcgcgatctcggctcaccagtctattgctttttaaaggttctcattccagctctttctttcaaacagtctcattctgcagctgagttggcaatgacttggagactgtctcatatgcctctgagacacagcactgactcagaatgacagtgccttcaccagaatcagaaaaagtcctgactgagtttgaattctaggaaccacttttcttgagtgtttcttgtacagatatccaaagtagagcctttgggtatttaaaaataatttgtaaatgccaaattaagagtttaaagggcactgtatgaactagttgtgtgtgtgtragagagagagagagagagagaaggagagagagagagagaatgacagagaaaaagagagagagagaaaaggagagagaaagagacagagaaagagatagaaagagatagagaagatagaagagggggagagagagagagagaggagagagagaggtggagcgaattggtttccttgacaacaggatatccaatcaactttttcctccaactttaactgagttaacacaatttatccttttcatttcaagaaaacctaaatcatagagaatgatttcaaatgaggttatagagatcaagattgcagtatcatctccattctttgttcccacttctagtgaaaaggaaaaaagaaaggtgatggcataatttcttcctataaagctatcaacttttctcctttggaaaaaaaaagatgagccataaaacactgacttctttttaaatgtgtctactcccagatttagaggcaatatggtggcggtgtaaaaatgaaagggttgaaccaatctaaatcgaatgtcttttctaactctaaatgttattttcttactgcttaaattttagcaacatagtttcactcattgggaatggactatgctcaatgaacagcaaagacccttcttgcagagaacaatttaatttaaattacattagtttttattttattttttattttacttttattactaggaaatataatcaatcccagcttggtcttcttaaaaattgaaataatagattgattcattatttgacaagtgaaatgccacactctacactgttgatgccgtgtagagatgtattgggcctttagatgacagcttggcactgaatgttgggagaaaaatggacagggcaaatctcctcactgctcgagactggaaagccaactatgatggcaatgtatatttattatctggttgtcaccctagcaattcaagagtttgaggctcaaaactggaaattgactccttactcaattcccctcccactccctaccatggggacaatagggctggagaaggtttccatcaagatgggcagacaacatcaatgtttatcattaccaccaacactgccaccaccaccaccatcaccaccaccatcatcgagaacaaaatatcttcaccaagtgtctacttatgtagcctgctttgccaggttctgtgtaaataaaactacacacggtgtctctgccttctttgaacttgaatgtaaagcaggaggactggcgtggatacctatacagctattagtcgtggtggtacgtgataaaaaactctcctgaattgcacagcaacctggccatgtaacacaaagaaggcaaggctttattgctttagataaccttcatcaattaatgattacttgttatctccttcaggctgagaatgagccccaagttggatttatattccttcccaaactctgtaagaacagaatcaacattatcgtcatacattggtgattgaatatggtttatattcaatatataccaatattgaatataaatatatattgatatatattcaatatatcctgtttggatagagattatatcccctccaatttgtagctggactttgtaacccagtagatgataaacctttattaattacttatagttaagtaagaataaatatttacacagtgccctaagttcaggtcattagcaactcctaaaggccgccattcaaagctccttttccctttatctcattttgtgtgtgtgtgtgtgtgtgtgtgtgtgtgtgtgtgtgtgtgtgttttgttttgttttgccttttgaggcagagtcttgctctgtcatgcaggctggagtgcagtggcacgatctcagctcatggcaacctccacctccgaggttcaagtgattctctggtgcctcagccaaccaagttgctgggaatacaggcatgtgccatcacgcccagcaaatttttgtatttttggtaaagacggggcttcaacatgtcggccaggctggtctcaactcctgacctcaagtgatccaactccctcggcctgccaaaatgtgggaattacaggcgtgagtcaccatatccagcctatctcattgtcttttaaatgcttgctctatagttctgcttttacttagccttatccccgtttcttcttcccccaacatcactttagttttgatcttggctccctcttgttgaacttgacttttacacttcctggcatccatcagctatgccgctccattttggtaagtggcacctgcatccctggatcccttcatgatgccagccttgttgcataacctcatatactcccatcagagcatcaagttgtaggtaggtaagcatgaactttgtacataattcataaagtacaaatgagtataagaaaaaagtacacttgctcccaccctggggcccatctgctccttcacagaggcaacctctcttaaaaatttctttatagtcaaatggatcatatatgatacatgctgttctttaccttgctttgttcattaatggtatttgggaaattgtcccattttgcttcattcattcttgttaaattaggtagtgtttttaaggatttccttgtatgaatgtatcctaatttttaaaacaagttctcaattgataaacatctcttacttttacaaacaccatcgcagtgaagattttcatatacacatcattgatgtctggggtaagtatgcaagataaattcctagaaatggaattattaggtcaaagatggtctatgtttttaatttcgataaatatgactaaatttctctttctagggtttatgtcagtttagattcccataaatatgcatatgtccctcccatacttgtcattaaaatgtgtggtcacaattttaaatctttaccatttgatggtatattgctgcagtttcgatgtgcatttctctaattatgagcaagtttgagcatcttttcatatgtttaaaatgcaatgtattttgttttctgagggatcctttgccacttctctgttgggttattgatcttttcccactttatttgtagaagctctttgcatattaaagaaagtagccttttatatgccttaaatagtttctcctctttatcattgtctttgactttgcttatcatatatttcttccaatcagaaaacatttgtttttgtgttgttgactttaattgattttaacagtgtctacattttgcatcttactcagaaaggttttctccaccaaggatattttttcataaactttcatttttctagtttctttaaattttatttttaaaatatagaatgtttgatatatcaggaatttatttggaagatggagttagggacacacccttttycccccccyccaggagggtagagttccatctggaaattcatccttttccaaatgatttgaaatgtcacttttatcatttattaattcctaggtgtatttctgatttctctattctgttgtactgcttaatcacaagccagggctgcactgaatatcctcgtttggatgtcacgtttgtagcttcttgtacctagctgcagtagggtgttctaagaacatctttgtaagtatcaaagcctgaagcaatctatctcccagggaaccttaggtcccatactgaaaaaaaaaatcaatttagcaaataaataagcctttggtataaagggcctgacacttagcttcaaagttcacaccacaggagggggaggtgtctcatatgcctccaagttggaggtttttagcaccatttttaaaatttaattagctagcatgcatgaactaatagcaccttgtcaccaggcagtgaggaagttgagaactttgggatacataaggaaaagcatgtggcatcagcaatcaaaataacaaggtcgtttcaacactttttaaagctcagcttccatggtgccatccattaggagagtctgtgttctggaagtgactaaggtgtgaacacttttygtgtaattgctcttaaccatcatgtttatgtactatttagatggggttgaagaacagcatagagatggtttactttaatactggcagatggctatgtgagacttcctggcctaccatcatggatcaagaacaacgggaattgaagggctctgaaagactcacctgttggacatgtttgttctttgacttagaagatatgagacatctgaatacactgggcttgaacatgtggctgaggatagggtagggtggaaactattgctgatttgtccaagaaaagacaagtacttagacttaaattgggcagctgacacctggagatggcacttgtttttaaactggactgagctcagtagaatcatagatgttgaagaaaggtggaaattaagccaccgttgtggaagagcttcccagacactgatgctaaggagtcaaactttaggtttttgctgctgataaaagtgcaagcctcagtatgaggctcatttactaaatgtttgacccaaaaatgtggctcaattctaagaggaattgatgaaaatgaaaatatacatagtatattgagaaaacacaatacccttgaaacagtggaattaagcacagaagtcctgaattattctaacatctctggccatgaggccaaactgtgggcaatatttgggtcccctagcttggtgaaagctggctttcatgaaagcgttgaaagcaaagctgtgcattgccgttcccaataatgtgaatctgaaagcaaaattcatgtgagaccatcatgatggtctgtaggtcataattattgagcatcattcagtgagtgaaatatcaatattctcactggtcaaaatagcttaatcatgaacactaagcctgtaagagcaccttttttaaatgattggaattcactaaactgcattattgcattttaggggggccattattctctaaaagtgaatgccctgacatagtgtgctgatgttttaggaggcctttgagaataggaagaaagttgtccacaggacaactatcaccaagccaagcacactgcccagtaggtggaattatcaaaggaacaattgtccacagataaataagtggcttagaccaaagagacagaggaatttgatttgagtcccacttttcttgaatgaaccattaatagactcttcacccttacctgccaccagcatgatctcgttataccaaatagtgtattgctacaaagcttccatgctttcttatgatttaagaccaccttctttcccagtcttgatccaaagacccttctgaagtttacctaattttctggacttctaacttcttctttcagcccatttattttataccagttcatttccccccatcctctttctataacagcatatgggtgatggttgctgcatattttaatgactactgctatctaagtctttgtgacccaccctcataaagatcaagaacctgtattaattccctcttctttgggtagaarcatccaacagggcatgatagcttacagtagaaatctgcagttaaaatcccagcttcaactttctttctctctactgcttgttaccttaatggatttaggccaatcacttcccctctccagctttagttctcttagatgtaaaatgtgggatttggactaggtcggtgattttgacactgtttaatcatgaacctcagtaaataatatattaaccacattgttatctaatacacacacatacatttgaaataaaagttttacagaagaacaccttattcacagtataagaaccactttgatctattctattgtattgtattctatctgtaaaaaataaaacatttacaagttggtcacagcccattaaattgatttcatgaccactagtgagtcaaaatcagcaatttgagaagcaaagggccagatgatatctgaagtcctttccagttgtaaactggatgactacaarccaatgagacagcccctatcagtgtgcatcagaaaattgttagaggccattgtgtttgcctctttgtggtttaagattctgagaaacctctgtcaaagtcagtaaaagcccaccgttcacagctgaaaccgaactccagtggaagcacttctcctgcagagaccagctcccgcacctgactgtgggcccaggctgggcacctcccacccagtagcaccttcttgttytttaaaatcacaagttcaactattattgaaattatttccaagccttaactcggaatcatgctaagaagctaacacaaatatattaattgaccatttaagacatctctctgtaagatttttgcattgggtgtaaatatctaagtaattcatgtggatatcttctcccaggtaggtgtggccagctgattacttattcccagggagytggagcagcaggaaggaatggcctggaaactggaaataatcccatttgccggggtaagctagctgtggaaaactgaccaggctgtgggtaccgagagagcagcttcctgctaaacttcctgctgtgggtgaagggcagcgtttaaagagtaagatggtgctccccattccagcaaacactggccacagtggacagtccaggagagagctgtgcaccaggaaggtgtcagctggacagtagtcargcgtccagtaaagcagcgatgaggaggctgtcagtggacaccagggccccactagtgggtggttcaggaacctgagaagcccccggccctgagaaaggagtctaggtagtacagcagggtctcagcggtgagggctctgaggatgaaccaggaattgacattcagttctaagattcacagcatcatgtgaggcccaggaccagaagccagacctaatctccgatatcagtcagggtggacaggtccatcatggttggaacagatccatgctggagaggcaccgagtctcaygatgtgtggctggaggttgttcctgcttctggggccagggctgggcctgcagatgagggacagagcacctggctagaaaggagagaggactgcagcggctggagcgtcagccacagatttttaattttgctttccttgatattcacatccaaaatctaccatggagaactgtatatcacgttcaaggtggaagggaactaactcattcctcattagtaactatcaaatatggcatcagtaccttctttatcctgtaagtgacagctctgcacagatgtgttcccaatcgatagaatgtctcaattaaagttgcataaaagctctattttgagctaatatcttcaaataataaattccacatttaattgaagcgtacctgcaacaaatccaagttgttcaacccaaaatgcataatagagtatgtaaaacagtcatgaatcactgtgacatttgtcaaggcattctcccatctggaagcaggtccagaaagcacatggctgtatgcatatatcttttgtcaagaactttgcacagacagtctcaaaaagtgcacacatttacccaattcttagggctcttcactctgattgagaatgcaaatagcattcctattctatctaaaaagaagaaagacaagccatctttgatttcaaaatttaaaagaaattattactaaatttgaagaagcaatgagttcccaattcacttagagcttaaagttcctctttcatcactattttgtgagcagaggaactttttccaaacaagttcttagaaatccttgcttgattaaaaaccagttctaaatcttgttactcacatagggcaaaaggtaaaggaatctaaatgtctaaaaccaaattaactccagatactagtgtgaactttcaagcaaaaaaagtcacacaccaccgcatacacstttgaaattctactaaattttgaatgtttgacgttagcctttaaactggaacatattcttctttcttccttaggatctttaaatcttttaaagtttgggttgtttactatgcattctaattactcctgatcactcttatgtgtaacatttctatagctatgcacacaaagtaattccttagcaaggccccaccaagttttatgatgcctgcttgcctagggcagataatataaacttaactacgaaaataagttctttgattattcttcgtatctcaagaccgtgctcctaacaacctctcctccatctcaccctcaagctgcaagaattttgcaacccactctatgaagtttttccaccctgagtaaggctgtcagtttattggcctatttataaaggtctgactctctgacatgttctccaggctccccacattaaccactaaggaggcactctttgcagatgaatttttttttttttttttttttttttggcctcggcttaaagaggaacctattaacctttgcccggaatctatgsctggtgaatggcttgtcatagcatgttagtttgatgaggcaattgtggtcttttttgttaaaacaccccccagcacctcttgatactacttggcctactggagatgtgggcatccaggattgaatcaaaactactgcacttcacaacagagctactgcaggaaggaaatccaggtactccctggcttgtgccacctccatcttttccgtggctaatgtaatgcctagtgcatattcaccacaaagaggcaactgttgaatggctcttccatttgcctttgaagattgcttgtaactcttcaagttcacttcttcatctcactgccagaccacagcttgagactgatgattgacatkgccactaggttcttcccaaagactccagcctaaagattgttagctgcttcccccaaaggcttagccttctctgctagagttttggttctttggagcatcccatgagcaagaagcctcagctctttgtcctcctctgtgtaggagcccacaaggatgctttatctccaatctggaatggacacttagcatcctkagttctgccctgctcaaaatccatacctgttcatgagtaccagggcttcagggcccgagaacccacagctaacacccataggagaaaggtttcatatgagtaggtgggatgggttttcatgcctctacaacctggccagcaggaggaacactgtgacccatggtttcagaattgatggtctcccacttctcggttagatctaggtattgagaataacctgaaggacatttggctggaggacattatttttattgtgttaaaatatgcatcacacaaaatgtactctcctatttttcattgtatagatcagttgcattaagtaccttcacattgtcgtgcagctatcatcatcgttcacatccagaatttttttcatcttgcaaagctgaaactttgtcctcattaaacattaactctcccttccctcctcccccaggccctgacaaccaccattttaccttctgtctctacaaatttgactactctaagtacctcaataaagtggaatcatatggtatttttccttttgtaactggtttatttcacttaatataatatcctcaaggttaatccatgttgtagcacatgggagaactactgcctttttaaggctgagtaatattccattgtaagcctattctgccttttgtttattcgtttgtttgtagatggcggagtgtgttacttccagcattgagctamtgtgaataatgttacttgaatatggatgtggaaatacctctttgagaccctgcttttagttcttttgggtatatatgcagaggtggaattgccagatcacagagtaaatctatttttagctctttgaagaccgtcatactgttttccatagtgaccataccatttcacctttggaggacatcttatagcaatgctttgttgtccccttttcaccacgattatgtggccattacttcttgttttcaaaccttgagagtgagctcaggttaaatttacacttccctttgtgccctggatcccaactggtcaaggtgaaccacacatttctaattggaatgtatgaccccagtgactttgcctgtaacttccttttggctaggccagtaagcgcatttttaaccaaaccgaccccattatcaacaaatgcttgcactgcacgataaattcagtttgctttaataaattcccagtagtcctcacccagagctccttctcctcttatctcactccttgctgccaaaccctttacaatttatgtgtctgcctttcggttctgccttcagccccctccaagtttcctctttcccaccagctcactgtggcctttgtgtctcacataaattttgtcttctgtgtctgaaactcttactgacttctgcttccttgytccctgggtctacactgttccttctcttcctggaactgacccttcgatctctgggcttcctaccttgagtaatttgtcaaaatcctgttcttgcaattggtggcttctcaatttttttcctctgggtttttttcccacagtctttccactatatcacagggcatacactcctgcttcatgactgttcatgacatattgaattcccctcttgtaccccacagtctctgcactgagtgtgtgctcattgggaaaggttagctcacattatacctatccaaaaaaggagaggtggcaggtggcctgtggagaagagtgtatccaggcacatatgcatgggagaaagttcagaggttttggctgagatagaaagaagaagagtagaggccaaatgtgtgctaggaaaatgtgatgtttggggcacaagtagagaggacaaccttggcagtggcagaygagagagaacctcaggactggtgctaaggaggtgggttatttaaagaaagttgtgcaggtatagagtggagaaggggtgcagggggaggatggaattgagttaaaaaaaaaaactagcaaaaaacattctgatagcacaggtgagagagataagagtgatttagattatcagaaatggaaggaaaagaaggagaattttatagagaaagtgtcctgtagtggccgggtgtggtgactcgtgcctgtaattctagcacattgggaggccgaggtggggagattgcttgagcccaggagtttgagacagcctgggcaatatagtgaaaccacatctctacaaaaaataccaaaattagctgggtgtggtggcatgtgcgcctgttgtcccaagtactttggaggctgagataggaggatcgcttgagccaggaaggcagaggctgcagtgagctgagatcatgtcactgtaatcctgtcgaaaaaaaaggaaaaaaaaaaaagaaaagaaaatgtcctaaaaatgcagcaagtcattgattgtaacaagtaagagatgagtcaacattaatcactgaggctgacttcaaatgctggagacaacatggtgattccaccataattaagaggttgaacagggcaaagacaaaatagttttatctttttcttaatccgttggagcttgtcctcatcctcatgtgttcaagctgttataacaaagtgccatagactgggtggcttatgaataacagaaatttatttctcatagttgtggggactgggaagtccaagatcaaggaaccaacagattcattgtctggtgagggctcactttctggttcatagatggtgccttctcactgcaccctcccgtggtggaagaggtgaaagagctccctagggcctcctttataagagcactaatcctgttcaagagggctctgccctcatgacccatttgtcccccaaagaccccaccttctaatactgtcatctgggggtttaagatttcaacatatgaatytgttggggggatggatacaaacattcagaccatggcagagctgctaaggagacattgggtgcaaggtgacttaggaatgaagcactcagaggatcaggaagctgcattaggaaggagagaggaatgggagctccagggtaggcctgraatccggaatctccacctcccaccctccaacaatcgaatggggtgtttcccgcagtgtgtccttgagaccatcgtttccactgacagtaataattgttacatggggaatagcaaaaggaacacaggtctcttcagtgtagaaagactccgaacctttcatgcagcaatgtccttcgacaatctccaagtgagaaatttaggatgcagtctcttttttttttttttttttttttgagacagagtctcgttttgtcgcccaggctggagtgctgtggcgcgatctccgctcactgcaagctccgccttccgggttcacaccattctcctgcctcagcctcccgagtagctgggactacaggcgcccgccactgcgcccggctaattttttgtatttttaggagagacggggtttcaccttgttagccaggatggtctcgatctcctgacctcgtgatccacccgcctcggcctcccaaagtgctgggattacaggcgtgagccaccgcgcccggccaggatgcagtctttatttgaccacagaacatttttccccccagagtatttcttgggactaggatatggagaacaggctttgagagaaaacactgatctaataaataccagcattttactcctaaagaattccccataaaagacaaccattaatagaaatagtttacttcaccattgtgaattatcaacattacaaccagtaattactaattacctccattttgagttgatgttttgggggatgtttttatcctgcagtgctatggagaggctgggaacgcactgctgcctgtgttgcttgtttatttatttccttttattcccagtgttctctcattccccttcccatccccaawagtcaaccattccaattgtgtttaatgtgtttttttttcacatgttcttgcaaaytgtgcattatcatttcgtggatattatccttagtttatgccaatagtactgccgtagatctcattctattccttagttttttcatttagcactgtgctttcaaggtccagcacagagttcccattgagtctgctgcttcccatggctgcctgacatgccacggatgcctgtacctacttcacctgtccactgtcccaggaggagatacccagtggccctcagcaagcaaccctgcagtgggcatccttttatgggacctctacggacctgtgggagaactctatgggctatccatcttgccctatgattataatatatatatatttatttatttatatatatatatttgttccctaaggccacttacatattaattgctaataatctgaaagtgttttccagcactcagtgtggatcatgtccctccaatatagtatctcccatggccatcccaataacatccctgagagtttggccgggctagttgcattatcctcaatcatacagaaacatgagtgactagaatgaaaagggcgtgtggctagtaagaggtgtgagcagagttgcacaggttctttttattaatccaaagctctttccattccactgcctcttcttgctgtttcttcaacattccaaacagtcctgccttaggacgtttgccataacaatacgtaacataattatttgttggttgacctgctttcctggtagaatgcaaacttcacgagggtagggacttgctctcttgtttgtgctgctatttccagtgcctagaatggtgactgacacataatagatgctcagtaaatatctgttgcgtgaacagaagaatcatctctaagtacatgtctttcatgtcagatttgtctccaaggaaacttcaaacaggaaggtcttgctatttggctaatttgggtaatggtactattttactggagacaaataaaaggaattagggggagagtctcatattaaaatagagggttggataaggggagtttatamtctttccccatcagtggcttttatgctctatcaattcagtagttagcccatcaaagtaaaaaattgaattacactgtgtaaggccaccttgggatccaaaagataaaagagaagataagggacatgttytcctgatacactagctgggctccactcacccaagtcattaattggagtcttattgggctactgcctcatatcctactcccgaagagytgatacctcccataacctcattcttagggtcagctggccgtaccagaaagagcactggattaggagccagatctgggttctggtcttagctcagctatccctactgatgggactagaatgaatgagtcatttatcattttcttccctttaaaaaatacttgaggccaggctcagtggctcaccgctgtaatcccagcactttgggaggccgaggcgggtggatcatgaggtcaggmgttcgagaccagcctgaccaacatggcgaaaccccgtctgtactaaaaaaatacaaaaattagcctagtatggtgccgcgcacctgtaatcccagctactcaggaggctgaggcaggagaatagcttgaacctgggaggcggaggttgcagtgagctgagatcatgccactgcactccagcctgggcgacagagtgagactctgtctcagaaacaaaacaaacaacaacaacaacaacaaaacaaaacaaacaaaaaaacttgagcacctacctatctcacaggtctgacatgagactcaaaggagctctcagagccctcccagggcagactgtccaagtatcagggattccaacygggattccactgctccttggtgttcttgtagccagcctgcatcttggggagtctgccgaattcagaagccccatacctcaccagctcggggtgagcttcttgagtcctgcacatgggtcctctcaccctcatgtctccagggactcctccgcctgggtaaggggagacagcacacatcatccagtcctctcccctctttgggcctcattttcctagctatgaaatgagggggttgggctagaatgatcatcttgaagcttccctccatctctaaagtattatgatcagtgctttattattttttccctgcctctgatttctctcccactgtgtctgaaattcttttgccattaaattttctcttctttcagagttgcatatctgggctttttatacctagtcctggacagcacattcttcccatggcactgggcttcctcccctggcctcactgtcttttcaggagtgacattagctttttcccagaccgtgtattcctgttctaagcccacacatcatttggggagagatgattttgccatgtactctcacaaatatatgtcctgcacatattctatggaatagacacacacacacacacacacacacacacacacacacacacacacagctcccttcaatacccccgaatatacatgcctgggcataacgtgtgggcaaaaatattcagggacagccaaatgactattttaatgttcctttgtccctgcagggccatcgaactatttatttagtagcttgatgctgtttgcatcaacaactttgccttataggctgttcttcatgtttatgattcttactgtgaaaaaaattgcttgcctaacatctgttctgaatttgttttttctttatttttatttatctgttccccattgaattacatttgcaccaagaacagtaacttgaattgtaatcttcagtgtccttcaggatttctgcacacttcaatacatctcttaattactctttttttattgttatgagatatacatatatacccatgctcacactggcagattggtttgtagcttacctctgcctgtccccctctggggactaagttttattaactgaataaattagatgggtgggtatattcaatagagtagggaggtttawcattacaggtttctttcagatatttttcccccttgctgcccagttctctcctttagccatagctctgttttggagaaagctttattgtagcttgacagagtcataactcaccaggatgagaaggaccacttcatcttatagatgaagaagctgagggccaggggggaggctatcttcctgcctgcttccagaaagcgtggagaatagctgccccagcgccattcttgagaggtagagcacagcttgaccctgcctctccaggctgccaagcctgggggctttccttagcagcaggaggcctcctgggactaccgtgccaccacccacgcaccacaccattgctgcagacccagtcctttgcagagcaagcattttgcatgttttccatgggtgtggctgggttggggtggttagvaaagtgtgcagaagatggtgtgggagaagggcagggcatggagaatcacagtggggtctcttcatgcttgtggactctcctggtggagctggttctctggcctccctcaggctggctcgtgtgactggagccctcattaaccccctgctctcaccacttagaaaccaacccagggaccaaccaagcatattcccagcagtaggcaagaagatccctaaagaagggaagtgagacctgcgtttwttcccctgatacttgggaaatctagcagatatagagacagtgacccaggtatccaagggattggtccaaattcaccatcctgtaactcgaaatgcaatgctctttctaccatcggttctccattctttctggaaggtgtgtcccccttcttccttttgccctttcccacactctttgggggtctatgtccatgtcttccaatggcacaaagtcagaggggatggtttccccatgtcttgaagtgctcactgctggccctgctccagatgttgtccactcaacagacatttcagtctttgctacrtgtacagcatggagctcatggcagtgggagagactacccatcccctccagaaaatgtatcattcatgtctcttttcccaaagaaagctgacatctaatttaggagaaaaacccagacatgggccaagttgctcaagaatgccaggtagtatagtggctgacttctacaagagaaggacaggacacccagaaagaaacccagaagaacaggaaacccagaaagaacaggaaacaggattctgggtagaatcatggaccagtgaaggcagagaaggcttctaggaggaagtaggtcttgaagaatgaataagggggaggtgagggcaaagaatgttccactcagtaaaaacagccagagaaaagcccttgaggtgggaatggttgggggaatggaagttgtggctggagagagggacacagatggattggccagtcatcatcacacactggaaagccttcgttgccaggcgaagacatgtttgttatccttttgttacccttgctaatggcctgtaagctgcttaaagccatgtcttgcaggtcagtttctagagatggggtttgaggggcaagatgtttactagggatcagtgaagggaaggaggagaaagctgtcagtcatcccccagtaggacaaaatgccacctctctgtgttcctactcagcccggccactggatgtgggctttaccaggaagggggtgaccccagtgacatggatctcagcagctgaggctggccctgaaggagctaacagctggaggctccctgctgaccacagtctcggctgctggacagcaagtccttcccagaagggggatctggacgacatgtcttgatgtcatcacatcatgggaactctagttcaaatgaagtttttggcagaatcaccaggttgaagtgggaggtgatctgagggttctgtatgctsagcttccccacagaggactctttgccccgctagacctgagactggctggggccagccacaaaggcagscccatggctgatggagccaacagggcacctctgcagggggcacctctccagggtggtaggagtgaaatagagcaggccccaagttttagaaaatgaccaggggctgggtgaattttggaagcaagataaatgtggataaagagaaaaaaggattctgaggtttcaagtctggcttcagagttgaaasctccttctgccaggaggagtaatagggaagccaagaggataaaatgatttcccagtcctggaaaggcagcttaaaaccatccttccacttgctcttaagggtgaggcgctctgctagcttctcagggatgcacggacagataagatgggctttgtcttgagagaacttgcagagcgatcaggagcttatcaataaacagagggtgatgcaggtcagtagaggaaaggaccaggtgccacagaaactacaaggagcgaagggtccatgaagccttcacaaagaggggcaggtgacccgactgtctgaagttttccaaactaacaagagggcagccggcactttagagggtaaatacttgcaaagaggcagagcagggggaatactgcacatctggggaaccataaataactttttcacagcaagaatgaaaggctgtggttcccaaactgtgtgctgagacaccccagggtgccacagtgaactcacaggggcttcctgggctatggtattttacacattcgtgacaaatacagcaacatctgtcaggcactgtaggaactgctttcagtttatgtgtattatttcttcaaatgtccactaacttgctagaacatgtatacttataaagttgtttgaacttatctacttagaaatgagactgtggggttcttcttttggcctggggagcgctacgaagacattactgagtcactaagggcaccgtgaactgagaacgtttggaaacacaggtataagaggaatggggtgaggagagaagtcaggagctcctgaagggcccctgcttggttacaagtgaagaagcttaaacttgcttcaaatgatggagaaccactagagatttatagggaatagaacgacacagtcagcttctgttttacaaaggtgattggccttggcgggagggttggtttggagacagagagcttcactgggagctcctcagtggtccaggcgagagagacagggcctgaagccagttggcattagacgttggagctggaatacagcacactgygttgacatcatggaattcccactgcatgcttaacaccataatgaacactagacatcaaagataagaagacaagatgtgtttccaccactcacaracgagcagaaagacagtcaggaaaaaaattacaattactagagaaccactaggagtcaaccaggcaagaaaagaggagccgttccaggcraggcagggggaacagcatgtgcaaaggcatgggagtgagagatcatggagggtttcagtcggtatgatcaggattggctcttggcggtggggtggggagggggaccgggggcaggcaggcggggggaatarggwggcacaaggccaaagaacaaggcagggagcagggtgtgaaggacatcatgtgccacatgctaaagacttggcaaaccattgaagggtgttcagtaaagaagcagcatactcagatttgcactttaccaagtcctaggtggataagtggagttggggcccacatgtggacaagcagcaggtcagaatgatggagacagaaacctctgagtgggaggtccaaagtctggccaggaagaggaccagggattgtaccagcctgaaaagggcaaaagaaagttgctgaacaggctctacaaactcctgaaaggggaggggctgagaaagcgctggttcggtccattgatctctgcagggctctgtgaattcagggtggaccccaggcatgagtactctgagggtaacatgggcagatgttgcctgaccctgctcagagtgacagacaggagccctgggaaagcaactccagactccatggcctatgactgtgtcactggctcctcaagaaaactctccctggtagctgagtctgctctgtcattcagctgactcaagcctcttgctctaatgacagacgggagagctgacccaaaagggaaagacactccatgagccaagcagggacagagccccaggactctggggaccctgctttctccatggcaccctgtggaccatccagccccggaggagcgcctgtgagtcraatgcccaggtactcccagcactggacttctccttaactttctctgaactttctggaagttgagcatctcagacactcacaactgtgatctgcagtagcgtctacccctttcctcactgagcctcctgccgcttccacatggacattccatggcaaaggtcagacttgagggtaggacagcagctaccctgttagcatcctcagcctgctgggaaataaaactgtcacggagacaagaagttctcagatgcttggcatttagcagttgtcagaggagctgaaagccctcatcagttctacctgaaaatcagaagtttcccaacgtgcatggcttttttttttttttttttttttttttttttttgagacagagtcttgctcttgtcacccaggctggaaagcaatggcgcaatttttgtacttttagtagagacggggtttcgccatgttggccaggctggtctcaaaatcctgacctcaggtgatccgcaagtgctgggattacaggcrtgagccactacgcccggcctgtgcatgcstttctgttccttctgctgatgtggggggtgttgggctcctgtcaggggcctcctgatgccccgttggggcacttcctcgctcagcttcctcgtccctgacaaagtggcagcagcagggtgtggcccatggaaggtgaccatgaccagcattttcattaaactttactgttcggacaaactattctcatctgacctcataacggtctctttaatcataggaacagtttcaagaaggttgatttgctcaaggtgatacagctgttaaattacaggacaaagccttgagcccaagttcctaagactctctgacacctgcaactgtggcactgccagccgccactctgcctctgacagtctcgggggaccaatccagtgacaaattctccctctcctttttttttttcattgcagaagtcacatgcgctcattataaaacactgaacgttcaaggaatagataagatgaaaaggacagtgccccataatttcctgctccagatctatgccctgtaagccaggggtctgacacagagtatgtgctcaataaatgctttctgaagggactagttaatagaaagaccgactataatttattaacagagctccccatactattttacaatgtgcttttccatttggctgggtcatttggacattttttcatgtcggtgcctgtaggtgaccccctgcccaccaccaccaggaacagtctatagctcggtcacccctaacaggggcaggccttctggaacaaggccaggcagcccccaggctaatcccaacagtctattctacttaagttcccagaaggcggctgtgaactattttggtttaactgactggtcagtttcaaaaaagagagaaaaccactaattaaacaagtcaaacaagtggttatttttgtctacacaatacttcactgatttgcctacattttctcttcaaccaggtgctttggagttgaataagtgaattcttaattgcatagctaaatgtagatgaataactggttaagaatttcttgcccggaaaggagtctatatgtaagtttggattagagtgaaccaaggccttacctctttaattgggctgggggttttctggtccattaagcaagaatatgctctaaatctccacctttgaaagccacagtctgcacagctgggagcctgcctgctttcccttgcacacctacccagcactggagcgggttcaaagacaggccacccgagctaagagcagtcactggaatagatgacagcatgctcaccaccaaggacctgggctggggtcaagtccctgtcttgggcaagtgactttgcctctctaagtctcagtttcttattctgaaaagtggataaaataatgtcctcatccattttctatgagaattacatgaggaaatacaggcaatgcacttagaatgaagcctggtcaatagtaaaccctcaaaataaatgctaacgattgttgttaatctcaaaggtttgagaagaatctacaacctctgcaaatatttcactagtatgagaagtttctttgcaccctataggaagtagacctaaaattcaaacaccccatactttaatttcctttcaaatttgtaggaattataggatttacagttccagtaaactacagagataacttagttttcactcccatatttcagccatggcccagagagtttcagaaatttgcgcctggaacggatttctgtgtgagtggtatggctggatgaacccggatcccacctgctaagctgttgcatattaatctccaggacccatgccacctcagggagcaggaagacactgcctcacattcacacctttgtgcaataccaagatcaggcccttctagggaagtaagctttgagaggcagaatggcactgggaattcacaaggttgagaagaaaaaggggcaccatactagttaggacttcctgatttcaaattatgggaaacccaacacaaactaactttagcacaaactaactaatgtaagctaggaggatggaatgaagagctgcaggaggaaagtttggactctatattgtgctttgtaggcagtctgtctatctgaaatctctgctggtctctattagctccttctgcagaccggctctctccatgtggtacaaaaatggctgccatcagccctagattaatatattctcagtttagcagctccaggagaaagtcagagcttttcaccccagcatccatgtagaaatcccaatgaaggatccataccggcctggagtgggtcatgtgtccaccccttggaccagtcactgttgccaaggagatgagatactaggattggccatgcctgggtggtgagcccaccaccatgaccagaggggcagggttctatcactgagagctccttcagaactgcatggaatgcgagggtggttcctcaagatgtagtgggcagacaaaagcaggtgagccatcccagacacccaaaacgaaagctatgtgtgcctaggacacacttcccttacattttttctccattcaaggtcttttcaggagctcctcaaactacagatgagagtttttgtaaatataaattcacaagattacacaatttacatgtaaaatgggaccagttttctcacgagattcataaaccagctctgaagcaattctaaaggaattgttgcaaaattgtttttagcattagcaatattactacaaaaaaaaaaaaaaaagaagcaggaagactcccaaggtgactacttggaaggacaactttcatttgaaagtagaagtattattttgttcctttaaaaaaatctagattatgcgtaagattattatgataactaaatcaatacaaatatattaccaaaagttgcgtgtgccctacagtgtaattgctttccttttagatctaagaatttagggaaatgagaatgggtgtgaactttggttaaatatagagcaggttttcacccaatcagattgggtccacaatctgtcaatcacatcaggatcccctgggagcttgttaaaataggaggtgcttgggtcccaccccagagactctggtctggtaggtctgggtagggccaggcattattatttctgaatgctccgcagttggttttgacaagccctcgaggctggaaaccatggccctaggacagcatttctcagagtatggaaagagtcctcttgcatcagaatctgagagctggttaaaatcagattcctgggccctacccaggcctgctagattagtcttggtagggagcttggctgtgaatttagagtttattaagctccccagtgactttttaaaaatttttaattttgaaataattatagatggacaggaagttgaaaaaaatatgtatggggaagtcctatgttcccattacccagcttcccccaatggtaacctcttgcgtgactatagtacgttatcaaaaccaggagaatgaccctggtatgacccacagtgcttatcatattttttccaggtttatatgcactcgtgtgtgtgtgtgtgtgtgtagttctatgcagttttatcacctttgtagatctgtgtaacccccaccacagccaagataaagactatcctatgaccataagctctctagaactacccctgtatagccacatgcacccatcaccacccccatccctaacccctggcaaccactaatgtgttctccatctctataattttatttcaagaatgttatgtaaacagaatcatacagcatgtaatctaatgatatttgttttttcagtcacaaaattcccttgagattcatccaaatttgtgcatgtaacaatagcttgttcttttttaaattgctgcatagtattccgttgtatagatgtactacagtttgtttacccatctacccaatgaagaacatttgaattgttttcagtttttgcctattacaaacaaagctgctgtaaacattcatgtacatgtgttctgtgaatgtaagttttcacgtctctgggacagatgttcaagagtgcaattgctgggtcatagcataagtatgtggttagttttataagaaatcgccaaagcggctttatggttttaccttcacatcagcaacttataaatgatccactttctccacatgtttgccagcctttgatgttatcactattcttttaaaattttagcctttctgatagatgtgaaatgatatctcattgtggttttaatttgaacttcaccaatggctaataatgttaaacatcttttcatgtgtttacttggcatctgtatatcctctgtagtgaaatgtctgttcatgtcttttgcccattttctattttatttttccataagttattgggggtacaggtagtatttggttacatgagtaagttctttagtggtgatttctgagattttggtgcacccatcacctgagcagtacacactgcaccatatttgtgtcttttatccctcaccctcctcccactctccccaacccccaagtccccaaagtccattgtatcattcgtatgcctttgtgtcctcatagcttagttcccacatatcagtgagaacataggatgtttggtttcccattcctgagttgcttcactcagaataatactctccagtctcatccaagtcactgcaaatgctgttatgtcattccttttaatggcagcatagtattccaccatacatatataccacagtttctttatccactcattgactgatggacatttgggttggttccatgattttgcaatcgtgagttgtgctgctatgaacatgccatgcaagtatcttttttgaataatgacttcttttcctctgggtagatacccagtagtgggattgctggatcaaatggtagttctacttttagttctttaaggaaactccacactgttttccatactggctgtactagtttacagtcccaccagcagggtagaagtgctccctgatcactgcatccacgccaacatctactgtttttttaattattattttttgattatagccatttttgcaggagtaaggttgtatcacattgcagttttgatcggcatttccctgatcatcagtgatgctgagcattttttcatttgtttattggccatttgtgtatcttcttttgagaattgtctattcaggtccttagcccactttttgatgggattgtttgtttttttcttactgatttttttgagttcattgtagattctggatattagtcctttgtcagatatatagattgtgaagattttctcctactctgcgggttgtctgttgactctgttgactgttccttttaccgtacaaaagctctttactttaattaggtcccagctatttatctttgtttttgttgcatttgcttttgggttcttggtcacgaaatccttgtctaaaccaatgtctagaaaggtttttctaatattatcttctagaatttttatagtttcaggtcttaggtttaagtctttaatccatcttgagtgaatttttgtatgagagatgaagatccagtttattcycctacatgtggctagccaattatcccagcatcgtttattgaaagggtgtcctttccctacttcatgtttttgtttgctttgtcgaagatcagttggttgtaagtatttgagtttatttctgggttctctattctcttccattggtctatatgcctgtttttataccagtatcatgctgttttggtagctatggccttatagtatagtttgaaatcagatagtgagatacctccagatttgttctttttgcttagtcttgctttggctatgcaggctcttttttggttccatatgcattttagaattcttttttctaattctgtgaagaatgatggtggcattttgatggggattgcattgaatttgtagattgcttttggcagtatgatcattttcacaatattgattcgacccatccatgagcatgggatgtgtttccatttgtttgtttcatctatgatttctttcagcagtgttttgtagttttccttgtagagttctttcsactccttggttaggtatattcctaagtatttttatttttttgcagctattgtaaaaggggttgagttcttgatttgattctctgcttggtcattgttggtgtatagaagagctactgattggtgtacattaatcttgtatctggaaactttgctgaattttttttatcagttccaggacctttctggaggagtccttagggttttcaaggtaaacgattgtattgtcagcagtgacagtttgacttcctctttagcgatacggatgctctcctttctttcttccttccttccttcattccctccctccctaccytctctttytctttctctctttytctctttctttctttctttctttctttctttctttctttctttctttctttctttctttctttcttctctctctctctctctctttctctttctccctctctctctctctctctttctttctcttgtctgattgttctggctaggacttccagtactatgttgaagaggagtggtgggagtgggcatccttgtcttgttccagttccgagagggaatgctttcagcttttccccattcagtattatgttggctgtgtgtttgttatagatggcctttattacattaaggtatgtcccttgtatgccgattttgctgagagttttaatcataaggggatgctagattttgttgaatactttttctgcatctattgagattatcatgtgatttttgtttttaattctgtttatgtggtgtatcacatttattgacttgcgtatattaaaccatccctgcatccctgttatgaaacccacctgatgttcgtggattatctttttgatatgttgttggatttggttagctagtattttgttaaggattttagcatctatgttcatcaaggatatcggtctgtagttttctttttcggttgcatcctttcctggttttggttttagggtgatgctggcttcatagaatgagttagggagggttccttctttctctatcttgtggaatagtgtgaaaagtattggtaccaattcttctttgaatgtctggtagaattctgctgtgaatccagatgcaagtccttagtcaggtaggtagtttgcaaatattgtctcctagcctgtagcatgtcttttcatcttcttaacagtgtctttgaaagggcaaaaatttttaattttgatcaagttcaactttttgatttttgtcctttatggattatgttttagtgtcaagtctaagaactttttgccaagctctaattttcaaagattttttttttacttttctaaaagttttatagtttcacattctacatttaattctgtagtccattttgagttcattttttgcataaggtatgaggttcatattttgcctatggatgccaattactctagcatcttttttttttttctcactctgtctcccagtctgtagtgcagtggcttgatcttggatcactgcaacctccaccttccaggttcaagcaattctcctgcctcagcctcctgagtagctggcactacaggtatgtgccaccatgcccagatagttatttgtatttttagtacagatggggtttaccatgttggccaggatggtctcaaactcctgatctcaagttatccacctgcctcggcctcccaaagtgctggaattacaggcgcgatccactatgcctggcctactctagcatcttttgttgaaaaacctacccttcctgcattgaattgcttttgtatctttgtcaaaattatcagttgagcatatatatgtgggtctacttctgggttctctattttgtcccattgatctatgtgtttgtctttctgccaataccacacagtcttgacgactacagccaagttttgggatctcgtagactgattcctcccactttattcttttttcaaaattgatttagttattttaagttctttgcctttccatataagttttggaataagtttgtctacacctacaaatattcttgctgagactttgrttggaattgcattaaactgatatgccagttttgggagaattgatatttttacattgtggagtcttccaatccatgaacatgatatgtttctccacttagttcttcttttatttctttcatcaacattgtaaatggcaatgtgctttcatttggtttacacatgttcattgttagcatgtagaaatgctattgacttttttttgtatgttgatctggaatcctgcaaccttgctgaactcacttattagttctaagattgtttttaaattttttagtagtttctctgtagatatcatgtcatctcaaaatagggacaattttatttattccttttcagtctatatgcttttcatttattttcttgccttattgcactggctagaacttccaatactatgtcaaacaagagtagtgaaagaggacatccttgccttgttccccatcttaaggaaaagcattcagtctttcacattaagtatgacattagctgtaaggtttttgtagatgccctttatcaagttgaggaactcctctctattcctgagagtgtttatcatgaacaagtgctggattttgtcaaatgctttctcatgtcaactgatataatcacataattttttatttttcaggcagttaatatggtgaattatattgattgttttgaaaatattgaatcagccttggacacctagaataaataccacttggttttgatatataagtctttttatatagtgctagatttgatttgttgaagatttttgtgtttaaggtcatgagagatactggtctatacttttcttgtagtatctttggctggttttggtatcagagtaaacctgtcctcataaattgagttgtgaagtgttccctcctcttttatcttctggaagatattgtaaaattagtgttaattcttcttttaatatttggtagaattcttcattgagaattctacattagagaattgtactctctaagtacattgagtaccacatcatagggtggtgtaatttttgcttcaamcatcaagtatgatttaagagactccaaggtatcctggcctggagatgtgtttttcaggaaattttaaattatgaattcaaataaaaaatatgaataattaaattttgaaatttaattaaaattattagtagttttgtggttgtaagattattcagattgcccacttcatcttgattgagctttaatagtttgtaattttcatagaattggtcaatttctttctagtttttaaatatattagtctaaagttgtttgtagtagacccttatccttttagtagctgcagtgtttgtagtgatatcccatttcattcctgatgttggtgttttgtgtcttctctcttttatctttgttagtcttgttcgaggtttatccattttattgatattttccaaagaaccagtttttcgttcatcagtttttctgtggtttttgttttcaggttcatagagttctgcacttttttttttattatttcctttcctgtgcttgataaggttctttgttcttctttttctagtttcttgagatgggagcatagacgattcatttaagatctttcctcttttctaaagtagcatttagtgctatcaatttctctctccacattgctttagctgcagccacacattttgatatattgttatctagtcattacattatattcaccattatagtagtgtatttgttctcttttattccttctgctccttgtttcatttttcttacctttttgtggataacttgaacatttttcagaattccattttggcttatcataattttaaaatagtttttcttagttcttgtgtaaatacacatatataatttatcacaatctatgagtatgaatgccttaccattttgagtgatatgtagaaatcttacttccattttggaccttttagcctccttacttttaaaatataattgtcttaagtatatcttctaagtgcattgagtaccacatcatatggtggtgaaatttttgcttcaaccatcaagaatgatttaagagactcctgagaaggatagtctattatttttatccatttcattgtcctttcctttctgaagttccaaactttcttctgttatcatctccctttcctttctgtttggagaacatccttcagccattctttaagggtaaatatgtgagtgacaaaatctcttagttttccttcatcagagaaygccattatttccacttttctcctgaaggatactttcaccaaatagatgacttgtgattgacagctatttcctttcagcacttgaaaaatgtgccacttccttctggcttccatggttcctgataaaaaaaacctgctgtcctttgaactggtgttccctatagataatacattatttctctctggctgttttcaagatgtttttctttcttttttagttttcagaagtttaactatgaggtatcttggcatggatttccttgggttcatctgagttgagattcactcagcttcttgaatatgtaggtttatgtcttttgcaaaattcagaaattttcagctgttatttcttcaagccaaggtgacttttaagcacattgtatatttgagaaacattgctctggaggggggttgagagatccaaggacttctcaaattgtatgcagaatgctgttaagtgtccacagctttcattagattctcaaaagactccatgaccctcaccatacattttataaaagaattggtttatggccttattgagttgttttttgttttcttggttaaaatcagtaaaagcaaacaaacaaacacaaaaagtagttagtattcttttctttytttgtaccacatctgttgaattcctgtttctcaaagattttcctgacaattttggaaaatacgatgactcaggtaaatgttttccaagtgcctaatatgtgccagacaaatatttttattgttttccatagttaatgagaaggagaagaatttaaaacaattaatatcatttgggtttatgaaaagttcttggtaaataagtgctagagtaaaattggctgcttttcagtgtgactttcccctttaaaatctgttccttactgctctgagctggatacaccagcgatcaaattacatccctgaaagtataatttcatacaccgaaaacatgtcattacacagtgggccgcttgtcatcactctggcttgctttgcacagttggtagtccggcactcacggttcccccaagcaggcttgtccctggctcaactgctctagctgattcctccagccagcagaccctcacctcctttgtcaccccttattcctggactaacttttgctcatcttccagaactcagcttgggaagcaccacctctgggaagccttcagtctcttttctccaagcattgagttgagtgtgcctccagggtcactcatgcctgccagaacatcacgctgtatattaattgcctaattgtctctcctgtcagatagtcagacccttggaaactgtgactgggtcttgatttgctttcgtgcccccagtacttttgtaagtataatatsacatgtgtttacgcactatctccagttagagttcacgccaccagctgactgactgactgagcctttcatccatattttcattaatgtcattaagtatctgttgagggctgggcacagaggttcatgcctgtaatcccagcactttgggaggccgaggtgggcggatcacttgaggtcaggagttcaagaccagcccagccaacaaggtgaaacgctgtctctactaaaaatacaaaacttagctgggcatggtgatgggcgcctgtaatcccagctactcaggaggctgaggcagaagaatcgcttgaacccgggagggggaggttgcagtgagctgagatagcaccactgcagtacagcctggacaaaagagcaagactccatcacaaaaataaaaataaaattttaaaaagtacctgttgagctcctttatatataggtgtggcgaccagatattcagttcttcccaagcaggtttaatctttcctcacaagcatctgtttattaattcactttagactttttctgagaattggtataaaggttattggtcttttgctagaattcctatctttccgttttggggaaatatggataacaccgacctctgccattttccttctttgtcttactactggatcttatgaaccctttattattacatttacatgtatagctctgtctttcctattaggctgtaataagctccttgggcagggagtgtatcttattcaacccagagtctccagggaccggtgcaaggtggcattccatgagtgctggtggaaagaaatttgatgttagatcatcacagctatatggttgcttatgattggaacatatgtttcctcatcgtctccatacctttacttcctagttatcttttatccctcattctaagctaccgtgaactcttttttggaaaggagaaatgggtaatgcaacacattttaatgcattttttattcctcccaggtactatcttggtcgtcggatgtttattgttatttctgagccagacatgatcaagcaggtgttggttgagaacttcagtaactttaccaacagaatggtaygtagttttctttccgcatatagatggatggggaattgttctcagatggagacactgcatgtcagatccaatggggatgcaatcaggcctctgatcaggtttatgtcagttccactcaaaactaagctcctcagtgaactcggtttttcaaaagagatctatgggactggtacaaaagagtaacatttacatttaagaaatgcttcaagaaagctaaagctcaagggaagctgaggctattaaaaatgctaaaaccaagagggttttctaaagctgggttcaaagccgggggaatccagagggcacaggccaagtgactgacggagaatgagctaggctaataaatattagttggaaagcaaaattttgaggttcttgcacttacatctttcccagaaagtataagagtattaaggctggaaagggaagtcaagcaaaattaggagagaaatttgtcccctagtaagagaaggaaactttaagagggctcctttacattaggtcaagtctccagcctacatgcatgtacatatccctttgtttttggaaagtaaatgtcctactatttatctttgatgagaaatcccaaaggatgggcgaggtgacagaaaatggcagagatcaggccaggcacagtggctcatacctgtagtccccacactttgggaggccaaggagggtggattgcttgagttcaggagttcgagaccagcctggccaacttggcgaaactctgtccctacaaaattacaaaaattagccgggtgtggtggcacacatctgtagtcccagctacttgggaggctgagacatgagaattgcttgaacgcttgaatctgggaggctgggagtgggaggggctccagtgagctgagatcgcgccactgcactccagcctgggcgacagagacgctgtctcaaaaaaattaaataaataaataaaagaaataaagaatgaaaaaatggcagatatcagtgctaaccattttccaaaaatagggagataggcattctagcagagaagaccagtaacctttacgttgattcttggaaaaagtctaaagtgaattaataaacatgtttgtgagaactcagagaatcaccttgccaaccatttttggggggttccaattagacctcacttttcattcttttagggaagtacgtattcattcttttgttgattatgtggcaaactttttcatacctrccatatgccaggcactgtgtaggtgctgactgtaaagagacagtgtccctcgaggaactctcggtttagtgagggaggcagacaaggaaagggaccagcacaatgcagtgtggtgagtgctcctgaggtggggagcccaggccaccaggatgcagacagaggaaagcttattgggtgtgaggtgcttggggctgagtcttaaagaaattagagaaagtccccctscctgtgttccgaactaggtgagccatccagagtgtgtccttgtcatcgcaagagcttatgagatgagtacaattatcatctctattttatagacaaagaaactaaggttcagagaggctaaatgatcaaccctggtaacatggcttaacacgaggaagagcagggattcatgtgccatctctcaacttaagtctagagctctttttactgccaaagctgtgacagctgcctcagtgacatttcaggatgtcaaggttgagtggagtaattggccactcacccaaaatttgctcatcttcttccagccccagagcatcatgcccaactccagacatcacgtggcctctagagggatgtggcctggagggaggcggctggcctgctacctccatcccttcaggatggccgaaggaattgcagaagtttaactgcttctctgctgcctctagattctctttcccaaacactgcattgctatctcctcgctcaaagtcccctggaagccgtctgtcargaaactgattctgattaytaaatgcagctgtagcttgttgctccatcagcctcagcaaggagtgctgattaaagaagttggagaagccaataagtcaaagtgcacggaccaccaagccacatcctggcaagcagtaaaggtactcccaggagcctgtcatagcacttgagactgtctgagcccctaagccatgagacggcacttgccaactggtgtctccatatttcctcccatgataccaggacatgtgaccctgagagctgacctagaagaggtcaatgatttggcctgctaggggcagacatactcaatgcacatgtccaagcaaggaggacacaataatattgccctcagcttygatcaatttatcctccaagccatttgtctgccgtttctaatttctttcaccatcccctcacccacccctccacgcagactaggtccagtgccccaaactccagagtagagttccaattttcgtcctcttccactcagcacaggattaagccttcaggactaagttcaagttccctagacgatatttaagggcccttgtgtcttagatccattgtgtgtgctccaccctgtctctcactgctccccaatacaaatcgtcactccagcctctccctgctcaccctcacctgctctggagagacctgacctctgccttgctcacgctgacactgcctcagaattgaaggcagtgtaacagtggggctcatattgattatgacgtgagcttgagcacatatctttttttttttttttttggagacacggtcttgctctgtcacccaggctggagttcagtggtgtgatcagagctcactgcagcctcaaactcctgggcccaagtgatcctcccacctcagcctcctaggtagctgggactgcatgtgtgtgccaccatgcctggctaattttaaaaaaaaaaaatttggcagagatgggggtcttactatgtcgccaaggttagtctcgagctcctggcctcaggtgatcctctcaccttggcctcccaaattgttgggattatagccctgagccactgtacctggccacatttcttaacttaaaaaagagctggggcagctctttttaaaaatatccatggaaagtggagctgaatcaacatgactcagcagaaatggtcacaaccagtggcagaacttcttattcttggcctcctctcaaggcctggagttgggggatatgatccaccttactgggctgtcataaagccacatgggatcatgcatataacctctccctctacacagtacttggcaggtgacacattactgcttctcacaagaaaaccctccacctcttccacacccatccaaactcttgctgttcttcaagacactcctcagatactgcctcctccaggaagccttccctgcctccatccacatgcacytttccccttccctgaactctggcagcgctcaccatgtgtgtcactcgttgtcacagttgatccccttgtgccttccagtatttacagtgaaggaggatatggctttcactctagcttgattattagctctttaaggccaagaactgtatcttgtattttttttaaaccccatgacataaacacatattgactcttcagcatccaatatattcttgttccaactgaatggaatttccatcaacttgacattcctcccagaagaatgaggtattacttgaacctggagttgcaatatagtcttcttcgtctcggtcattcacaaacacgtaaaaagacccatcatagataagatctccaggaaatcccagtgtttatagttttccatctgggaatgcatccacttatgtgtagctttgtttatggtctttaagccaattccatatcgatggtaaaacaacccttagtgactcaattttttaaaaaacagtctttaaagtgggattttctcacaggtttttgaaagtcaaattaaattgggttctgtggttccctcttatccatatgcttatttatctgctcaaagaactcaaggagattagtgagacgtgatttctccttactgacaccacgttgccttccctctaataggccatgtttacttaagcgttcagcaattcagctttattatacattcactcggtaaacattaaatgcttactccatgcaggctgctaccaaacggtcccttgtgatacagaaaatacctcggcatattagtttgataaattaagtgaaaaggaatttaaataatgcatgctctcattctccaacagggagagcccatgtctgctcacaaattcaggcttgagttacgttgagttttgtccctggacagcctggtggagaagggccctgatttgggaagctggatttagctctgaaatttgacatgagccgtaagcatcccatgagggatccatagagcatattcactggaggtgggggtgatgcaacagggagctccctgacatacaacaacattgaacaaatgtgtgaattcaaatatcatcctgtgaaatattcttttccaaactccagaacactggctggagcagactgtgggttggatccggagcggcagttcttaatgtcatgctttcccattcacagtttttgggcctctggagtctgtgcaatgtctctgcttcatcttgctcattttccacgtggaccttgtaggtctctatcaatgtcctcagtgcttcctgaaactgctccatgatggtgcaaccacagcttatcattaaacccaaatcaatcttcttggcacttatagaagctcagtcgtcctggtacatcaggactcggatgtttctatttagatattttcaatgagctcttctttgctgtcaggtacggtacctaatgaaaccatagggcagctcttttttaaatatctgtggaaaatggagctgagtccacatgactcagcagaaatggtcacaaccagaggcagaacttcttgttcttggcctcctatcaaggcctagagttagggagctgtgggaagggtgataagaggtaagccagtctttggcccatgttagcttggtctggtcagataggcatgtcagggatgtgtcaaaacactaagcctagtgctttggagatgtgggttctggtctggagtggcagtatggagtgccatctctcaggtcctcatgagcaacacagaggtcacctctccaggcacaggtcgagccacaccactgacacacaagagtcacgtccaaagccatgtgatggacgtggtgggtggttttatcccgaaccatcaatacccggcaccctggctgccccaggttcagcctctcaggggctgcttcactcgctctccacacagctgtgaacattgcaggatgagtcactgtgaaaccacaaactccttggcattggtgaagatgactaaagttataggcaaattagtcactggaaaccttcctgtcctctgtatctgcagcagcctcctatcgaaggaagaaaagagtatgttggctcattgcagagctaattggcaaggaaagctcaattcagggctacaggtgagtcagacgcccttgtgcgggggccacagggacccgcctgctggcatccattgaggagagaggggcccttggcagacttgccataaaaccgccccccttgaactcattcctacacctgtaaccactgacagtttttgaaaactgttcacctggagttcctggttctctttctcttaaatcaaacattgartaaatgaagacactcagatgttcaaacatgtgcatcaagattttacttgtgagagtggttgccatgcatgacctagggaagctctcatggcttcagtcaaaccttgccaactttttttagctgtgcatttcttgagaaaggtcaactcacattacgrgtctacagctctgagcaagggagaagttcttcctgaaagcacaaacagactacagagggcagtgaaaccagaaacacaggtgtgcaacctcatttgcctgcccccgtctctattttgaggcctctttgttttatgtgacctccgtctccttctctgccgcaatcttcttcttataacacccactttcttcttttaatttccccctcttctaagccatagcccagtggtatggcgaaaggtctttgctgtgcataggaaaccctccaatctgaactggaagcttcctgttgcaggatgggctgccccattggaattcccaggtgacagtcgcaatgggatgcctgtcccctgcaggtctcccatttcacctgcttttctaatgtctggacatggctaagtcctagaaaagccagatccatggcattacatttaatcagtacaacacactgagcttcgtttccaacatggtagctaagttttaattctaacatctttaaaagtactgagtgtcttgtgatgccttgggaacacaggaatagtgttaagtggtgttgattctcaatgctcaaatgtacttctctctgccttgcagagatttttctaaaatttcaagaccttgttgaaaatgatttcatatttttgtgtcttactagactcttggttcagcaggaagctatctttatatatttttttaacaaaaagaaattagtaaaagcttgctctgatatttatgccatatttccctaacttttgtcgtggcagaagtagaaataagtgtgtaaaccaggagattaatatctacaatttaggcatgagaatagagaaataaaccataaaatcaattcttatctctcaatggatatattccagaacattccatggaaatcaagtgactaagtcctgatcctccctgtctttctccgccccaatctccttcttatgacattccctttcttcttcccattttccctcttctaagccatagctcagtagtatggtgaaatgtctttgattttagtttaaagaaatgaaatcagattccagatttgcwacctcttattagttgtgtggccttcagacaatcctttaacctcctgattctcaatttcctcctgtgtaaaatacattagactagctaatccctaaggtctgtttggtgcccagttcacgtgaccgttggcagccacagggagccacggagtcccaccagcgtcccatagagccacttggagcttcaggtacaaggaacaagcccctcktaggccccctcaggaaaatttattctcgcagccaagcatgtcaagtgcaatatcaggaacacccttgtccttcttgaacactgcttctggccagaaactctgctgagatctgttggagagtttcctgcaaagataagagttaacaagcccccagattcccttccccgctcaggaggggccctcactrtcagctttggggctgatagaagcacagttccaagcgcctggcttcctcctcctccccagtggataaaatgctggaactccgtcaggcaggactgccataattagaagaggcccctttccagcagctgaagctgactaggcagatagagcccaaatttgtttttagccaccacatgcccctgagctgacccctcragctgtggacacatctcacaacctcacccggaggccattctctcaggccagtcacactctcccacagagagagcgaagatgatgtcaaatctatggccaccttctaccagcagagggaatgaatgaaaactgacatgtagaagagtaagaccactactgttttcatttttggtattttttttttacattttaatttttttatactctatttttagtaaaagggacacctttactatttcaaaccaccaaaatataagccctatttggttcaaatctttgtacagccagatagcaatagatataaattgacaatggcctcaagtatagaatttggggttatacaagtgacagaattcttgagtctcagttgattataatataatgaggggacagtgccaggtctttcacgtctccaggtgggaaggggacaagttgcacgatggctgtcctcatctgtgcctggttgtgtgagaattagaaacaacgtttgtaacagtggtacctagtctttgtgaccgtggtcctctttttgatattaatatttttgcagactagttggcataaacaagttggctctctgtactcacattacaaccactgaggtataacactatctcttggagtccttagaagcacctcgctctgttcagctggcctctcagccttgtgtggctgtttcagaactgttgatcatctgtcaagtcatcccagagatcatctagatcttgagtccatttcttgcatgttccagaacacaagaaaacatttgtggctatagcttcatattctatcatgcctttcatccctttctcccgataatacatgaacccggttacagcagaaatgcattccatgcatttgcaacactctggaaggagccagtggttcttgtgtggctttaccaggccagtcgagaatcactgggctggtgcatgagaaaccttcagtaagtggctgctgtcttcatgcacccatggaatgccgaggtgttggttttcttcaataacctgctcctcagggcagtgtttcctaattgctggagaatgacccaagagttgatgaaataatatgaaaagtactgtgtttgctgtaagatggacaagtattggtgatataggccaccccactcccaccctccattctttgtcttgatagttccagtcccagtacagcacctggcacacagtagttgctccatcattattcacagcataatcacagacaccattcagagcagagcttgtacagccctaaacataaagtgcagcaaacccagctcaagatcattgaagctagcagccattcagctcctgctgtgggatggccagggagggtcagagactgtggtcttgacacattctgtgtggggttcatccacatcttcctaaatgcccaaggcatggctatttgaagcagagcaagtaaagacaacgaggggtccctctgctgggttttctgtccccctctggctgccagcactaatctagcctttgaagaggggcagaaggggcaaagttaaaccacactttcctctcttacctgttgtcacccctctaatgacttttcactttctctgctcaccttctccttcctgcctcttttagaaatgggaaacaaagggcccatagrccctaaaaggggccaccctttgaaggaggagacatgaccacaaatgtcaccctttgatatcctaatgggatccatgttaaaaaaggaagtttttaacctggtctcagaggacacttgcaagagatgccaaggaaggcagtgtgatcatcccaagtcaagcagcctaacrtgagcctgtgagagagaaactgcaatccacccgcaacgtgtggtcatcaaagggcggcaaccccagttaccagcttgagattaaaaacccaaattaaaacagggccaaaggattcctgtcagctcttaacacctctcttaaaatgtgaccactgtctgaaaaccattgtttggctgatgaggtctaacttcattacacatcacagtaggacactccttcctgagaccaggcactgctcccatgagtgcagtaggacagacctcctctgttcctgacgatgataccccaatacagcccgacaagcgtgtgctcaatgaaggttcccagatctttttaatgcgactttttgcaggtcaggttgcttccatcacatgcactgaacaaccaaattttaaacctaaatatgaaaccttgtagttacatctgttgattttcgtcttgttagtgttcatccagcattcaagtctgtcgaaattaaatgtttattattccttagtatttttttaaattgaagtcacttccatacacaaaccttgagtgtaaagctcaatgtattattgtctatgtattcccctatgtgacaccacccagatcaagacacaaacatttccarcactccagagggttccctcatgcctcttctcagtcaacccatccctaccatccagaggaaaccactcctctgacatcaatttgtatagatttctcttttcctgctgttgaacttcatgtaaatgtaaacttacagyatgtatccttttgttctggcatcttttgctcaacataatgtctgtaagagtcatccataccacgtatttagattaatatagccaggtgtggtggctcagtcctgtaattttgcactttgggaggctgaggcaggaagattgcttgagcccaggagttcgagactggcctgggcaacaaagtgagacccctgtctctacaaaaaaaaatttttaaattagccaggccccgtggtgtgtgcctgtggtcccaggtactcaggagactgagggaagaggatgccttgagcccaggaatttgaggctatagtgagctatgatcgtgccactgcactgcagcctggggacagagcaagatcgtgaacatagtttgcatttttcattgctatgtagcattccaatgtatagaaacaccacaatctattcctctgtcaataaacatataggtttccagttttttgctattatgaattaggttgttatatcaacaggcatttatgaacacctaggagcagcatcgctagcccacgagagtaggtgcatggtgggtttttgtacatactgccaaacagttttccaaaggggttgagccaatctatactcccataaagtggagttctagttgttccagccttagccagcactttcatcttgccattatttttcactgtaactattccaggggctgggtagtagtggtatctcaccacagttttaatttgtatttatctggtgaccatgtcattgagaactttttctttttctttttttttttttttccccgagatggagttttgctcttgttgcccaggctggagtgcaatggtgtgatctcagctcactacaacctctgcctcctgggttcaagcgattctcctgcctcagcctcccgtgaagctgggattacggacatgtgccaccatgcccggctaatttttgtatttttagcagagacggagtttctgcatgttggtcaggttggtctygaattcctgacctcaggtgatctgcccaccttcacctcccaaagtgctgggattataggcgtgagccaccgcgcccagccgagaactttttcatatgctctctggccatttgaatagtctcctttttaacaacgtgcctgttgagtctttgccccctcccccacttttattttaaggtgtttgactttttctgattgacttgtttttctttgcatgttctgccttgagtcttttgtcagataaatgtgttgtgaatatcttctcccagtccatggtttgtgtgttattttcttaataatatcctttgataataaagtccaatttatcaaaatcttcttttgtggtattgcttttggtattctctttaagaactcttgccttatatacaaggtcacaaagatattctcttggaatcattatggttctacctctcactattgggactatgatctatctccagttaacttttgtgtatagagtgaagtatggatcaaagctgattttttttctctgtattaatatccaattgccccagtaccattgttgaaaagaccacccattcccccttgaatagcacctttgtcataaatcaagagatcatatgtgtgagtctacttctggactctgtcccatttcattggtctttttgtttatccttgcaccaatatcacactctcttaaatagcatagctttatcattgatcttgaaagatggcagtgtggccaggcacggtggctaacgcctataattttgggaaggccaaggtgggggaattgtttgaggccaggagtttgagaccagcctgggtaacaaaccaagacccagtctctactaaacaaatatatatatatataattagccaggcatggtggcgcatgcctgtagtcccagctactcagaaggctgaggtaagaaaattgcttaagcccaggaggcgtaggttgtagtgagccatgattctgccactgcacttcagcttgagcaacagagcgagaccctgtccgagagagagagagagacgcaagagagagaaacagagagagatggcrgtataaattctcgtggttattctagttcttttggttccatatatctgtttacaggaatcagcttgtcaatttttaaaatgtttaatttttgtgagtatatagtaggtgtatacatttatggggtatatgaaatattttgatacatgcatgtatcatgcatgcatgatacatgcatgcaatgtataataatcacatcagggtaaatggggaatccaccatctcaagcatttttcctttctttgtgttacaaacaatccaattataatcatttatttttttgccctgtcttatggtgctgatctttcggttattttaaaacctgcaattaaattattattgactatagtcaccaaatactaggtcttattcactttttctatttttttccacccattaaccatccccacctccctcgacactctttcactactcttcccagcctctggtaaccatcattctactatctccatgagttcaattgttttactttttagctcctacaaataagtgagaacatgccaattttgtccttctgtgcctggcttatttcgtttaacaaaatgacctccagctctatccatgttgttgcaaatggcaggcttttattcttttttatggctgaattgtactcccattgtatatatgtaccacgttttctttatgcagttgtctgttaatggacacttaggtgcttccaaatttggctcttgtgaatagtgctgcaataaacatgggtgtgcagatatctctttgatatactgatttcctttctttggggtatatacctagcagtgggattactggatcatatggtagctctatttttagtttttttagttttttgaggcgcctccaaactgttctccatagtgattgtcctaatttacatttgcaccaacagtgtatgtgggttcccttttctccacatccttggcagcttgtgttattgcctgtcttttggatataagccattttaaatggggtgagatgatatctcattgtagttttgatttgcatttctctgatgaccagtgatgttgagtaccttttcatatgcctgtttgccatttgtatgtcttttttttttaaactgtcgattcacatcttttgcatgtttttttaataggattattaggtttttttcctgcagagttgtttgagctccttacatattctggttattattcccttgccagatgggtagtttgcaaatacttcctcccagtctgtggcttgtctcttcactttgctgattgtttcctttgctgtgcagaagttttttaacttgatgcaatctcaatcrtccatttttgcgttggttgcctgtgcttgtggggtattactcaagaaatctttgcccagttcaatgtcctagatattttctcaagtgttttcttttagtaatttcatagtttgaggactcagatttaagtctttaatccattttgattcaatttttgtatatggtgagagataggggtctagtttcatcattcttcatatggatatccactttttccagcaccatttattgaagagactgtccttttctcaatatttcttcttggcacctttgtgaaaatgagttcactgtagatgtatagatttgtttgtgggttttctcttctattccattggtctatgtgtctggttttatgctagagccatgctattttagttactatagctctgtcatataattagaagtcaaggattgtgattcctccagttttgttcattttgctcaggatggctttggctattttgggtcttttgtgtttccatacatattttaggattgttttttctatttctgtgaggaatgtcacatagagattgcattgaatctgtagattgttttaggtaatatggacattttaacaatattgattcttccaattcatgagtatggaatatctttccattttttttgtatcttcaatttcttgtatcagtgttttacagtcttcattgtagagatcttttacttcttcagtaaagttaattcctaagtatttcattttatttgtggctattgtaaatgggattgctttcttggcttctttttcagattgttcactgttggcatatagaaatgctactgatttttgtatgttgactttataccctgcaactttactgaattcatttatgagatctaatagcttttcggtggagtctttaggtttttctaaatgtaagatcatatcatctgcaaacaaagataatttgacttcttcctttctaatttggatacgtttatttcattctcttgactgattactctagccaggacttccagtactatgttgaataacagtggtgaaagtgggcatccttgtcatgttccagatcttggaggaaaggttttcagtttttccccattcagtatgatactagctgtgggtctgttgtaaatggcttttatgttgattgatgttccttctatgccttttaggatttttattatgaagggacgttgaattttatcaaatgcttttttagcatcaattgaaatgattatgtggtttttgtccttcattccattgatatgatgtatcacattgattgatttgtatatgttgagccatgcttgcatcccagtgataaatcccacttggtcatgattgatctttttaatgtattgttgaactcagtttgctagtattttgttaacgatttttgcatcagtgttcttcagggatattggcctgtagattttttgtttgttttgttttgttttgtttgatgtgactttgtctggttttggtattagggtatgctggcctcctggagtgactttggaagcattcccttctcctctcttttttggaatagtttgagtagaattggtattaattcttctttaaatgtttgataaaattcagcagtgaagccatggtgtcctgggcttttctttgctgggagactttttattacggctttgatttcattacttgttattgatctgttcaggctttggattagtgattcaatcttgacaggttgtatgtgtctaggaatttatttcttctagattttccaatttattggcatacagttgcccatagtagctgctaatgatcctttgagtatcagttataacatctcttttttcatctctgattttatttacttgagccttctttctttttttcttagtctggctaaaggtttgtcaattttgtttatcttttcaaaaaaccaactttttattttgtcgatcttttgtattgtttccttcatttcaatttcatttatttctgctgtgatctttattctttttttttctactaactttggctttagctcctgcttttttagttctctaagatgtatcattaggttgtttatttgaattttttctacttttttgctgtaggcacttataactataaattttcttcctagtactgcttttgccatatcccattagttttggtacattgtgtttccattataatttgtttccagaaatttttcaatttccctcttaatctcttcattggcacaatggtcattcaggagcattgtttaatttccaattaaacaattggaaattgtatagtttccaaaattcctcttcttattgatttctagggtttcttttttttgttttttgtttgtttgttttttgtttcttgagacagtctcactctgtcacccagactggagtgcagtggcatgatctcagctcactgcaacctccacctcttgggttcaagcaattctcatgcctcaaccacccaagtagctgggattacaggcgtgcaccaccacgcccggctattttttttttttttttccgtacagacaggatttcaccatgttagccaggctggtctcaaactcctggcctcaagtgctctgcctgcctcagccaaagtcctgggattacaggcatgaaaatagacacacttttgtgtatctattgtatgtttttagatttgaagttatcatatcttgcaaataatcttgtaaaccattattttaaactgacaacttaacactgattgcataaacaaacaaaaataaaactaataaaaactctacgctttaacataatcttcccactttttaactttttcttgtttatatcttattgtactgtctatatcttgaaaagttgttgtagttattattttcaattggttaatcttttcatctttctacttaagatatgagtagtttacataacacaactacagtactataataatcttgctaagttttgaagaattgacatcatgacaatgttgaattttccaaactatgaatgtggaacctctatatatttaggtattttaaatttatcttagcaatattttgtagttccagactacaggtcttttgtacatctttagtcaaatgtttttgtaggtatttaatagttttactgttattgtaagttatatttttaaaatttcatttttcagtagtttgttgcccatgtgtagaaataaatttttgtatattaaatttgtatccaacaatatttttaagctcaatattgaatctagaagtttatttatagagatttctcaaattttctatgttagacaatcatgccatctacaaataaatagagttttacttcttccattccaatttttacaaattttatttatttttcttgccttattgacctctctatgatgtcaaatagaagtgtaatagtggacatagttgtcttgtttccagcctcagaaagtgttaactatttcactgtttaatataatgttaactgcaggtgtttttgtaaatgtcatttttaggtgaaggaagtctccttatattgatagttcactgaaagttgttattatgaatgggtgtcagtttttatcaattttcttctgcatctcttgagattgtatatgtttttctgttttattctgttaatgcaacaagttacattgattttcaaagttgcattcttggaataagtcccacttggtcttaatgaattattcttgtaatttatcactgagctatattacctaatattttgtttacgacttttgtgtctatgttcacgagtgacattggcttataatttttctttcttgtaagtctttatctggtttggggctcagtttatgctggctcatgagatgatccagattaatgttaaatcgtgactctgtgcacattaactattctcagctgtgatttctgcaaatcagtagttcattatgaaaataacaaataaaatgttcgattcgactgggataagtgtagaaatctgtgggtctctatttgattccagattaatagagttttatttgtctttggtgttctgacagccatgaaaccaccaacccgttgcttctcctctttccccataagaatgtccttggaaatcacaaaatgttttgtttcccacatctatagatctgtccctatgtgggggaaagaaaagaatgagtaaacattacttctcagtgaacttgttcctaaggatcacttttttaaaaaatcttttttaaatgggagtaagctgttatctgcacaaagcccttggggtgaagtccagtcaacagggcttccctyaggagatgttctctaaactgtgttcatgaaagtgaataagagttagcaggcaaaggagaaagggggttggagagggatctagagtttcagagaaagagaaaaacagctcacgagaagkaccacaccctagagagatgacatggtcaagggtctaacggaataatgcgacatcatctcaacactatgtgccaaggactgtcctgaaagctgtgtcataaataaagttttggtgccgcaaaagaaatagcactcaaatataaaattttctttttaattctcagcaaggcaagttacttctatagaagggtgcgcccttacagatggagcaatggtgagcgcacacttggacaagggaggggaaggggttcttatccctgacgcacgtggcccctgctgttctgtcgttcccctattggctggggttagaccacacaggctaaactaattccgattggctaatttatgtgatggagtgatggctaatttagtgatggagtgggtggtttcgtgggaaaaatggctatgacagagcatgtaataggaatgagtcagggtggagcaggtgattggaatgagtcagggtggagcaggtaatcgaaaaaggttgctttatgaggaagttaagtttaaaagtagaaggcaaaaaattgaacatactgacatattgattctttgaaaagaaatttagaactcatatctaacagctataaatgtattaactgcattcatcattccgactgctcagtccaaaacccttggagtcatccttgactcctgtctttctctctcccacctcatatccaatccatcaggaaatcctgttggctctaccttcaaagcatgccaggctgatcatttctcccggtatctgtgtccagctccctggcctgagcctccacccccgctctctcctggccactgtgcttcctcctgacggcgctccctgcctccactctggctcctcacagttgattctcaacaccaaacagcgagattctttaaaacagaagtcagctcaagatatgtctctgttcaaaactctgctatgactacctgtgtcttgtggagtacaaatcctaccaagattctggaggccctccacacacaggcccccatgccctctctggcctgcctccatccctcccctccagccgcgccacatccttaagggtcctcacgcacatgatgcctttgctgtaatggttcccatgcccaccaaacccccagctccttcaaggctttgcactaatctcacctatgcaggagcccagtgccaactgaccaatttaataacacacctcgccccatcccactgtaccgtccagtgtatttctcatgcttattgtccaccttctcccactagaatgcaagctctgtgaggacacggagcttcattttgttcacagaggtatcctcagcacctaaatcatggcctagcacataccaggcactgaataaatatttgtgaagtgagtgaagcctcacaactatcctaagaggtcggtagcgttattatccccattttacagattgagaaactgtagagaggtcaaaccagagaggtcagctctcaaagtcacatggagccaatatttgaacccaggcatctgactctagaggcaatgttcttaaccactgcattatcctggcaagcccaaagtagcaaatgcaacccgagcttccagaaggccctgtgacttcagactatataagggattgggaagttaaggcactccttcaggctttgtgttcagaaaggggtggggaactggccagcacataccaggcctcataaaacaagttagggagtttgcaccaggatagggctagatttgtctttagaaagatcccactgactacagggtggagtacggatgggtgtgacaaggctgcgggcagggaaatcagttaggggctgagataatggtgacctcagccagggtggcagctgtggggatggaaagagttggccaaagagagatttaataattgtgactgacaggattgtagttgagagagagagaacwactcctaggtttggggtttgggttagttttggtttttcaagcttttttgactatgatctacagtaagaaacacattcacattttgatacagaatacacacacacacatacacacatacacacgcatacatgtacatacacacatacacacacatgcatacacacacacacatatcttgaacaagttcaataaccacagaatactttccctgacgttaaatgctcctctgtgtttcctaatcttgtctatctcttgtctctttctctcctttttttaaatgctggttgccactcatgacattgatttcatgactgatcatggcttgcagtctggaagcccttgaccagagagtgattggaggcttgggacacagctaggctgacagacaggagcctcgaaagctgtgtccctggacctcctttctgcagagtccccttcctgcatgacatacacagtctggctcccatcacacttaccagtctcgttactcattgaattagtccattttcacactgctgataaagacatacctgagactggcaatttacaaaagaaaggggtaatggactcacagttccacgtggctggggaggcctaccaaacatggcagaaggtgaaaggcacgcctcacatggcagcagacaagagaagaggacctgtgcagggaaactcccctttataaaaccatcagatcttgtaagacttattcactaccacgagaacaacataggaaagacgtgaccccaygattcaatttcctcccaccaggtccctcccaccacacgtgggaattgtgggagctacaattcaagatgagatgtgggtggggacacaaccaaaccatatcactcattcctttggggaaaatcctttgtctctttcaaggcatctctcagtaagtctcatcaatgaatatatgtggacaagcaggaggtgtggaggggtcatggaagctattgtttaataggcacagagtttcacttttgtaagatgcgaaaagttctgtggaggaatgctggtgatagtagcacaaccatgtgagtgtacttaataccaccaaactgtactcttaaaaattattaagatggggcacctgtagtcccagctacttgggaggctgagacaggagaatggagtgaacccaggaggcggagcttgcagtgatccaagatcgcaccattgcactccagcctgggcaacagagcgagactccatctcaaaaaaaaaaaaaaaaaaaaggttaagatggtggattttatgttacatgtattttgccacaattttttaaatcaatgtgtaggcaaactaatagaaaaaagagtgtctggagtggctttccagacatgaagtctcagggttgaaagagtccttggaaggcttttagaccaaacccctctgcatgctcaagccttgggtacaggatttctaagaagtggaacagtctccaggggtgtggagctcatcgctcaaggcaggttatcttatctgaataattttgtctgttgactattgggatagttctccttcagatgagctgaaattttctccatagcttcctctattaaacccaattccacttctcagggtcacaaaaaaaaaaacaaaacctaaattccctctcccatgcagtatgtattcaataaatatttattaggcatatgcctaagtaccactgtctgatcttccaaatcttctcttttccagttaaaaattccaaatctgacaactatttcttaaatgacatgattcaatgtccccttaccatctgactgctcttttgaaatcatcaatttcctcttattgtgggacatctataaacaaaaagaggccaggcacagtggctcatgcctgtaatcccagcactttgggagaccaaggtgggaggatctcttgaggctaggagttcaagaccagcctggtcaacatagtgagacaccatctctacaaaaaaacttcaaaattagctgacatggtggcatgtacctctagtcccagctactcaggagactgagagggtaggatcgcttgagtccagaagtttggggttccagtgagccacgatcacaccaatgcactaccgcctgggtgacagagcaagaccctgtttcaaaaaaaataaataaaatgttttcagaaataaaaacattacaataatcaatagccccaaatgatttcatcaaaaaatgggagattctaatggaatttccaggcccaagtgagcacagtgtcatggcatgctggtgagaaagatatgtgaaggccatgctgacatattgcaaggaggactacatttgtctttcaggtgcaagacaaaaaatagtgtaaattcacccttaagtcttaaggataggtacgagatccaatcagccttcactcttatctctaatttattctgtctcatcagaaccagaaaacatcacygcactttccttggaggtaagtgctttattccatgtagtgtgccacaggactgcatcttgccactacataaatacacataatatatgatttcctccttcaactctggaacctaaacaaatggattatgttccccaaattccataaagccataattctgttgagtggccatggcgctcccaaagaatttctttctaaatatagagaggtattcctctgcagaaaaaaatatcccagcatcttggttctaatatataattaactcctctctagatactttgcagttacgttttatggcttattttgagtgttcatattttatcagaaaattataattttcctctaaataggagtttttacaaggcttttgaattctgatgactggcttcatgtttcagctataattaaaacagtgaaatgaaatagcatcaccatgcatcacatgtggttctgagactgcttggtcccccaaccgcctgtctccccacaccccgcaacctgcaggctggggacactctgaccaatggtgggggctccagttttgaccacttagtgggacagctggttttagaaagaaacagaatggcctgagaagaagggatgaggagaccaaagtcctcacctcggagaagcctcccaaatatgtcccccaccgatgtcccaccttgccccattttccttccaggaaaatatactttctccaagaaatacactttccctccaggaaaattcactttccatctagttgttagcttatgagcttactctctgcttcccctctagactgccaactccatgagggccaatgcaaagtcttttttttttcttttgttttttttgagatgaagtttcattcttgtcccccaggctggagtgcagttgtgtgatctcggctcactgcaacctccgtctcccaggttcaagtgattcttctgcctcaacctctcaagtagctgggattacaggtgcctgccaccacgcctggctaatttttgtattttagtagagacggagtttcaccatgttggccaggctggtctcaaactcctgacctcaggtgatccacccgcctcagcctcccaaagtgctgagattacaggcgtgagccaccatgcctggccgcaaagtctttttcattcaacatggtatagacaacttcttgaaccccgtattagtttgctaggctactataccaaccaaccataggctgggggtttaaacaatagaaattgcttttcccacagtgctggagatcagaagcctgaagtcaaggtgtcagcagtgttggtttctccggaagcctctctctttggcttgtgcatggctgtcttctccctatatcctcacatggtcttccctttgtgtgtgtctgtgtcccaatctcctcttctaataagcacaccagtcatgttggattagggcccaccctaatgaccttattttaccttaattacctctttttttgagacggagtcttgctctgttgcctaggctggagtgcagtggcgcaatctcagctcactgcaacctccgcctcctgggtttgagcaattctccctgcctcagcctcccaagtagctgggattacaggcacccactaccacacctagctaatttttgtatttttagtagagagggcatttcgccatgttgaccaggctggtctcgaactcctgacctcaggtgatccacccaccttggcctcccagcgtgctgggattataggcgtgagccaccactctcagccttaattacctcttcaaagaccttatctccaaatacagccatccctcagtagctcgtgggataggttccgggacccacccttgctcaggacaccaaaatttgtggatgcttaagtttctgacataaaatggcatagtatttgcatataacctatgtacatccttctgtatgctttaaatcagctctggattacttataatacctcatacaatgcctacacatcactttatgtacatggattcaatgtagttctctggacagagcaaattcaagttttgctttttggaacttggtggaattttttctgaatatttttgattcagaattggttgaatccacagatgcagaacgcccagatatagaaggctgactgcacagtcacattccgaggttcttggggtcaggatttaaacatatgaagtttggggtggggggccgaattcatcccataacacagtattaggctatcaaccactgtttgctgactgagaaaaaaatgaatgaccaatagaacacagaaacattatggcaggcatgctccyggaagcagttctcctrgcacacgcttctgaaggcctttcctttttcccccttccctctccctccacccatacaagggtccagacgagtgagtcttctgtcaacttcgggtccaacctaaccaatccagtcacacaaaaccctgtgccatgaacttcagacatgatactaattcccaggaaagactaggccatctccaggaagccttccttgtttgtcttcagggaacccctgctcagtagggggactgcagaacacacagaagccattgagttgtctctatgatgatgaccacatcgcagcagggtacagctgagccaccagagcttgcccatctgctccctctgggccccgccatgattctttctatcactgcctgtaagcctttatagtcttcctctctctccttgcaagagaaacctcctaacttgttggccactgatggactttaaccagggtgtttgtcatggacctgtattgccaccaaggtggctttggctccctgagtcctgaccctctgcttrttacttcccaacaggcgtcgggtttggagttcaagtcrgtagccgacagcgttctgtttttacgtgacaaaagatgggaagaggtcagaggtgccctgatgtctgctttcagtcctgaaaagctgaacgaggtaagacatgagaaatgcaaactctcttctcttacggagcaggtttcttctctccaaatcgtgatgagagccagttcatgttgcatcacttgcccaggtgacacatcaaaatgcctttcccactgggaccttcagacctctctgttatgcagaaagcacgggactctgtgttgagcgtctttcgtctctccagcctcccatatccccacttgccataaatgaactgtgagtcaacaagtacacagggcattcgcctgtgtccagagacagagcttgaggtgctttgggggccccaggagacaactgcaacagtgtctgttggactgtcatgcataatggatcacctagggatctggctacaaagcaggctctgattcaagagggccagggtggcctaagaatctgcatttataacacccggccaggtaatttcgttgttactggacaatgaaccacactttacatagcaagaaactagagaacagcatgaaacaaaggtgacctaccaatcaagtcttaaatagggaggtgattgcagtgaatgactggggaggagtgggcgatcatgtcaggcagggacacccaggttaacctctaggccaagttcaagggaagggcaggctccacaggatgctaccagctctctaaggccctggacactctcctttccctactgagtgactcactctttcctatcagctgtgcacccaaaaccgggtgtttgtacagcctccagaccaatttctcacacaacagatcctgactgctgtgttttgtatctaagcctgacagccccctcaattgctggtctggctttggtgtttgctgttctgaattgtgcaaccacaagggagagagaacttgagcccttatgatgtgaaggggctaaggggcttctttagttccagtctcaggtacacaggcatctctagagcaagggagcttccaaagcttggcttgagtgccctgggcttctgccatccaccctgtctggatgttccagagtagcctgtcttcagttcaataaaaatgaaagctacttttagcttaagctcaagatgctcatccatatggtcctgattgaattcctataaatcttctgaagtcccccagaagaggagggggttccacacctcattatatccaattaaactcactcagaagctagtgatccccccatttttatgaggttttgatttgcatttccatgggtagctgttggtgtttgggggcagagcctgtctctgtatgcagcacctgctcacactcacacagctcagagtcaggtaccaagggttgcctgtttagactaacayactgcctcttcaccacattcctgcgagataaataccatcatccttattattaccatcccattttacagaggaggaaactaggcacggagagattaagtagcgtgctccaagtctcatagctagtaagcagcagagccaaaatcagaatccagctccggagcgctcttcacctctctgcctgactgcttgctacctccatgtgattttccagtggtgctcggaggccacgtaggactgtgccaggggctgtctggaggatgcaggaaggggaagtgtagcaaatggggcctcggtggaaagctrgggggygggggagggtcagaagcaaaacttctctattttctgcctaagtttggaaccaactgaggtatggaaagaggttttaggcaaaggaaataaaattttctcttatcttactggtaaagctgtttgaaaaatagagtccccatctgatcacatgggcttgctatgctaatacttcacccagaatgggacaattgcaggggggtggcagatgccatcggggctggcccgcggcccacatgtgctcarttccttcctccaagactgggtctgatacagtgtagacagcaggagatggagagtgacttagatgcagcggttggccagtggggcccaccgggatcacttggggggctttgaaaactgttgctgcctgggtcccacacctagaaattctcattcgcttggtttgctttgggatgcagcctgggtttgaggatatttttttcaggctccccaggtgattgtcacgtaaagccagtattgggaaccaccaccagtagaagttccccacaaggacatgagaggaaaggggcacctgcttccactgcaacaattagccctgctcacattgatctctgttatctattgaggattcacaggagaatgtgaaggaagggcctgcatcttaaagctagaaaccactgctctaaaccatgtagactagctgcctggagtgtgcccctttatcacatccagccactaaaaggttgagtcagccaagagaagaccgggggaagagaggagaggtaggtgagcctagggctggcatcactagcgtatatgtctgtattcaaaagcaatggcttcatggcactatagaagtagaaagaacctcatgtgtgaaaaagaaattggtaaagagtatctgagaaaagaagaaaagagaaagaagaaaaggaagcaaggaaaggaaaataaggtttagcagtcctgggctatgattctttgataaggaattttatcatggtctagattcctttaaccccttacaggggatactccagaaagtgacacattgtcgtttcccaagcaaatccagtgctcctggagtccagtcttctccctctagtccagaaatcaaatgcatagtgcctgaattaattgcagaaaatagagttcctcaatatgtccacggcattaagatgccaagagaagccaggcaaggtggctcacgcctgtaatcccagcactttgggaggccgaagcgggtggatcacctgaggtcaggagttcaagaccagcttgatcaacatggtgaaaccctgtctctactaagaatacaaaaagtagccagtgtggtggcaggcacctgtaaccccagctactcaggaccctgaggcaggagaatcgcttgaatccaggaggcagaggttgcagtaagccaagatcataccactgcactctagccttggtgacagagtaagactccagactccatctcaaaaaaaaaaaaaaaaaaaaaaagccaagaggtagagagagatttcatagagcccattatttaccatacactatcaataaccttgaaattcccttgaaaggcatttttttctactccatatagttcaatttaggttcttgggtttgcgtttgaaaggattccatcccagaggcaggagaagttaactttttccccacctctggggattttagacctggcgagttgaagtttactggaaggcccctaaggagacccttcaagaagaagttggctgtgcagatggcactcaggtgggagggggaagaaagatggtcttcaaaacacagagacgtgtagcatatgtgttagatatggttctggggagaaccatatttaagggaggagcggaggagaaacctataaagaagactcaggaagaacagcctgaaatggaaaccagcagaatgtggaaggggaaagcatttcaaagaggaaggagcagccagaggtgttaaatgctgctcacatggaaagaaacacgaggacgaaaaagtgcacagcaaagataatatttctgaaacgtgaaaccaatgtatgtctgtttcatgctccatagatcgtgttccctgtaattttcccgcacccgcggaatcaatggcaccagtgggtgctcctgaaggtgcctctgaggaagacagtaggtgccatccagaacaaggaagtagttgcttgattttgaactgtacgttagcaagctttattaggagaggaaagagttttcctaattccaaaagcagctcccctttgcatatgaagagcagagggtttgaggctctaagccatggtgtagacaggatgcaggaaatgacagggrggctgcttctgggctgtggaagatgggtggaggggacaaaatgagaagtgtcctatattcctccccaaaacctcctggtttctggatgcttcctcaaactttaatctcccagctgcctttgttctctaagtcactggttctcaaaccttgtgggaccaagggctgcatgagaatcacctaggacccttgttaaaaatacataatttcagccacctcaagatctatatagtcagaatttctaagggtaactgagaattcgcatgtcacgagttccctggaaagattctgctgagagccagcgtggaaagccccggcacagtgagtgttcctgttggtccyctctctgaccacctcagacygactacatctccaggctcgaaggacctggcccctgaacccccaccctccactgctttatttttctctgtggaactatcaccagctaacattccattttgtttacctgtttattgtatgtccccttctgctagatggatgcttcaggaggacaaagtctttttgcttttttcttattttctttattgttaactgcacacactaggtacataatagacattcaggaacaattaatgaatggatgtatgaagaatcaaagaaccgagaagctttctacctattctgcctaaggatacatgatgaaactaagctaaaaaaatgaaagggaaataattctatcaagaaaaaattaaataagaggatacagcaaactggcttttcctttagagagtcaccaatatatacacatatacgtatacacatacaaaaagtcacagacacaaagagggaaatgagccacagtgttaggagatagctcagagactctgagccacagatactcggctgtgggtayctgagtcagttttcctggaaatagctttgaaataccagcatctctagtcctttctgaatttgtaagtagtctttggacttttgttatcaaacatcagagtttattcttgaaataaaagtttgtttccccttggaattctgaggctttctcctttagaaccttggcagcctaagtccctctctacctgtgtctttaagtatggtcaatattcaaaagctttggatggcgttgtcttcgtttatgcggatattaggttgcctcagtcaacaatgcttgaaaatggctttaaaatgagcatcatatcatgaagccatatttgtatttaaattaaaattgtttttttttttggyctatgtcataccagggataatatagagcaacagagaaccagggaaaatgtgattcatgcatctccaagtcaggaaaaagagactattggaatcatagccagcgacaaacaagttattgggatttatagaaaaggatggctgagcattcctggaaaaacaactgactttttgttgttgttgctgttgttagggaagattttgtctgcttaactggccagagttttcactccatcccccgaagaattgacgttttaaaaagcacaactgtagatttagattttcacagtcttttgctagattctttaccaaagactattagtgagtagtaaccctgggattgtytaaaactttattaaggatgagggaataaataggtttaatttcaggaaataaaactggggctaaattagtacttctctgacggaaaatgtataaataatgtgatcccctggggacccaggttagcaytagatttatttttaaattttataactcatctgaaagagagagaacayagtggaatctatatatttgtatattcctctaagctgttctgatttgaaagatattaaatcaataggaataactttctgagactcttgtaagattgcataagtcagcacaaaagtggcaggtaaccttcagtgtaagcaagaataaaagaatacatttaggagaaaggcatctaaactgtacttatatgatgatgaatttcaagctatgaattactaccagggaaaaggatttgaaatatggaggaccgaaaaggccccatagtcaaataatttggtgaaatattacaaactatattcttcaagattcaccatgtacctgagcatatgaarggcttgagaaaggcctgcagtaaagaaacctgcttaactttgtttattctgggctcaaataggttttcaaaaggagagaacgtgggttgttaacttcctggttggctactgagagaaatgagtctcttgagcaattatcctttgcaggtagcttccatgaagaacccagtttttgagtgcctctagcagagamtaagcttcaaacctcattaaccatggatccaatccaatatggcagcttgtatgttctccattctcaaagcccaatataaatgatgggctttcttcattcacccagataactaagagctgatggtaccccattgagcagatatgggagacaatgaatcttcatagatgagtgcctaaggatatatgtgtcactcaagagtaaatgaaccaatcatgttgctatgcatagggactcagttaaagaaaagtcagataaaatgggaggctggtatctcgcacagcactgatccggctctctgcctaatttttcacttttcatccagatgttccccgtcaagaaggcacagtcaataatgtatgaatcttaaaggcagaggcagatgtggttattactccctgtaggcatttcctgacttggagacgacatgttactcgagaatgactacaatttttaaaaatttaagttgatatagcccgcttatgagtaaatgcatttcagtgcaaaagtcttttcagaattacagtcatcatcacagtttagtttggcctttaaattttcactgtaaactctccagatggtcacatatgggggcttctaaggcagaacacgcttcccaataacattagagcaagcagccttctctaggaggcatccatttccagcagtctatttttaatatttgcttttatttcttaatcctcctgaacaataaaaatgaacgtcattataaccaagtgtggctgtagtcatcaatacttcagagtccaaaaatacattggccttgcctgaccagttgcccattttctggaatagctgggtatttatctagcagygagagaccattatcctgagacacagtcgtgttccaccgacacctgatctactaattaaaatcactatcatgatggactgtttaaattctggtttaaatgttccttttgcatttgcatttaaaagaaaacacactcctcatcatgggcaccccagcctgggttataatttggctttcctttgccagaattataatgtcactctgacttgccgctggttaaatctaaaagagcatctaaatgtgcctcacagcttggctgttgcttggcaacgccagcagccacctcctcattggggtgacttctaattggtcacaagtcttgacaggagccactgacttattagaaatgacacttgattattcacctagatggctagagctgatacttagcagcaggaaattttgcataaaaaggagtcgtggatgtttttaatatctgggtggcttttagcgatggtgtagtggaagaaggaagtgataagtttcattagtggaaattaatttttcatttgttggtcaccagtttagagcactttaaggcattaattttttcattttwaaaaaaaacccagaaatacgtttaaataccttcccccacccccagcagctgacccttacttattcagaaaaccctcctctgacatcagccccaaaatattgcccccaggtccaccaagggccaaatcagatgaaatgttcaatttataaaggtcaacaaatatttattaattagttcctgttgttaaggagtttataatgtagaagagaaacamggtacataaatcactgcattattaccaatcgtggaaggtggtgacagagctggggtcctgctttgagcatcagaagccactttggcagggaggaagcagtgagtagcaccggaattgagctctgaagattttgctgttttgacagagggagaaggtgcattgcaggtggaatgagctgcaggaatcaaggcatctggacagaaaagtacagggtatgttcagggaataggggagtacaaattggctggaacacagagtacatgtaagggattagtgagaaagaaagctgaaaaagtaggttgaggcacgtacagttcactgttctgtgccgagagagtgtttggtgcacacttcactagagctcgaggagctattaaatacttgaaagtgagggagtgacctgctcagaactctgtgttaggaaaaagggtttcatttcagctgtttagcccccaagccagccatttcccagacccatggggcaaatctttctggtgcagatgaggggaactgtgaattgtctggaggagtctcctctttgtagtagccccaagtatgggcaggctcccaggggccatgttatgacatcaaggcagcggtgtccactgtggctcttttgagtccctcttcgtgtgtggatcaacaagtcacccaagctacacaccatcaacgtttggggcttatctctgtttagatggatagggttatgyaaaaaagaccctctccttccctctctctgtgtargaaatatgttttccctagcactcagcattgtccaaactttcargaactccaaaggcttaaagatggtgggttttttctttctcaagtttatgacataagatctgcacagaatgacctagaagtgaataaactaaggagcaaaggaaatgtggaggctgagttttgtgggaaagcaacaagccaggagtcaggatatctggggttccaattctcatttgaacacaaaaataaccagattctgccctttaggtccctatgtattctgaagttgatgtgtcaaagaaatgacaaaaggctttcttgggaatgggatgtgttgctgaaagcacatggaccaatgatctgacacttccctgcactgagctaagaatttggctgctctctccatggcttcaagcaactgtctcaacctgatgctttgtgacctccttggaatcttcaaatgtcagtggaaagggacattatagctcattgcgatcagcccttcatttagggatgaggacccacgttcagagagattcaaatgccaggtccaaagtaacacataggaccagcatgagtctcagctttcttcttcagagccagttttcagcaaaccacactgtattcatgctaagagacagtgcctcaatctgttcatgtttcttgggtaccttctatgtcaaggctctcaaggaacatttgatcaatcagtcatcacacaggtatttctagaaaatcaacagaatggggtgtgctatgctcattcttgatataacaaataccaaaaacttcattaatccatgacaacatgcaatagttaccacaraagagcaatattgagagtgtattagttatctattgctgtgtaacaaaattaccccaaaacttagtggcttaaaacaaacttttgttagctcattgtttctgtgggtcaggaatcctggcatggcttagctgagtgcaaaggctgagtccagagggactgagggctgaggccagagggatcarggtgtcttggagtagtagtcaaatggctggcctgatctgtggtctcatctgaaggcttgactgggggaagatctgcttctaagcctcatcacacggttattagcaggattcaattcgtaatggactttggaagataagaatcttgtactgtgtccttcagtcagtggggatctacaaatgtttcagcaaagcattactgaaataacaagtatttttggaagatctggccaggcatggtggctcatgcctgtaatccmagaacttcaagaggccaaggtgggaggatcgtttgaacccaggagttcaagaycaacttgggcaacatagggagaccccgtttctacaaaacattaaaaaaattagccagctgtggttgtgtgtgtctgtagtcccagatattaatacttgaggggctgaaatgggaggatggtttgagcccaggagggcaaggatgcagtgagctgtaatcatgccactgcactccagcctgggtgacagaatgagatcctgtctcaaaagaaaagaaaagaggccaggaagctctttcaaagaactttctttagtacacctgggtgtcaggcactrtcaaagtcctaagactacaaagatgcttaggctatagtcttttttctcaagaaggaagatgacaaccatattccaggtgacaagtagcaacacctgaactaggaggtgactgaggagataaatatgaaagaacagatgaaagaaaggaagcaatgttaacatgatgaggcaagaacagatggctccaatggggagttgtccctgaggaacaagaaaagagaagagaatgattccagtagtccaaaccagcctgggaggayggatccctccagaggacaactaccatgtttacaccactccctgcyttctgtgccaagtgttttgcatattttgtttctaatctttgtcacgactcttcaagggaggtattattttcatttttgcagatgaggaactagactcagtgaggttaggcaatgtacccaagatcacacagctataaagtgccaggggaaggaaacctactaatttgcagtgcctttgagtatttgctatgcttggggcaagtattctccaacaaggtcggaatcttacactcaaggaaggaaactcagtgatgagattctgtgagtcacccaaaaggagaggagaagaagacctttgagcagaagctctcagcccttcttggtcgttactctctttgcccactcatcaggccctccctccttttagaattcactctgttgccctctgtctgcaccttgactcaaaatttcacagacacagttggtagaaaatccattaaaaaaaaaactggtgcccatcaatgacagactggataaagaaaatgtggtacatatatggcatggaatactatgcagccataaaaagggactagattatgtcctttgcagggacatggatggagctggaggccattatcctcagctaactaacacaggaacagaaaaccgaacaccacatgttctcacttacaagtgggagctgaacaatgagaacacatgcgcataaggaggagaacaacacacactgaggcctgttgggggaggggggaggaagagcatcaggataaatagctaatgcytaatacctaggtgatgggttgataggtgcggcaaaccaccatggcatatatttacctatgtaacaaacctgcatgtcctgcacatgtatcccaaaacttaaaataaaataaaattttaaaaaactgggtactttaattacataagaatctccaggttatgcagaaccttccttccttggggaatttgcttcccagggtggggatggtgatttcccctgaatggttaccactggttgccagacagctgctcagcctcacactcggcatcacctgtgtagggacaaccaatgtgagaggcgagaggaacaaaatgggaaactttctcccctagcttggctactgcactgcaaccccggtcttagcttgggctgtcataaccaaacaccattgagtgtgtggcttaaacaacagactttttttttttttgagatggagtcttgctctgtcacccaggctggagtgcagtggcgtgatcttggctcactgcaacctccacctcccaagttcaagtgattctctggcctcagcctcccgagtagctgggattgctggcacgggccaccacacctggctaatttttgtatttttagtagagagggggtttcaccatgttgaccaggctagtcttraactcctgacatcaagtgatccacctgccttggcctcccaaagtgctgagattacaggagtgagccactgtgccaggcccagacatgtattttctcacagttttggaggctgggtgccagcgttgttggtttccagggaggcctctctttctggtttgtgggtagccgccatcttgctctgtgcccacaagacctgttctttgtgcatgagagagagagagagggagagagaataagcatgagtgctctggtgtctcttcttataaggacaccaatcctattggatcagggccccatccttgtgactttaaccttaattacttccttagaagccctatctccaaatacagctacactgggagttggggcttcaatgtatgaattttgaggcaacccaaacattcagtctataagaactcccaataaatcactttttttaaacctaataacattaatattttatctgattataagtgtaatacatgtgcattgtgaaaaatttggaataaaacaaaaaataaaaattactcattatcccatgaagaagatgaaatgtaacaaccgaatgcatcttttagtaagatctgagtgagaatagcattgtgtattcatctgtgcatgtgtgtgtgtgtgcacatgccacgtttgcctgcttgttcaaaaatctaggagaagaactgcggggtttgtggattgtataaagattatgcaagcccatcaaagacagcttttgtttgtatgcaactcatgtaaaagtaaatattccgtaactgctgtgtaaaatgcaaggaagaaaacctgaaatgatggctattggccaacatacagattatgctcggctgtcttataatattttctctgcattgctttttaaaacatttttcatattacatgccccatctcatatcacattaacccaaataaaaatgtcattatccattcagttcgacagacagcaagcagagtatcgcagaaaattacaatcacgtcaggcagcaacaaaggattctagtcaaargcacgtagaagacccgatggtgggcagctggcctgggctytctttcacactgtccaggaatatgtttggattcagaatgggtggccccctctttatacacagggcatgcctctgaagagttgtgtgtaaatcacattttatgttccatctcttttgttatgttaagaaagcttcaagctagatatctaaaaagacttcctttcaaacagtacatatatatatgtagatagatagacagattttcttttaccatgttactattcctctgaagtaaatttaaaaggtatttaggtttatgggattttatkaaactaggattcagttgtaccactaaacttattaagataatcgaaggaagatagccagtaaagctagttataaaaatgtggcttagactgtactgacttttccaatgttaagggtagactgagacttcttggaagttggggcctagagaccattttaagtgacccattggcacacccttttgtactgatggattattaaatcgatggtttgtgagaatttagaaaagcatacagtagtcatgaagcatcaacacagagatactaagaataaatcaggatagtcatacttatttttcttttttgagtggacttccagataggtagatgaggtaaatcacatttctgtttctrcaaatcatttgacaaagtcttccccagctgactcatcagtaaagcggtgcctggctgagtatttacttaggttcatgcacagatagcccaagatccaaaaacagtgatgatgaatgattctgcggctacctaaacyagctgtccagtggaggggcacaaggctctgcaccagggcctgcctacagaccaatgaactgaagggaggcttagaaggcacacttactacattgcagatagaacgaagaaagaatagcccagtgttgcaggtgatgggatttttttttttttttttttttgagacggagtctctctctgtcattccagcgatgcattcttggctcactgcaacctccacctcccaggttcaagcgattctcctgcctcagcctccgagtagctgggattacaggtgcctgccaccacgcccagctaatttttatatttttagtagagagggggttcactctgctggcccgccaggctggttttgaactcctgacttcaagtgatccgcctgccttggcctccgaaagtgctgggattatagacctgagccaccacgcctggccaggtaatgggattttaatgagtgagtacatcttttgctcccccacagtgttcaaacaccccagtgctctaagccctgtggctttatgaacagcaaatctattttcccaagatggctctccctccatgagccttggcaacagggcactcatgagtctcagatgctctgctatctctccacttgggtgtgttatgctgtgaacattctgctccttgagctgttgttcagccgtccatagcgctgtccaggccattgtccctgccttggttaccacctccacgtggcagccttcatggagccattgcagctttgatctacaggactccctcgccctccatctacgggaccccctcgccctccatctacgggaccccctcgccctccatctacgggacccactccttcagcagaggagttgggcccctggtaacacaattctttccttacacccagagcacgtgggactgactcggaggaaactgcagaggagaggggtcctataaaatttcatgtcctcccaacatcctgtcaatagccggccagctgtcccactctaccaggtgtctccaaccaactgaatattccagagaagataagagatcgttctgctcagaacacacggcaggacaactagtgcctttctaatgaatggtccctaaaaaaatcgaaatagcaattgtacctggttatcatccatggaaaaagacctcgtggttttcattaacctgaacctcaatatttgcctgcactgtttgtcttctagaaaagtcaacataaaactggctttgcgattgacgtgtagggtacagatctcaggaagtgattcatttaccatacaccaatccacacctgaaatactgtattccacttatgaggccacctttaggagtgaccctgataaagatgagagcaataaggcaggaggggtgtatgcaagccatatggttcagtcccccattgaaaggatgggggcagccaggcacagtagttcacgcctgtaatcccagcactttgggaggccaaagtgggtggatcacgaggtcaggagttctagatcagcctgatcaacatggtggaatcccgcctctactaaaaaaaaaaaaaaaaaaaaaaaaaaattagccaggcatggtggcacacacctgtaatcccagctacttgggaggctgaagcaggagaatcacttgaacctgggaggcagaggttgcagtgagccgagatcacaccactgcactccagcctgggcaacaaagcaagactctgtctaaaaacaaaaaaaaagaaagaaagaaagaagaaggaaagaaagaggaaagaaagaaggaaggaaggaaggaargaaggaaggaaggaaggaaagaaagagaaggaaggaaagaaggaaggaaggaaggaaagaaagagaaagaaagagagaaagaaagagagaaagaaggaaagaaagaaaagaaagaaagaaagaaagaaagaaagaaagaaagaaagaaagaaagaaagaaagaaagaaaaagaaaggaaggaaggagggaaggaaggaaggatgggaacagttgtctaggagaagatggggagcagataggtacttgctgtctgagtgtcgggtgcactgtcatgaagaagagaacagaaatgaaaccagcaaaagattgttagacgaagtcagattttgcctcagtacaacaacataccttctgagaagcagattaactttataacttttcccagtgcctcaagactttaagaggaaagagtgggtattacataatcagtacgatgccatgattcgttcattcacttaacaaataattactatgagccaggcgctgttctaggtgctgggtttataaaaatgaagaaacagactaagatctctctgacctcgagaactcaatattctagtgtgaaaatcatcaaatctaaacataggttacattttatgtctttcatgagaaatgctcagaatgatgtattagagcacgttgctttagctgtgatgctattctagaatgggcagcgaataaaatgattctgctcgatattttcagcttggccttttaatcatgcaagagagaataaaaggtcacatgggtggccagcaggctccacaaagaattccacccacccgtttgtcgaagycgagtggtatctatgtgaatctccattatgccactctacctttctgtgtaagttaggaattttctaacataaaagtattttcctattaaaaaaaagaaacccaacaattgccccatgtgggcataggaggcatcttgaagtcaaggttttcccagtattcgaaagcttagcggcttaagcacaaaagaataaccatccatcaggaatgctctataaataatttctgtgttaaataagaagttgaaatggatgaccttaggttcctttggatactaagattcaatattctagtgaaagatctaaaatacaatcggaatacacaagcatagacttgggttaattccagggattgtgcatatggattaggctttatttactygctaatgctaaccaaatgtcatgaaactgagtactgattctcagttttgtctaagcacttaatgatcattttcataattatttcaccgtattcactgtaaatctgttcttcttttttgcttccaaagataaaaaatgcttaagctaaaatagacgtttagagctattgtattttatgaatatttgtgaattttaggatcttcttcttgaatcttagctgtgtgaaaaatatcttccaaacagtgttcattttcccagamagcactacatataacctcttcatctgcagccaatttaggtgtactcccggcatggtgccctaattacacctttgttatccattatcagatggttcccctcatcagccaagcctgcgamcttmtcctggctcatttaaaacgctatgcggaatctggggacgcatttgacatccagaggtaaggctgctgcattacagatgagaaatcgagtttttgaatcactgcttcttgtaactgtccataattgctgacaattaccttgggactagcaaactgtggaaacgctagaagctcataaaagcatggatggactgattaataaaaagaaaagaaacccacttaacatgggaaagagatgtgagcagagccagggtacgtgcgtcctgtcgaacctgtggatggatccaccctctgacctccacagacccaggaatgggcaggacaggcctgcgcctaaggacagggatggggggaaagttcaagcattttcacttcaagaaaaattgtggtgcacctcagcccagaagctataayttagtggtggacaccaaatttaaataactgattatctggcttttcgtcattttgtaactaaaaggtttttgctttaaaaaaacatctttagtctaagtttgtccgacccacagcccgctggccacaagcagcccaggatggcattgaatgtggcccaacacaaatttataaactttcttaaaacattgtgagtttttttgcagtttttttttttctcatcagctatcgttagtgttactgtattttatgtgtggccaagacaattctcctgcttccaacgtggcccaggcaagccaaaagatttagccacctttgctttagtcattttatgccaaatcatggcttacagcagataaagaataaagtgggatggtgaatcatccagaaatttattcattattatcattgctaataaaataataacataatcatcaccaacactggtattgcaccagtttacacagtcttttcatccacattgtctctgattattataggatgcatgagttggctaaagataaggtggcctcatcagctataaaagcaaagtaaataaccctcaagacccttaaatcttcaaccttcaggatcagatgaaatcacattcagtagtctcattcttgttttcactctagcagggaaaygtgtaatcagttgtagaaacgttttcaataaaagcagtgtgaattttaaaagtcatctggaaacgtcatgtattccttaatgataagttagtggttatagaattcatgtacaaaaggagttaagtgtgtgcctacattgagaacaaaaattggccttttaattataaaaagatattaataacccagtttttagctttttggaaaagaacttaatctgactactcctataagataacaaaaagaatcatttgagtttaaaatggccttttgagggsgcagctttcctatagcctaagaggttaaattttctggagctcctgccagacacttttccttctgtttgtttctaaagcacaatgtatgttttctgtaataatatacagatgttcatgaagcctgccttaaagtttgtcttgtgtttatttgagtgctaagagcccttgctttttgttcrttgctattaagaaaactgtaaaatcattaagaggaagagggagacaaagttaataaaactagataattaggttgttaattcatcaaggacaatttgatgtctatcagtcaatcattagattctggcctgagctgggctgtgcagagctttgggtacagcatgtaggcgttgggtcacctgtgtgccctccttcccagggaggaaactataaagtgtccttcttagtacctggctgtgttctggttgaccacagctgcctgaggctcgaaggtggaagaggctgtgccctcctctcctcccaggtctttgtttagacgccaggtcttcgtgtctcctcccaccctctgccgtcactgctcagagtgccccatccaggagcccatctccctccacctccccccagatctgcagaagctcctcttccagacacatctgcagggctgggcaagccagtgtaagcaattcaggccctcctcctctggagggggccattgtgggtagcccctgccagagtcctttcagatctctgtgctcccatctcccgtaggtgctactgcaattacaccacagatgtggttgccagcgtcgcstttggcaccccggtggactcctggcaggcccctgaggatccctttgtgaaacactgcaagcgtttcttcgaattctgcatccccagacctatcctggttttactctgtaagtgcggctgcagcccggggcgctgcgatgactccagcaagttgggcagaccccatgacacctggggtggcttctggggctctgtccctgccactgggaaagggcactcgggttgttcccctgcagaggctttgtcttatggagccaccgggttcctcttgtcacccgcctagggccacttattagcaatgctgtagccctggcattggtaataagtggccccaccgccatggtgagaacggttgggacgcaccgtgttaggcacggggtgtgcgttgcctcacttagtcctagtactcaccctatgagaaaaatattcttgtccctatttctcaggtgtgaaacaggcctagaaaggccgagctgagactggaacccaaagcctttcatttcctagggcatatttctttccttcagcaaaatcctcttcacaagacttctccacttgaagcccaacacacagaaatcctgtgtggtggatgaggattaggtcacccaatgcacgaggaccagtctatttattttattttatttattattattattatttttttagatggagtttcgctgttgttgtccaggctggagtgcaatggcacgatctcggctcaccgcaacctccgcctcctgggttcaagcgattctcctgcctcagcctcctgagtagctgggattacaggcatgcaccatcacgaccagctaattttgtatttttagtagagaaggggtttctccatgtcggtcaggctggtctcaaactcccgacctcaggtgatccacccaccttggcctcccaaagtgctgggattacaagcgtgagccaccacaccaggacttattttatttttattgtagaagtgagattttgccctctggccaattctagtatcttcttgcttttataggagcattgacgtgttgttatgcttggtattgattattgccatgatttctaaccattctgctgggctggtaaattccattcattccttgaccagtttcattcccgtttctgagccgatgtccatgggagcccgtcacctcactggctccgccctgaaatcgtaggcagagtcactctgagtgtccagcagtctcttcctgcaccctttccaccgatcttggaggcagcgcaggctgtgtctgccccttgtgcctcaaccacggcccaggcctgtggggcaggtggctcagttgtgtcatcccttctatttctcctctctgcctctgcagggccctcctgctgctgtgtcacattggttcggactctggctcttgaaaatgggcctgcgcattctgagagcatgtgtgtctggagatgttctccccagcccagctcccatagagcccggtrcagggtgaacccacaatggaagctgagaagctgaacccagccagtgcccctctccaggggagatgaggggttcctgactctggcagcccgatccccagcacatggcagcaagggcccatgctgcacccaggggccggcaagggaggcacccacagcagcaacagccagtacccttgtcagcagctgcagtggcagctcttgggagcaattcaggaggtcatgctgggaacaattatccactggaaagaaaattcaaatgaccagaaagtttgtaaaaagtaaatcagcttctaccacttgctaaggcttgaaacagcctgtaatcctttctctcttaatgaagtacaaagaccttcaggtctcatccccaggacctgaaacattaatttatgagggtgaccttgacctcttgagggccagatggaagtgcagactcgattaattgcacagatgtttaytgagtgcttactatgtgccaggaatggtgaggagtaccgagagggagtgagacatcacccctgctctcagaagcagcagtgcggcggggagggcaggactccaaaamggctccgattccaggcccgcgtttgcttcccgggaacaggcgtctaatggccctggtttattatcacccccttttcaatgccacttttgtttttctctttcaagtatcatttccatccataatggtcccactggcccggattttgcccaataagaaccgagacgaactgaatggcttttttaacraactcattrggaatgtgattgccttgcgggaccagcaagctgccgaagaggtaacgtattttaataggacacagccttgaaatggaatggagccgactttggcatcactgtctctgctctttctcttccctctcagccccgcacatcacaccgtgccgtccttcagcaacccaccacttacagcttccagggacagtggagagaacagaggaaggttgaggaaggtcagacaagaaagggagggtgggacggcagagagaagcctacagcaatgtgtacatcctcggacacggacgggtagaattaaagccgcccccaaaactgtctccctagtgcaagcatcaacccaagcacaggttagaatagcccagaagaattttctgggtaagtgtgcccacatgcaattttcatgagcatattctttatattgaaaacccagcaagatggagttctccagcatgaacagcatgcttattagagagttcggcaactgtcagtcactaaccccacactcccactcagcatggaggatgtcgctacagaactcgtggttgagggccccctggactccttggcacgattcatatgagacgtagcattttctttcctccttgcagatttgcactatgcttggcacatagtaggaatcaagtaaatatttgttgattgaacttggctaaaatagaaagaggagttttcagtgggaagaaaggtcatttcaatactggatatgcatatgcatatgtaaatctgggctttaaagcccttgtcacattaaagaaagttactaaaaaggaaaacagggctgaaatggcctttccttagctggctcgtgcaagatgcaactttaaaagggttgtctcaaagactggatggctcagaggaattggtgagggccaattgttaaggcactggcctgaaatgaaatcaggggtcaattagtggcttgatacaccgagcggccttgggcagcagccgcgtcctgtgcagcttcacgcccggagaactgtgcagcaaacgtgtctagatccagaaggcatgggaaggtgtaggcaagcttgcagccccytcggcccacaccactgtgaactcaactcgcatgtccttggaggtgcgggaagaagcagctaactggcatccctgccccagctctgaagcctaaaaggacagaacattctgatccaggttcatgtttctccgcagagtgaggctggagccagggggagaagggataaagaaagaaccattttcaaccctcaacattgctactaagggccaccttttgagagtgttcacacacacacacacacacacacacacgcatccctagcctggctgtggaatcaggctaaaaattttaaaactgttgcatcgaatgacttactaagaggtgagaggttattaaagatccaattactgggattgcctagagcttttccttttataaactctagtgctatttgtttcaaacaatgagttgatctgagaaaaatctcccaaccacaaatccaggacagccatgtcaagacagagctatacggttactaagaaaacttgctttaaaaccatctaaagtctgtatacattccatcaagcagatgtgtgtttgcgcagtgaaaatgcrgcacagatgttaaaaggtaaatatttttctaagctctagccgatgggtggattagacacctacatctatcagggtgcgtattttccttggataggaccataaaccagcaccgtttcagtcctcaatgggcagtgttcagatagcctccctgatgccatgtgaataaaagaaacccatctatactaatgttcttctccagtgcacgggccctggagagtggcctttcctctggcctctgtagctggaggttaagacagatttctgcaagattctgacagccctttagcagtctgtctgggctgggataagaggaaaggatgctggctgcagttttgcccatggaaaaatacccggtgtagaggtggctgtgccctccctcccatcattactcctacactacctcagcaaagccatagccaagcctcagggaccacaatgatatcacacccygaggaccttcagagggactgactgagaggtctgggggtgctctggggtcctgtgctggtgtcccagagctgagggagcaagggatgctcacttcccctgcgtgccatcttgcctgaccctgccccagctctgctccatgggagcagggccagcagtgggaccacaccagcgcccattgaccgagcagcaggaaggaagctggggaaagccagcccttgaggatgctgtttgaaaatcagaacgagcagggccagggtggaatgaagccaccaactacccccgaccctcaccattttctcagctattacaacccagcaggctgttgggaagctgaggccttgcttccttagactcaaggtctgtggcacccatagtcttaaccttgagcactgctaggatcccagtaggcaccttccaaagtcacaaggctggggtgcagtagagctgcaaaggtgtcagcagccaagactcccgctctaaagagcattcacttgtcatcaaactcagcatacccatcctccaaatgcacgcactgcattacatttttatctgttgagtcatggactgcagatttaacatgtgctcagcataaaactaggcacggtgtcaggggttgagggtggggtcctgccctggagttgcttataatcttatggaggaggaaaagcaaccacacatgaaatgacaacaatcttaaaagatggaatcatcaggaggctgaggcgggcggatcacctgaagtcaggagttcgagaccagcctgaccaacatggtgaaaccccgcctctactaaagatacaaaaattagccgggtgtggtggcacaygcctatagtcccagctactcaggaggctgaggcaggaagatcacttgaacctgggaggtggaggttgcagtgagccaagatcacaccattgtactccagcctgggtgacagagcaaaaaaaaaaaaaaaagatgaaatcagacgctcatgtgtgtggcatagattattaatgcaatcgaaattcagaagccagtgaactgagaaaatgctgcagctagcagagtactttgcatgaaattctaatatttttctgttggtgattctgatactctccttttgccattttagtcccataaacttcagaaaatggaaatgtcttggttgtccttcatgacattaaagagcatttcaaagaagggatgttctaggaataagctttgttaacacagaggcgatatagaaacactcctattgttacaattagtaatagtgaaaatataaagaatatgcaaatgactgataaagaaggtagggggaaatggaaaaaaagctctgactacttaaacgggggcaggggattactgagaaatagagggaaccgatgtgaagatctgatatgaaggctaggggatgaagaaggcaaagcctggagactttgaagacaggcgccgccaaactagtcccctcgccttgccctcacttctgttaacttcctactgtgtgagaaaaactggtggctgcccatctaagccctaagctgcacagaagtgagcagtacagcacatgcttggttttaaatctatctatgtgatgttgccattgttttattgttggaaaaccaaccaccaaccaacagtacaaaaatgtataaagtaaaaaataaaagcccccctcctggttttcccacctcctccagctcattatgaactgttgggtggggacattgctaaaatcgtctatgtgtagacagatataggtgatgatatatttagtacatttgctgtttttgcagaaacgagagccacagtgcatactgttccatgaccggctttgtttttacttaacaaagtggctcaatgactttcacatcagcccagatagaatggcctctgccttgctcagggcagcagcccaggctgctcttcactgccccagaacctgcctgaccagtgctatactaagggacattcaggtggcttccaggttctcaccgtcccagataacccagcaatgaggaagcttgttgctactgagctcttcaaaagctatgcccatgtatcttcctcctttgttctccaggaagcctcactcttcatgactgtaaggtcaaaatgtgcatttttctccttttgttccttagaggcggagagacttcctccaaatggtcctggatgcccgacattctgcaagtcccatgggcgtgcaagactttgacatcgtcagagacgttttctcctctactgggtgcaagccgaacccttcccggmaacaccagcccagccctatggccaggcctttgactgtggatgagaytgtgggccaggccttcatcttcctcatcgctggctatgaaatcatcaccaacacactttcttttgccacctacstactggccaccaaccctgactgccaagagaagcttctgagagaggtagacgtttttaaggagaaacacgtgagtacaagttggatccagttacccatgggatatccayaggacaattgattttgtgtttgtgggagtgaaacttatttttaatgacttgctaatatcacattctaagcttataagatgaaatagggtcattgcttggcttctcctgctctccgggttagcaagcgaaatgaaatgttgagaacaataaccacaacaaaaagacaaattgtgtgtgcaccttcactgtctggggtagtccatgaagccaggcctggctcgaggaagctgtggaagcccaggaaggtgtcaggcccaaagggcagggatggggaaggagtcatggcttcccaatatctgacttggagctgccacacggagggaggcaggtgtgagccagaaaggagagccaagatagaaggcaggagtggacaaaaggacaggccaagctgaagctggactgaagactggaagctgaggaggaggctcacaaatggaataagggaagatggggcccgtcagcgcccaggccagcttcagggcattttcttctagatgaggcccctcttgatcgyttatagcagatataacgagggtgctgagcaaggctactttatcacctcattttttcytctagatgcttgtgtgtgtataactttgactcatgagttgtcaaagagattcatttttaaaatctgtactttaaaaggaagaccaccacagtggaatcctttctgttacattctgatatgattgctattacattcaccattttgaaaggtggtctgttctgttactggaaccattaaaaaatgtttcatacaatgaactgaaaaccacttcccgggaaattctacttctttattctactggggaagtaaaggcaaagtcartgtctcttcttcacagcagtttttaaatatttgaaaactgcattcactgtgttactaattaattgtcttaactttaggctcaacatgagtttatggtcaacttcaagttctaagtagttatgacaactgccaagctgggcctttccaaaccctgcttacacaattgatttattgagcctagacggaagagtttatatttatccttattactgttcaagtcagtcaaaataattttgaatcttgattctgccatctgttatattagcaattcctccagcctcgtgtcatctgagacttattaagcatgtctcctatttcatccaagtcattgattaaaatgttgaacaggacaggacttccctccagattgacattgatccattaatcaatattctttgggcatggaatctcaacaagccatgaatccaaataaccctgccacccatcttattctgttttatatgtagtggtttgtgtatttgttcttaaattgaggaaagggtagagggagggaccaacggtgactggggtgcattagtgcaaaagaagtaaaaggagctggaagcgaggcaatctattaggatacatttagttgcagataacagaaccccaacccaactgatttaagcaaaacaaaaacaaaaagtaaaaacaaacaaaaagactcataaatgtgtatttctgagtacatttaattgagcagctcaggaatagatgtggctccaggcaaatctttgtctaggtctcaaactggtgcacaggtccgtttctctctcgccagttcttggctgtgctctcttatattggccccatcctccatcatgctctcctctcaaagccccaagaagcctgtcaagagtgtctgggactccatacttccttgcttgtaaccaatggagaagagagggtctgtggcctaaaattcccagaaagagtcatgagggtcactctgacgggaatgcttaggtcgctgcccattcttttttattttttttttgagatgaagtttcactcttgttgccgaggctggagtgcaatggcacaatcctggctcactgcaacccacacctcccaggttcaagcaattctcctgcctcagcctcccgagttgctggcattacagacattcaccaccacaactggctaattttgtatttttagtagatacggggtttcaccacgttggtcaggctggtctcgaactcccaacctcaggtgatccgcctgcctcggcctcccaaagtgctgggattacaggcgtaagccaccacgattggcctgctgcccattcttgaaccaactcttgaagcaaggggaatggggtccctgataggcttacaccaatcagactctagccctcagtcaatcatgctcaagtcacatgactgagaacttgggaaggtgacttctcaagggaagcttagcatgctgtcccaggaaggcattagagggaagcccagcgctctggtctcagtaaaccagaaatcacaccaaattaagggctttgaagcatctaatgagtgtccagcagtttagtagacacagcagaggctaggagagggggcagaagctctaagagatagaagtcaggtcctcatcttgcgggaattccatcgccaattgagaagcaatgttatgtctatgaaacaatattttccttccaaacacaggcctgcagggcagtagaaggcagaagataatcaggtctagaatgtgtgatgtcatttagagagccatggggcgataggagtctgtcccaccagctataacmatagtcacatccagttatgtcagtctgccaggaggacacagcaagtgctcatgttaggccaggcacagtggctcatgccagtggctcatcccagcactttgggaggccgaggtgggtggatcacctgaggtcaggagttcaagaccagcctgaccaacacagtaaaactccatctctactaaaactacaaaattagctgggtgtggtggcacatgcctgtaatcccagctactcgggaggctgaggcaggagaatcacttgaagcagggaggcggaggttgcagtgagcaaagattgtgccattgccctccagcctgggcaataagaaagaaactccgtctcaaaaaaaaaaaggaccacatgttattatggggctgtacagactgttgcaaagcactgagaccccttggtcaaataaacacattacagcaggtcaaatttttgagtttagtgtgcataaaagtatataggaagactgcttagaatgcactttccagggtcctgacctcaggggttccgattccataagtctgggctgggacccaggaacccgcattttattttattttattttttgagatggagtctcgctctrtcatccaggctggagtgcagtggcacaatcttggctcacagcaaactccgccgcctaaggaacccacgttttaaataaatgtttccagtgattctgatgcaggtggtccctggttccactttgagaagacagccttagactctcaagggctcggatccctcttccaagaaaaaaaatcagggtccaaagccctcctaagccatgcaagccacaaggtgattttcttcccctatgtgatagctggttgtgggggggagtctctgaaaaatgggaatatctacagctgtctttttaaaaacatacatttggtagtcacaataatgttgctttgcatagccttgcacatggcacccactcaatgaatattggtaggttttctttttttcttttctttctttccttcttttatttttttaattttttttttttttactataatcagagctctgttaatatgggccatctgtcaggacatggaaatgcagattagatgttcacacattagatattttcctgaaaatattcctgaaaatttgcatgtaaagtatgacttgttataattttcctgctggtttccattcaacaaatatttcttgagtgccagttaatgccagactccggggctccagccctacgcacgagggtgttctggtctagctcttctgtgacatccctgtagagcatccccatgcctcattagatggccttcccttgtatttgtcaatgagattgcttaatttgagctctagagtttcttttccctgagcaatttctttcatagcaatgcaccatgggaatctgatgagagctacatctcttcctccaagaaagagcagatatgtgcatggcatcagttcagactcttctgtggacagtgataaaaaaaactcagcccagattgtctcagggagtttactgacccctayaactgaaaactccagagggcagagctgccttcaggtatggcttgattcaggggctcaagccctgtccaagttgttctctctccccatttctcagctccggtttctctgggcacactcccttctcaggcacatctyccctaggggtctcaagccagctgtgtaaccagtgttttgaacagtctcaactcagtgaggtaccaacttgaaaccatttggtgttttttgtttcatttttttcccttaaatgtgctctgatgaatctcctttccctgtccgtgatgatactttggacagatctcaatgatttctggtcattttggggggcattaaaaagtccaggccagtctggcccagatgaaaacttcaggctcaaatccaatcagtgcccttctgttctcttagctcargctgacctgtggcctgaggatgccgccctgcgggaggagaggtctgttttttcccctccttctacccctcccccamccctgctgggcccctttctcctccaggagtggggcctgtgaacggatccccaaatcctgcctacctggagctgccctcagtgccttccctgcggggcttctgacgtggggtagatgcaagacgtattcggagggctcccaggtctgaagtcctcactgcataattccctgccagggagacaggctccagctcctgccaccagctcctgccccaaggctgcttgatggggaatcttgagcaggataccagctagatggctccagcttccatgccttccccagtgtccgcccagcctatgggaaacacacaactgggccacacccacagtggccaccttctgccctctccttcctccctccaccctgtcatgtctctccaagtacttttcctttgctcaaataggcagagagggcacatcagcaattctgctgcatgagcagatggccaaggagaatggcccacctctatgagtggctctgctgaagaccctcttccttggcttgggagtagggaggaccctcttccctaggccaatgactccttgctctaagttttctttaaatccctctaatgtctttataggctgaggatgggggtaggagagagtaggttcaagttcaacgggaagaagcaagagtctctttcctgcaagtctcagcaaaagcctcctggcatcccagtgacttcgagagggtcatgcacctgccccctcaaccaatctttggaccccagaggaatatgatcccctgattggcttagacttgggtcatgtgccccatccttggagttggtgtctaggtgaggccttacccaaaccactgagctctcgagcggaggagaggttgatccccaaatcactcttattaaaagtggggtaaatggcttctgggtagccaggaaacagtgtgtttgcccacccctgtacatagaatctgtggcccccagattagaagttcccacctctcaatttcctgttatgtgatcatgttcaccttccctctgaacttttaaaatccagcttgccaaattagaaggtataagtccggcagtgcctggaacagcctgctcttgcctgtttcttgcaaatcatcccaagttccctgtgatttctgcaggaccagtcggtccagctcagcagttttgccttattgcatccttcaccatttgagaagtgaaaatgtcaggcatgaaagtcaataattcagattctctactgttagcagttctaaacccctggcgcatataaagatactcaaaggtctccctcactatcggggatctgcctccgcacatcctgtctggcaacatcccatctctcatcccatacagccttgactgcattctcctttcagggtatagattttggttccagcttctaaaacagttacaatccacttttttgtttgtttttgttttgttttgttttgtttttgagacagagtcttgctctgtcgcccaggctggtgtgcagtggtgcaatcttggctcattgcaacctccacttcccaggttcaagtgattctcctgcctcagcctcccaagtagctggaattacaggtgtgtgccaccatgcctggctaatttttgtatttttagtagacatgggatttttccatgttggtcagtctggtcttgaactcctggcctcaagtgatccgcctgcctcagcctcccaaagtgctggaattacaggcgtgagccaccgcgcccggcttcaatccactttttaattcatgcccccagactgattctttctggrccacatgtgttttcttccaaatcgtcttgtttgggaattttatctggcctctcctcctcttgtcccaccatcaaaattcagtgtaaaatcttctttctcaagtcccccaatctcttggagaagtctctcttttcccatgttgccttggtctatggaaaaggaggtagtacgttcagtaaattcaatagtggatgggtgggaaaaggtttgtaccatttgtaccactcgtaaagctgaaaaaaccacaccatctatttaatgagacctttgttatatggctgcttcattgtgttctcatgtaattttgaaaaggatgagaaaggaaaaaaaccaacttcttttcatataaattgtgtcttctatagctttagtgttctatgttgaaattattgacttttgatctggctaaaccattctcttttcttctctttggtgctggactctgccagccaaaatttatgacccattttccttctgcttaattgttgttataaatctgctgtgcagaacccagttgtaaatttatcacagactggattggattgatatacagcctctctttaggataatttgaacacagttatgccttagaaggaaggccaaattcttaaaacttctcttgaagagctgctttgtaaccattataaatatctaattaaaatacaacttactctttctttttctcttaaggataaaagaacattctgtgctggttatttcagcttattagctcatgctgctgtgtgagcaaggttgaggatttgttccttgaagcagtcagaggatctccaagaaaaaaaagcatattatgtgcttacaaaaaaaaaaaaaaaaaaagccgttttacccccaactagctttttcatgaatacacatcctttgtcacagggaaagggttgagcaggaaaaaaagtgaatagcttaacacaaatctatcctcactatggaaaaaaaaaatgtcttcccatgtggatctcacccagggaggagggcatggttggctttgagatcaagtagaaaactggaaatgggtttttccccatggggaaggtttcctcccctttgcccaggtctgctggggtcgggctacccacagttggtgaggagtaagttcaggagttccccatcaattcagtcccccagccacacaggggtcagaggtgctgctgagtctctgccttctgacagaccccacaacagcacaacaggacaacagagcacaaagccacagggacaagggaagaggcaaaacagagaaygccttacagccctaatgttgaatctaaaacaaagaacagcgtcactgcagcgtgagaaaagtggcaacgggctgtggcaccggcccttggttagggcatcacaaagtttaacgtgcacgggaatcacctgggagtcactaaatctgcagattttgattcagcaggtctgggacgagcctgagggtctgcatttcttttttgtgattattattttgtatttatgagacggagtctcactgtccccgaggctggagtgcagtggcacgatcttggctcactgcagcctccatctcccaggattaagtgattctcctgcctcagcctctcgagtagctgggattacaggctcacgccaccatgcccagctaatttttgtatttttagtagagacagggtttcaccatgttggacaggctagtctcgaactcctgacctcaggtgatctgcccgcctcggcctcccaaagtgctgggattacaggcgtgagccaccgtgcccggccaagggtctgcatttctaaccagctcccaggtgatgctgatacagccagtccatggcccacactatgtacaaggagccaggttctgaaccatacgtactgtgtctctctcacgtgtgctggacatggcaagtatgtattcctcatgacatttaatgtgctcatgttcttcagtggtttaccttttgctaataaatctcagtggtttcctgatyattccataatcatgatggcattcactttattgagtgggagatgaagtgatgcaggaatgagccaatcctaatacatkttagaagtgtattaatcctaaataaagcctaaaatcatctattttcttcagtaattgtttccatggtgggaggttagggggagcttttgaggtgatttaaagtcattttcaaagcagatgaagacggcaacctgagctttctgtcaggacatgtgtgtagactggagacctatcacatccaacgggaccctcaggccaatccttttaagcagggggctccacccagccccttagcttccctactcccctaagccccttggttgtagacagtagcttcgggtgccaggtgggaggccatgccaaacaactatagccaaagagcatgtctctgatgccatttctttggtggcctaggacagaatctgagctatttccactagaggaataggagcttcagcagggggccttggaaatgtatccaaggtacccacctcctgtccttctttctggaagcatctggccctgggaagtagcatcccgaccactaatatcagggcactaatatcaggcaaagggaggaaaagttgcatcctgaccactaatatcagaaaggcccctcctcccagcccgtgaagaggggcctctctgggtgtgtacctggaaccctatcttggaagttaagwtttgtggtcactgctaccaacacaccaactcccaggacacaggatactagggacttctgtgccccatcagtggacaagtcacaagttcccaaagcagggtgaccaatcgatctggatcaggtggcagggcctcggatcttaactgtccatttcattgttatgcacacaaacttatcttagagatccggccatctgcctgttcccgtcctggggatacctgcgggaaggcaggctgtgcctcccagaggtcatctgggctgcaaatgggtgccaagaccttcctctgcccctactcaggactccagactcctccacatcccctggagatactcaaagcccatgcccacagtaacccgtagggaaactgacccgctctgcctgggagctgctcccaggagcctcagcagtggcaaccaggagcttagagaccgctgtgcctctccctgcccaccctctccctctcatcctgccccatttctctgttgtctttcctctttcctctcttcattgttcacagcactatttaatctccttcccctctttcttcccttattcttgttctgactctattcccaggtccagagaggcccagaatcttctctgctcctgctccacctcctgacccactgccccctgggagcccctggtcatcccagaagcctgtaagtgcacacagcagccaagacccacatgcctgcaatgggggtggcacaggggaggcagggtgaagagcaggacagacttgcaggtgtttttttctgggctgcctggcttcatcaactgcaacactccagcactttgaatttttagcaattaatgccccaagtccccctccccctgagtccctgcagagcagagggaggggcacctgcaaagagaagtctctcccaggaatgggtcacaccaatcagcatgtatgtggtgtctttcatgtagcaaatcagagtctttcatattcaatagctgggcctctagagggaccaagctttgctaagcaaataagcttgtggggttggttcacatccatccagaaaagcaagaatgaaaaataaacttgggaaagtcagctccacaggtgaagctcaaccttctgtgcatctgcttggcatggagctacatttgcaactgaatggctcatttatttaactattgcacacattatgggctcttaaaacatcaaaagaatgggttttattcccaacaattagctcttgaaataaaagaataaacatactttttttttaacttccccagactctgttgaccaaagtcgctttcacaccagtggagtggaagctccaaaatggtatcatctggtgggaatttaaagacttcttgtccccaaaaaaccttttcgtcactaggcttaaaattttccattgggaggccctggctttgttttgacacatgatccgttattaacacaccactcattttgggaggggaatatcatcaagtcccagccaggatgtaaaccccacgactaggaagcctcgtccgctgggtaccttggtaggtcccagggccgagcacagtgcctggcacgtgagaaataggtgttgagaaaagttatttcactcttccttttctaactggaaaccaactccaagcacagatttgasgggggacgagcagggaggcacagtagataaagcctgtgagttactgcgcccagcgagaaaggggtcggtggagtcaaagagagaaggcactgcgtggggagatggaggcaggttgaaggcaacacttggagtccctatagtcctacaattgcagtgcaattgcccagaagatatcatgctaagaaaaggagggagcctcagccctcggcctccgaggagacctctggggacatctagggcagcttcccatccaggacagatatctgaaagatcatgaggctgggcttgaatcctgctgacaacaagaaacttactacctatgtcccctaccgctgctatggtccgcctcctctgtcagctcatggtatttgagcacctactaaatcagcaaattaatagcttctgcctgggggctgcttccacactccactaatagccaatcgctgggcatctcagagccgagagaggaaggaaaattggaaaatgagtctagaataaggggcctttccaaaatgtgtgcttatggcccagacactcctttaaccctaggttttccagaaagtctgttttgccccaggactgtggacagcattatgktttgtttggtgagctttcttttttttttttttttaggttgtattttataactgaatatggcatgtgtgaaaatatcagctaccagactctgttagtccaggcgtatgaatattccagatcacaagggaggtgtgactcccctgtgaattgcaatgcggaaggtttataaagttaatcatttagaaatctgtctttaaaatttaaatatttagattgggtcgctaggacacaaaaggcaattcctgtttctcactcacttaatttgatttttttttcttttggtcgcacaagttgtttttcaaagcctcattcctcgaatgttccctataggaggaatgtaattaaactccactggcctccccctgctgggaccaaacaggggccagagctgtagggagcataaaacagatatcctgcaaaagaatccttattataaagatgagaagagaatcaacttccctctggttatgaacaagaagctttagaaagccacccaggctatttttgcaatgggcttagtctccaagacattttaattagtaatttaagactggaaggaaggggataaactcctcacctccctggctataggcaagaacttcaactggatgagtaactggttcaagtggctgaaaaggagggaggtccagagggagggtggttccttaaaatgaaccaactttttcatgaaaatggcatagctagatatcccggcccccagtcagtcactgtttttgcagtcccacttcttaaggcagttctcacccctcaccagaggcaggcactgcctctctctgggacactcggctggcaccagagcaaagaagcttgtgctgagggatggttcccctcacaccgggccaacctggacttctctctgaccaaagagcatatgcctcccaccaagcgagaaggtggaaagatcctggcagggaaccccgagacctgggtgctagcatcatccccgccatgagagcacacggggcccctgagctgacacctgctggcaatgtgacgtggatcactcacataatcccttccttagtttttctgtctgtaaaatggggatagtaacattgtgtagctcataaggttgtcaccaagattaaacgagttaagaatacacgtgcaatgtttgaacagcgccagcattacgtacatatagctactctcattcgcctttctgtgactcagtttccttatctgtaaaagaaaaaggttggactagacctcttctccactgttattgatgatgatgatgataaatgaatgtttctgtgccagatcctaaactaaacaaaagttaacttgatactcacaatggctgtatgaagygggagttatcaccatccccatttcatcagtggggaaagaaaggctggattagtcagggatctccagaggaaccgaactaataggacagagacagaaagacattcattttcaggaattggctcatgtaatttatggagtttggcaagtgtgaagtctgcagggcaggctggcagtttggacaaccaggcaggagtcaatgcaacagtctagacacagaattctttcttcgccagaaaacctcagtttttgctcttacggccttcaaccgattggatgaggcacgcccatattattgaggataatctcctcaaagtcagctgattttaagtgttaaccatatctaccgaagaccttcccagcaaccctgggattcatgtttgattaaataactgcacacwatagcctagcaaagttgacacaaaagactaaccaagctaaataacttgagaacataagataataccctaggacagggcctaggtcggattggcactcacgtttcccgactccttagtctgtattcttttcaaccttgtctctaatattccatgattccatggttctgatgccattcctcagcgctctgctgttcttgcctgaccaagtggatcaatggtggctctggcatttctataaaggggatttcagggctgcctgctggggagggaggcttgaagctgtgtctgcactgcatcttcacagcactgagaaaatgccagtcattcaggaggacagggcagccctgtcctcgccacagtgcccgcatcttcattggttcacctttgcaggtatcatctgtgacctgtcatccaggctctgagccctgaggataataagtytccctcgaaggtcctgggtttgttggagctttttctccctcttgccatgtccttttcacggtccatcctctgagtttgtgaattatctttcttcgtggcccatgtggcacaagatgaagagtgcatgggcagcttctcccctgacatccctacctccctgacgcttaacccacatagggaagaacattcctgaaacagagacgtcacccagggttgctttctgccacagcaggcactctgcttcgtgcctttctcacttccatttgtaaatgatcttgtctccttccttgtagaaagcttttcagccattccaggctttctctttgggttccatccctctgggattttccacgaattgcatttccttgtagttcattttcatcattttccttgttagggaaatgcacctgagacattggcatgcagcctgattgcccccggcctcccctctgctcattgccagagctacctctgcacagaggagtcactctcctcccactccagggcctctgtcaggggccaggcttgatgctgtcaccagccagctcttcactgctgcccagtgccatattcatatccattgagacaagtccctgggaaatggttgggagccgggggacagccctgcatcctgagatcctaagatcagggaggttctccctgcactcccagctggaaggagactggatcggccaccctcaccaaattcccagattctctgactgaagcaagccagtccttggtttgaatggggaatcaactcagggttataaaatagacgccagccttcttgtaggtagaatctgacttcagacagcaaaagactctaaaacagcttaaattcctgtatatgccttctcctgtgcatgccaccggtcagaccaaaggccacacgccaatcaaggcccaagatcagccaggggtgtttccatgtcctcaagaacttttacaaactgtagctgattgggttccgcccctggagattcgatttagtgggtctggagtgaggcctgggcttcttagaagccccagcggattctaaaatgcagccaggaggaagaacsttgccagaatcccatgaggcacagatgcaaatgtgcatagtgacattgggttgcattatcaatggcaggactgactttataaacctccacatccttactggagctgctgtttgctttttagaaaagtccctcatcagattatcaggaagtcgtgggttttccgtgatcatgctgtggtcagatccagcccaaccagagagccaaaaacaaaacaarcatacaaaacaaacaaacaaacaaacaaaacccaaatccctggcaagccccacgaaatgactgctctgataacattcagcagacaagcctgtttgaaatcatctcagaatcataccagacccaaacccaagaggtcatctggtctatgcatcgactctaggagggtgtattagtccgttttcacgctgctgataaagacacacccgagactgggcaatttacaaaagaaagaggtttcatggacttacagttccacatggctggggaggcctgacaatcatggtggaaggcaaagaggagcaagtcacatcttacgtggatggcggcaggcaaagagacagcttttgcagggaaacttccttttttaaaaccatcagatctcgtgagacttactcactatcacgagaacagcacgggaaagactcgcccccatgattcaattaccgcccaccagtttcctcccacaacacaagggaattgtgggagttaaaattcaagacgaggtttgggtgaggacacagccaaaccatatcagagggtgaggggctatttctccatgttacagacaaggcacgtgaagcctagggacgttccatcacaggcccacaccttgtctcagaattaagaggaaatgcttctggctgccaggggtggggtggggtaggatgcagagcctctccctccaccaccayctccatccttttccctttctctgaaaatctcatttgatgattccccagcctggctgcaaattaaagatttgtagacctgaaagatgctaccgatggttatcagcaccaccaccaccatcgtaacagtaaacatttatggagcgccataattattcataataatttttatgtgttaaacaaatctgacctagctctataaagaaataggccctgttaaccaaaaatattggataaattaaaagtctcctagaagcatctgatgaaaggatctcaagttccataacacacggaccattcagtggtgttgtttctgggcttgattcactgtgggtcacttgaacgatgtcgggggtattgtccacctcccagtgctcagtctgtggcttgtggccagctgttcctctgtggggtctatgttggctgtgttaaggcctgctgcagaaacatctcatttctagcatgtttttctcaagcagtgatcctgtggggtcaagtcttcaatatcaaataatattgataataattatgatagaaataataagaggccaggcaccgtggctcacatttgtaatcccagcactttgggaggcagagttcaggtggatcatttgggcccaggagttcgagatcagcctggtcaacatggtgaaacccagtctctactaaaaatacaacaattagccgggcatggtggtgcacacctgtaattccagctactcgggaggctgaggcaggagaattgcttgaaaccagaaggcagaggttgcagttcgctgagattgcaccactgcactccagcctgggtgacagagtgagactctgtctcaaaaaaaaaaagaaagaaaaaagaaataaagaagaataataagaattatcagtcattgaacacgcgctctgttcttggtgctcttggtgttattccaggcaattctaacaccaattagatattttcccctattttaaagattaaagcaactggcgcagtggttcacacctgcaatcccagcactttgggaggccaaggtgggaggatcacttgaggcagggagttcaataccagcttgggcaatatagtgaaacccctgcctctacaaaaaaaaaaaaaaaaaaaaaatcaaaaattagctgaggctggtggtgcgtgctcgtactcccagctactcaggaggctgaggtgggaggattgcctgaggccaggagttggaggctgcagagagctatgatggtgccactgcactctagcatgggcgacaaaacaatagtcttgtctcaaaaaaactaaaaaagactaaagtgaaattgaaattcagagagtaagtgacttcaaggtagaggcagaaacagaggctggatttgaattcgatcctctggctccagagctcctgggagttatcttgggaatgactgcaaggtctgaggtagatcgttccaggagcaggtgcttatatacagtggaatggcacccactggcacaccrctaggaattctgttttcttaccaccaccggagccaggtctctgtcacggtgatgagaagttcccaaagtcatttctcctctctagggtgtcccctctctgtctgctgccactaaatccctaacgacattagagcgaataaatggcatttttaacttcagctttaagcaacaaagaaatactattaagtcaagatgtgtccatctttaccataaaaaaaaacaaaaaacttgcttcaataaccaataaacagatcaaacaacagaaaaataaatagcaaaagactkcagggctcgatggctcacacctgtaatcccagcactttgggaggcggaggtgggtggatcacctgaggtcaggagtttgagaccagcctgaccaatacggtgaaacccgcctctactaaaaatacaaaaattagccaggcttggtggcgtgagcctgtagtcccagctactcaggaggctgagataggagaattgcttgaacccaggaagcagaggttgcagtgagccaagattatgccactgcactccccattctgggcaacagagcaagattccatctcaawataataataataataataataataataataataaataaatagcaaaagaaagaaaaaaccctcagctaagaagtatactgttgtgttttttggggttttttttatgtaacatttgacaagtttacattttccttgtctgccttgggtgccttaaaataaaactctgtcaatatttccatgtaacattgggttttgcttttttttttcctcacgtaaaatccacatatcaggaattcctctatttattccgtcgcctgggtttctttccttgggaataatttatatgtcaaacctgtcatttatcgatttattgctgtacctagcagcatttttctccctgccctcaaaatttagcttaaagaccacttaataaggcctgtgcgggtcctcagactccagagatttctgctgatatgagccataatttagcaaaacaaatcctgctcattgcgggcatctaaatggtatcctgttaaatttccatacatgcttttcttttctaaagttatggcctacaactagaagaagggatgaaacatcacccctacctccacatcttatttcctgtatcaaatttcgaagcccttggagatgcaaggcgggtttccctaatgagttgagaatcaatgcgaatcatctgaaatgagaggtggcccgtgggtgtaatccatccctgctggtgctccaacttggttacacatttccagaaaccagcacctccctgttgtccatgtctggtcatcagaggcctctctcctcaggtgggataaccagagaccaagaaagaaacatgtttctctcccttggaatttctcttccttagtcattttcagaaagttaggagtcggcaaccttaaggaggagtttcctatcatctctcctccacttcctcccctcrtttcctccccgtcttctccttggagtccttcatcaatgtctctattttctgttcaggataaacaaagagtccctcttacctgcacaggcctcacctgccttccccccctgtcatttctgcagccagcctgtctcctgagcctggcctggcattctccaaagactccttaaggccacttggcttccggtctgcctctaggcttcactgtctgcaccagagtggaaattgtcatgtgccctcagcaacattttacccctcccttccagaacagacacaggcatttcttccacaagcagtattccacagatgaaaaaaaaaaattataaaagcgaaaccaaaaatactggtagtatatttttttcccttcaaaagaatgataatcatcagtaaaaaccacaacaacaaaaaactaagcaaagcagcctgaagataggctgaaagcacacatctacggatggcttgttgttgttttgtttttgttattgttatttttgagacacagtcttgctctgtcacccaggctggagtgcagtggcgcgatctcggctcactgcaacccccacctcccgggttcaagtgattctcctgcctcagcctcctgagtagctgggattacaggcttgtaccacccatgccccatgcccggctaatttttgtatttttagtacagactrggtttcaccatgttggccaggctggtcttgaactcctgacctcaggtgatccgcctgcgtcggcctcccagagtgctgggattacaggcatgagccaccatgcccggccaggatgttctgaatattaaactagctgaccggtggacattagctgtgctgtggaaaagtgaagcagaawggctttttatcccttgtgtatgatcatcaagacacaggacagcacagagattcaaaatacaatgcattccccttgctcgtctggtcargctcaccttcctattgcacagggttgattggttggaggccgccaacctctagctgaaaggcagagacagtctcccctgttatttcggtaccaagctgtgtttcttaggcattaaaatggagggaaagcaaccactggcccctcactgggatygttcttgaggattccagacagaccataagtaattcattgagtcgctcacaaagggcctggccctgaaggtttgtggctgcagcatccaggcgagccaaaggtgtcagtgccaccaaaatgcagagaaaactcttatcagaaagatgtcatttttttcccctaaatgtcatatatacaatttttattggagtgtgatgacagatagtgaataaattaacataaatttgcataatacaatacagctgttaatttatgatcatattaaaacacaaagttttgtmgtttgaagcagttaaaagtcttaatcttctgaaaatttccctcttgtttgttatttgtttatgagttacttagggttattagataaaatacaggcttctggttaaatttgaatctcagataaactgtaaataattttttagtgtatctcatgcaatatttgggacatacttatactaaaaagttaatcttattgtatatctgaaattcacatttaactgaatggttatattaatatttttatttgataaatcaggcaaytctgtatttcataagcagtttaacctctctctactggctcttctctggcagggcagaggggtgctgttttatggagaaaggcacttactgctgggaccttgatatctttagactgtgggggaggctggctctcctaggaacactaacagagtcaaagagatcagacaagagaggtgccagtgcaaagggggaaactgaggcaggcagcatgcctgggctttcttgacagtaccaggggtattatagccctgttttccagattttttggactacaatctcatcataagaaatataatttataattcaacccagaacacacatcccttataaatggaacaaaaagttttaggaaacatgtcaccttctatgtacaatctgctcgacatcctgttctagttgatttcatttctttaaatgccactcttaaccccctaaattgaattcatggattgaattcatggtcccctaaaggatcacagcccacatgttgaaaaacactgggttagagggtcacagttcaggaaaatgaacgaggaggttttttaaaatctactttacaaacgaggaaatgtatcgggtyccttaagagcctttccaggaaaatttttgctcatttgyggccaaactcgaaataaaacttaggtcccccaactcccaaccctgcgttttctggtttccttccaccactctttctagtatccattttcctggtctccaagttgtaatacacattctgggatccacatttacttgttttattttacataattatattacttgtatactatttccttatacttcatattcttctcaaatttccatgttttatatcatttctgatgcaaactgattacatcattgcttatggcacattcttgactgatatcaacattttaaaccaaattgtcttggtacgcaccctctgatctttggcatcttactgccctgccccatcttcaacctcggctcactattttggtgcctcaggaggtctcaaccatgaaccttccatgtgctctcactgggattggtgccatctgtgacataagaaaaacatagaaacataaaaacataagaaaaactattatttgttgtgatttgttctccctaatctatgaagtcggtagggtatctgttataaagattcccttctagagtcgagaaaacagaggctcagagaggttaagtgtttttctcagggtcacacagcaaatacagaactccagtcttcttgctgtgtctcttaccctctgtcatcaggatgcaggggctgctgagctgagatgcctgcagatgagtaaactggcgggaagaaagacaccaacccaatagatctccatgtattttatatattttctcacctactcagtctagattttcaaacaacatacagaactttctgggatcttgtcatcattcagtgtactgtcctctggatcctctccaggagccgcccactccgcacacatttttttttctagttgtcataaacaaatttcaaagaaagccattttcccagagccctttcttgtgactctaccacagttcatcctggtttgcagaatccaaactcagggcttccttccaatatttttattagttcagtagtcgatcagtttgcacagagaagtggattggagctccccttcccttggagctgccagtggagaaagtctcctccaaccctcaggctcagcaccactcagggccagtgagatgcacaaacagcatcttgcaggtaccacaatgccttcatcasttgtatcttccccgaccctgtgatgaagtaggatgaagatggctgagggtatggacgttgggcccacctccctggcttaaagctgctggaccccttacccggccatgtggccctggggcatgacacagttccccctaagcctcgcttcttcactgtttaaaggggataataatagcatctgctctgttagactgagggctggttaagtggaataacatacktagcacatagcctggtacccacttattttttttattttgctactttgtttcaaatcttcaaatcttcctattattccttttttacagagccatgtcagaaaccttagattcacgtcccttccatgtgtcccttccacatgtccctccttgacctgccacaatgcctctgctccacccagagcctcagcacctgcgttctgccccctcagtaaccagggtccctcacctgccactcctgggttgctctctccttttgaactagaaatttttctaccctcctgcccctccagccaaaattacctttttgatgtcccatttccccaggacactattttgtcctagggatcaaaaataaaaaaataagaaagaaagaragagagagagagagagagagagagaaagaaagaaagggaagggggaaagaaagaagaaaagaagaagaaagaaagaagaaagaaaaagaaagaggaaggaaggaaaagaaagaaagaaagaagaaaaagaaaagaaagaaagaaagcaggaaagaaagaaagaaaagaaagaaagaaagggaagggggaaagaaagaaaagaagaagaaagaaagaggaaggaaggaaggaaaagaaagaaagaagaaagagaaagaaagaaaagaaagaaagcagcaaagaaagaaaggaaagaaagaaagaaggaaagaaagaaagaaagaaaagaaaagaaagaaagaaagaaaagatcaaattaccaggatctgaggacctgggaggatttcagaaatcgctggtcagtcccagcaactaaggctcaaatgccctccccaggattctgctggagatcattctgccagtcrctccaggagcgaggggctcacctcttcctaaggcaggactttccacgaggctagaccagaccagtgtcctccaattaattcatttccctgtgtcttccatccatggtttcaaactctgggaccccaaagcacagtggccctttacaaagttgaaggctatgtccctctggcttctgcagcttttcctgatgtggcagggtttcaggtcccctgcccatccaccccccacccctctagcctgactgtctgtgtccctctagagggtgacatgccttgaatggcagcgaaccctggtgtgggctgatggtgtggagtacagagcggtagccgctgccctgttatcagctgcttccaaaggccagggtggtcgttagtgcatcattaataacccattatcgggttgtcatctctgaatttatctaaatttatctcamttattgtaaccctgtagactgataagccctataagtataaaatacactggatgaaaaagctacttcctattatttgttctaaaaaattaactccttcaagtaatctagagtttggtgaccaatttcttattttaccctcctcacatcttcaaaactcagcactggtgatttcacgtctgttgatgggattcatctgtccccctccactagactggaagctccccatagggtgagacccactatagcatcccccaatgtccagcacggaactggagcatcacaggtgccctgaggaatgaatgggtggacggcgcttacagactcgggtgccacttcctcttgtccagctccatgccctcccccatagtgtgtggaccatygggggcctagaactgaggtcctggttggtagcacccaggagcctgttcccaacatggccccatggcagggcctggtctccaggtgtggcatgaggtgctacatgagcattctgtgagcatcttcagggagaaaacaaagtgttggccaggcccaccggaacagcggcccacctaaacaggctggcgggcggaggagtgccacagaatggacatggggaggccttacaaggtctgtagtagcagaggtagtgaatgtttgttgagttctctctatgcgctagtgttattctaagtgaggtccatgggccacgctttttgctgactacaactctgtggagtaggactaggattatccccattttcctgggtgagaagctgaggctgccagagttaagttgactagggccacacagctgagaagtggtgaagcataaattgaaacttgggcagtctgactcccatatactttaaaagaaaatatttccatagattattggggaacaggtggtatttggttacatgagtaagttctttaggggtgatttgtgagattttggtgcacccatcacccaagcagtatataatgaacccaatttatagtcttttatccctcacccccttcccacctctccccccaagtttccaaagtccattgtatcattcttatgcctttgcatcctcatagctcccgcttatgagtgagaacataccatgtttggttttccattcctaagttacttcacttagaataatcgtctccagttccacccacattgctgcaaatgccattaactcattcctttttatggctgagtagtattccatcatatatatatatatatacatayatatatatatatatgtgtgtgtgtgtgtgtgtgtgtgtgtgtgtgtgtgtatatatatatatatatatacaccatagtttctttatccactagttgatgggcatttgggctggttccacatttttgcaattgcgaatttgtgtgcaagtttgcttttaaccactatgcgatcttggctctcaaggtggaaatttgatgtggaaagcagagtcaggccctggaagaatcccccaggctatctgtaagagctagaatcggtatgatgttctagaagcaattggcctgggcagtgccctgagagcttagcagtgcagtcatgagccagcactctgcctgggtctctgtcacagagtttctcgtgcttggctgcagcctggagccaccttggggagcttgatgcctggggctccccacggattccagtgtcatcggcctgggcatttggcatttgggatattcacaagctccttggtgactccagggtgcagccgaggttgagaaccattgggaatagaaaagcaagaggaagctgttctcacctgccctttccacaccagagccccagggtcccggggagactaaagctggggtctatttctattcccccaaccaagacgggagcttcacatccccacayactgagaggccagaatgggtcagaccagagtgagtgtgctctggctaagactggccgacagctctgytcccctggggtggggactggacgtggccctttggtttaactgcattttactctttccagcctgtctggccattattcttgcaggagcacgcaggactaaagtccccttcctcagcaccacgcatgtcccatctcaccctgtgtcttccaacttcacttgccataaatcagttgtcaggacccccgaccctaaaacagtcacctaatgataaatcatgtttaattctaatggaaccctcccgccaagactactcatcagagaggaagctaattcgcagggatatgaagagctttctaaaattagttccagacgttttttgtcttaaatctgtattatggctgccctatttttaatttactttttgaaaaaccacattgggacactaagtaatctgggggcccaaaagactttgggggccacgggaacctcccaggccctagggggcagtagcaccaccatgcagatcaccagttccacaaaagaacggaactccaccagtacctagtgttattagtataagttttgggaaagrtccttcttttcttagctcattagaaaaacaatcacagcatcctatggactgggccaaagtgggcagacattgcagtccagcccaaagaggcctgtcccagcaggacgccaggggacagggtcagaaagaggcagcccacaagctgagcacagctgcagaggttttagcttgcttactacatttgaattaattgccaaacttttaaactcaggggaattccrcaaaaatctaggtaccagcttttcttgaagacaacggaagctcaggccaccctgaggccatcacctctggcagtcacctgccaagcacgtggctccagcttagcccgagcgcctccacctgccccgtcaaggcccagatgcagtggcccttacccatcacacttgcgctgttctgaccacagactcacagtcatggtcccacctggccccatggacatttgggtttgcatcatcatctaatgacacagtgaagctccttggcctaccagctccctttgtgttcaccttgaccagcccccagctccttgcttctgcatcttgacttctgccgtggtcctgcccagaaccctgagggctgtttctcttccctactcccctccggcttctccttcctacctttccacgctgcaggatggggtacttctgcttgcctcagctgcctggcccctccaaagcctcctttgaccatcagcccagcttgcatggatgcccgggacacatacagcactttcttggtcttggtttacaaagtagtctgccccagtggtcccaccacacctccaatcaactccagaccccagccagccacttgaaaatctgtagtccaggccagagggcaaaaggcacagtcgaggacaaggagcaggcatcccgtgtggcgggagcaggaacactcttgctcagggtgctgtgcgatgggccattggtaggtagtcccagctggtctggygtgtgaggggagaggcaggttcacccagctgtctgtgccygggcagggcaactcccgaagtgggctgagggagagctctccgtgatctctaaggagggaggcagcgcattgcagggttagcaaacctttagaagatcctcccggtgttcttcctcccgctcctgccctgcccatagcagaaatcaacaacacgtgggcactgagctcttttccagaaactttccaaagagacccatgggtctggccaagaccctcaggggttgccctcattggcctggggacagtttttsagcgactgctctttgagaagaagtcagcatcagagggagtcagagaagaggggtaagcaagctaggttggggagctgctacccccaaatcagactgcaaagacaggcaagggtcatggccacttccgtgggcccagtgccagacagctccacagaggctcagagagggctgaagggccaagcctaaggaaaacaacaaggctgaaactccccatgtctaacgacatcgtgagcgtggctgcagagctcccacatggcttcctcctccttcccaaggggctgccccaccgctttgccctcactagccagagcaatctaccttgttcactttgcccaagacacagggaggacccytgtggtctttgcaggggcttcacccagttgagctgggaagagacctcacagcatcctccccatctccctggcccgggtttagaatactgaagacacatagtcctgtcctccgtggcctacgcagatccttcctgttcctgagatctctggccccatgcgggcccatctctgcattcctagcttggtggatgccctgcctatctggcttctacctttgattgttcccttggtcactccgatgccatggtcctatagcaatcagggtgctgagtgagtccctgcctgtcctgccttataaggaagagacaattatttgtgtcctgcccatctttgctcatcattgtcatgggttttagaatcaagccgacttggcttttcactcccttaacactgtgagctcctccttatgcaaaacaccacaggcctgcccgccggccttaagcacacacccttctgagcctcagttttcctgtctgtaaaataaaactcaatgaaatgacacaagtgaaactcacctggtgcctgccctcttctcataaatggcccattgcttctgttctcctctcctcccccaggccaggcctcccctccctagtcctcatcttatacccacacctccctgcccctcactcagggccttggctctgaagggagaccccgaggccatctgaaagtgtgagcacagctggcggtggtggctggcatccaggggacgtgagggcgcattcgccccagcgcagcattcctccttcctaagcttgcacagggcctggtattgaagggcagcagattcattccagcatgactactgcagctacctgtgtmtcctggcggaaggggcagcctcaggagtgtggagttcagggatccagctttgacttggccacgcccagagccagccagcctcgagcacctgtttcctgtctgggggcacgggaaccctcctgtcctccagggaccccagcctcctcatctctgctgggcagtcatctactacccctggttctgacccctgagacctcttgtcctggagcccgcagggtccagctcagctgtgccccctctcggggccgctctggtggcttctttgctgccaccctccccacccccggcactgtgctctccctgcccccactaccactctcatctggttgcccagtccatgattgtgaacttgacctctacccctggctgcctgggcctacgatcctgcaaaaacccctccaaccagctggccccacccctcaggacttccctcctgtggcagagtcacctgtgacacctggagggactccagtccagtgtgtccccaccttcaggctaacccccttggagaagcctcccgacggtgcaggcacgggggcacagaggcagcaggacattgcaggagcagagacacgaagacaaaagaaacaaatgattccttaagatccatggccaaaacaaattgccgcaattaacacgtgccactgccacgatctatgggctgaaacgtggctggaacgacgcagaagcagaaaccacagagagcgtgcgctccaataaaacggcactaaatggcacggctgtgatggaactcgtttcgattttgttccaaaaccttgtttaagtgcgtttattgtttctgtgtgaaagaacacaaatgctttttgaaaattgcttcagcataagcctcaccttctccagaaagtctttctgatccctcccatccctaccccatgcaggtccgtgacccccacgatgcccccatatgttgcccccctatgttgccacggtgcccacacttccctgtcaccaccagtgtcctcctggcttctccacccccagggactgtgcatcacccgtctccaccccaccccagaacaatgctctgtacacagcagacagcaggcagcaggtgacacaggcccaatggaatgactgtcaaggttaagggagaggtcatttatgaacatcaagggaggcacgcaggctgctaaggggacccttgcagaacagatgaaattcttattagaaagagtcagtgttgatttctcaaaaaatctatcaatcaataaaataaaagcataaagacatagaaacacataaacagagaatcgttttacatggaagatggggagtggtgacttggcctcatagggccataatcacccttttggggttttgtcccacattagaagagcagccccatagcagagataagaaaaccaaaaaagggtaacaaaaactgggcacagagtcaggactggactgaagccccggagagcacgggcagctctctagcaggtggggcaagagggactttagctgggagcacttggcccccagcctaggcaccagagctcgaggggagacccttcccattccctgagagatggagtatgggtctcacttgcaggggagcctcgtgggaatccctcatatgggaagaaggatggcatggaatggcctttctctcccccaacgcccagccaagggaggcaagccctccctgtccgctctagcaatatggcacaagggggtatgatctgccagttctcccttgagaggcttggtggggaccacctgcaggccagctggcagccccccttcacctgctcacaactagcaggccagggggtgaggcatggaccagcatctccgctgctttgagcaatcatgaaaactccaggtccatggaagataagaaattggctatcaaggctctgaggcatgtgctatctgcgatttagtaaatctcttcccacccccaaatttaattttttaaaaaacctccctcctcaagaacttcattctcatgtatcctaatccaccccgccagctcccagcagaggggagggccactctcttgggtccaaaggcccacactagcggggaagctcgcggagccatgtctctgggggccgtttttactttgttttgccactgtagaggccactcttggcaagaagcctttttcactaaaagccatcagctgcagaagaaggcaaagggctgaaatagcatcaggtggaggaggcggccctggagagaggcctggtttccatcccagctctcccaccatctgcctgtggcctctgcaagctccccaagccctgggggcyttcgtttcctccctgcaaagggagctgccctcagaagcactcagctcggttcttggcatggggagtgattagctctgcacaaacctggtagtttcacgagaagccatgtaaggtagagaagtcgctgaaggcatctccctctcagagttaaaaggaaacagaaagactggatcttgtgtctcttcctctttttaaaaagggaattaggcctggtgcagtggctcacgcctataataccagcactttgggaggccgaggtgggtggattacctgagatcaggagtttgagaccagcctggttaacacggaaaaaccccgtctctactaaaaataaaaaaattaaaaacaaacaacaacaaaaaccattagctgggcatggtagcgcacacctgtagtcccagctacttgggaggctgaggcaagagaattgcttgaacccgggaggcagaggttgcagtgagccgatccagcctgggagagagtgagactcggtctcaataaatacataaatgggaagtcatatcatcacgaggtccccacttaccctcatgacctcatctaaccctaataaccttccagaggccccgtctccaagtatatgatcatgttggggaatagggtttcaacacataaacctggggaggccggactcacacattcagtccattgcacaatgtatcaaaaattctaattgtattgggcaagcctacactgcccaattgtaagcgaagtccctgaggccggagaaatcaaggtatccatcagtgaatacagggtattaagaaatgccaaagcttactgctcaagttcatctcctgctgaccctgcggccctgctgcctgggcctagaatggacgcacttctccacaaggccttgtctttcttgagattctcacagtgtgacccgagaagcatgctccacaatttcttatcaattgaacactaaaaatcccatctagctatgggatgcctagtttctcctcctggattttgtggttaaacccttctgtctccaatgcaatgtagcagtgagcacagctctggacccgcatcccaaggcctgaggtctaacgctgcctctgccccctcctttgctgtgcagcttaggcaagtcacttcacctctctgggctgtggttcctcatccatccaatgggagggttgaactgctctttgtttgctttgctttgctttttctttttctttctttctttttttttttttttttttgagacacagtctcactctgccacccaggctggagggcagtggcttactgcagcctttgcctcccaggttcaagtgattctcctgccccagcctcccaagtagctgggattacaggtgtgcacaaccatgcccagctgattttttttgagatgaagttttgctcttgttgcccaggctggagtgcaatggcgtgatctgggctcactgcaacctctgcctcccaggttcaggtggttctcctgcctcagcctcccgcgtagctgggattacaggcacctgccaccacacttggctaattttttgtatttttagtagagatggggtttcgccatgttggccaggctggtctcaaactcctgacctcaagtgatctgcctgccttggcctcccaaagtgctgggattacaggcgtgagccattgtgcccagctgctcttcyctttttactgtcctatgactggtctcccaatgccagctgagagtgttggtctgatctcttttcttctaagctggccacacaaatggacctcagttactcagtagcccttaaaatctggtaccagtcaccatttaggcctctggacatcatccttgggcaaaggaggctttttttttaagcttgggcctagccctccccacttatatcctggactgtgaaaatggaccgagtgggcaatagggaattcaggatgagctggaaaaaaagaaaaaaaaaactcctgctgcaataaattacatcacagtggagatctctttctacccagaaaattctgagcccagacaatggctyatttatttcagacaatattcaatacaacagaattccaggtcaatagaaggatttctgcaggttcttagagttggtagcaaagggatttaacccacggagaaaagagagctgttcaataatagattcccaggcgtgagggaggccttattaataaatccatcggtggtctgctgaaaatgctgccccctcccttgcgggcatcccacctgacgacagtgggggactgatgcacccagggccctgaccagggaggacgtttgggtaaatatttgggcagagatggctgctgctagaatggtgagcagagctggggagcgcaggaaacggcccctttctcccaggccctcagatgagacatttttataaacatccaggcaggcagcctctgaagactcctgggctttacaaacacatctcgtattctatagtcagctgagaccatgctttgagcatgggcggtaagaggagcaggaagcaggaggggcggggaggggtctggcaccagctttctaaatttaacatgcagttgcttttaggccagtggataaaaaataaattccagtgcttaaagctcttatctttgtttaccatttccccaaacagctagtgacctgctctctgactcctacagcaaatcatcaacragatgcacacgaagatgagggatgggaaatgcaggaggggtgtgcggagggcaagttgatggctctccgccttcccgtcacgtttatttggcctggcagagtgaccaggatctgctaaggtcatgaggctgtccctgggtgggtgggggcgtggccatgctgcatcagaccrgtccagaggtggagggcaccttggggtctctcgtgtggctctcctgttgatgagggacctatgaatatcccacagcgaccttttcagatgctccataacctcgtgtgaaaagccccggtggacctgggcttgcctattgcattgtgaagttgtagtcctttgaaaatcctgccccacgtggagtcagaatctttctttctgggactgatgccatggggcctggctccacccccacaactgcatggcacagcactgccttttccttggccatgggctcrccctgcagatgggtgatgatgcgctcctgcctcccttcagtttgttctgttctcccaaattctttcagtgtgcctggtagaagcagtctgccagtctcccctcrctccctctcattcatcccctctctaactactcatcctgcgaccccactgacttggttttggccttgtccctgccacagttgacaaatataatggcgcgtcttcttcttcattattatcattattattactggcaatcatagtccactctgcctcaaactcctaggttcaagtgatccttccacctcggcctcccgagtagctgggattacaggtgcacaccaccatgtctggcattttttttttttttttagagatggggtttcactatgttgtccaggctggtctcgatctcctggcctcaagcaatcctgccacctcagcctcccaaagtgctgggattacaggcgtgagccaccgtgccagccatcaatggtctctcttagtcttgaatctcccaggcactgtccaggagatctgagatgttttccagggtcccttactttccagttgccctgccaccttcccctgggaagcattaaggttcaatgcttggctctgtgcttgtttttcttacccctatcccagaggactcatccccgtctgtgcgayaccatctccccacttctacrccaagctgctcacggtctcacccaggtggggtggtggagggggcctccagcaaaatcctgcaaaagctgatctccttcccctggaagatgctgccccacccatgtggtcctctttctgtgtttctctcagccacttaggaatgaaaccagggaatccctttcatctctcttcattccctgacccgttaaatcccaacaccctcacctcccctggtagagcttcctttatgacagtgattctgaaatccaggctgcatgtgataatcccttgggggacttctaaaacaataccaattcctgcaccccaatccagaccgattaagtggaaatgttttgggatgggccccagcatcaatagggaacagccaagatagacagccactgctgataaggcttctctctttcagccccttttcccattctgactactggccttgtgattggagcacctcacttttgcctggactattgcaagaacctcctgtcttattgacctatttcccaactctttctacctcagccatcctacatgtcgttgtcagatcacacaaagccattttcagtatgttatcttgactcatcaaaaaccttcagtggctccctattaccataaaaataaatctgtgaatgaacaaataaatggtttcccaaatacagagtaagttctatatggcacagaaccgtatcttatcccctctctttccctgcccctcaccccacacactctgctaatcggagtaaatagagggaaccaggatctgtggggtgagtgaacaaaagcattttctctgcaaattaaatgtggtccactcacttcccagtgcagagaaagtgggctaggtgatttaactatcacttacttaggggcttatttctttcaacatcatatacagtcagctgtgaatgttccatactaatggaaaaaacagaatcctaaatattaccaaacagcagataattcaaagactcgaatctagttgatgttggaatgcgtttttgcttatgagtgctgagtgcttgtgtctgataattggggcaatttttaaaaattaggtaattagatgtgttttatttgttcctatttccccctccccccactatacacacacactatatgaataaataactcagctcccaaaacaatgccctatttctttctctcagtcctttcctggaatagagatagtggttacatttcagaatattagcaaggaagggagaagaaactggggaggagcctgcagttagagtaaatagaagaaactaggatgtcaacaggctgcttttcaactgattcactgttaaaattttaggcagtgtgaacaacctgtctgtcaaactgtttgcaatatctactaaagctgaacatacacatccctcatgacccggcagtgccatgcccagatgtacacccaacagaaacctgtactctgttcaccaaaagccataaacaagaatgttcataaggctttattcataatggcccccaacctgggaacaactcaaatgtccattgacaaggaaaaggatggataaatcsgggcagctcacccaatggagcaccaaatcatgaggatgaacacaccacaacacacaacatgggtgactgtcacagacatgaaactgagcaaaagaaggcagaccgaaaagcctgcatggaaatatttcatttataggaagttcaagacaaagaggcaaaagtaatctctcgtgttagaagtcaagacagtggttactactgaggggcatgtgaccgggagaggccacgggtgtgcttccaagtgctggaaggttctgtcttggtctaagtgctggttacacaggaatgcttacagtgtgaaaattcattgagctctaagtttgtgtttgtgtcatatttttccatatgcgtgttattcttccataaaatgtacaagaggaaaggaagggagggaaggctggagggagggaaggtaagaccaggtaggcccaggtaatggaaaaggcttggaatttgaagacctggattcagttccaactctaccattaactggccgtgcgacctgggacaagtcacttcacctctccaaatatctggttttttttcatctataaaatagacaataaaagctgctctacctacctcacagtgtggttgtgaagaccaaatggtataatggatgtaaaaatccattggtgagcaataaagtgtttcacaaggcaaaacactattattattctagatctctgcagacagcaatttctgcagcaggtcarcactgtcagtgaagctcagcccagagccatcatggagaagactgatgccccgtgggttgtgtgtttgtgtgcgcacgcagcctggtttatgttttttcattacatctctgcacctaatcccttaatggcctgggcctcagagtacaaaaacacctggaaaaatctctgtgtttttatgagacgggttctgtccccttctaaagcaggtataaatagatgccatgtacactctcttaattactttttctcgagtatggatgaatttcaacatctaaatctgccaaattattgaagctagcacagagaactttctgggcattggccagggaagccagcaatgtggatggaaagatttatcacccsctctcataaccaaacctccatcgtatctccctgcaagccttgaaactgctcactggacccactcagacaacagagctatgggatctagaaggtgaaatgtcagagctcagagaacctcagctccctcccaaccttgccataagaactcagggctggccgggcgccatggcttacgcctataatcccagcactttgggaggccgaggtgggtgaatcacctgaggtcaggagttcaagaccagcctggccaacatggtaaaacccygtctctataaaaatacaataactacgtgggcatggtggtgagcgcctgtaattccagctacttgggaggctgacgcatgagactcgcttgaacccgggaggtggaggttgcagtgagccgagattgtaccattgcactccagcctgggggatagagcaagactctgtctccaaaaaaccagttgcaagggtgaggggctttgcctctggtttatggtcagaagggcaaagcgaaggtcaccccattttccacggcttggtttcatattatagtcccacggtccctggagaatcagagtgaatggaaatctttattcttcatatggctgtattgccccaagctgtcctcgtgcttaagggatttccagctccggcttctagagggcaagggccagcatcacttggcctacttcttagtataagaccaagtctagtgacagctgggtaggcataactactacagatgctgctgttcctactgctctgaagaagaaaactgaagccacctctgcttctatttcctttaacaacatagaaaaatgataatttttctattaggtccgtgaatctccaggaaaaatctttgtgaaagcaatgacatttttattttctttttctcatttatactccagatgacatctgcacacacacccagtgtgtggcgtatgtgtaggtgtgtgactgtgtgtgtgtgtctagctttcagagaaaatgatacacaaaatgataaatatagaaaagagattaataggagagggcagtactgttatttcctacataaaaggatttatcgatagattgcccatagagttagttccctaaaccatcaggttaatctattgtatttaaatgtatttaaatattgggccaggcagagtggctcatgcctgtgatcccagtactttaggaggctgagactggaggatcactggagtccaggagttcaasacaagcctgggcaacatagtgagatgtccccgcatctctacaaacaaacaaaaaacaattagacaggcatggtggcttgcacctgtagtcccagttactctggcggctgaggcaggaggatcgcttgagcccaggagttcaaggctgcagtgagctatgacagcaccactgcactgtagcctgggccacagagcaagaaaataaacaaacacatattggtttctagatcctaaactatatgatggaaagactaagagaccaagaatcttaggaataaaattagaagttactgcccattgaaaatcaactacatatgaaaaagtctcccccaaaatgaagaaactctggtttgagaatgtaaatcactaggtaaagattctgtttattttctttatttccatgtttcccaatatttaatttkcaaccctctaagagcagttattttataaaataagtcccagctgaaatgaatttgataggattttagaatttctttctcccttaacacatcctattagcctagttcaatagagagagcagagcgcctcatgttgaaataagctttcccgccactgaatgtgttcaaacagaaatatcacctgcttaggaggtactttccagttgccaaagacttccaccttcatcttcttgttcactctactctgcaagatgggtgggacagcattacagacgaggggtcctgtagatactgtcctgacgactggcccaaggccatggctaagggttacagacccggaacagaaccctgccctttgcctcccttgtgggacccaaagccaggccaaggtcaaggggaggsgctgcagggggggcttcctcattgggtgtggacagcaaaggttgattttgagatttccccccagctctaattctcagtaatttggcctttgaaacaggaggcagagagaaccctgggggatggcttttcatgttatcttttggaaacatagaagcttcaggtgcttcctggcttgaaataagagaatattctgctcagtcccccacatttttgagacactccaggcccagcagacccacagcaccctcactagctgttggtaacgttggtgcctggatgtactgacagaggaccaggtgtgccaagggcctgtcacccaggctgtagtgcagtggcactatctcggctcaccgcaacctctacctcccaggctcgagcaattttcctgcctcagcctcccaagtagctgggattacaggcgcccaccaccatacctggctatttttctattttgagtagagatgggatttcaccatgttgcccaggttggtctcgaactcctggcctcaagtgacaccccctgccttggcctcccaaagtgctgagattatgggcgtgagccaccgtgactggccgataagaattcttttctaaacatgaccacaataccattatcaactaaaaccaaaatgaatgttcattccttgagagcatcaaatatcctgttggattcacagttccctgattgattcatatttgttttaggttggttgcagcagcctctgaacaaggccatccacttttcactggcttattctcactcatcctaaaaatctcagcctggacattgtcgcttcctcctcacagagtccctgatcccaaatgtgggagatgtgtgtctctcatctgttctcccatctcacccttatccacttgtttgcatcctgatagactggaagctccgagaggctaggacatgtccgtgcattttaaagttacgtctcccgggcctagcacagtgcctggtgaatcatgctcgccaattccatatgtattccttgaatatgtaaatgaaggatctcctaaacagaactggttttgcattcctcgtaagcacattcgataacactttacacatccatgtcatgatttgtttaggaatcggtttcctcaatggacagagcctccttggacccccagcacctggtcccgcacctgacccatccaaggtgcccgctgaggaactgctgaatgaaagaggacttataataaattctatgttgagactttgggttcacaggccttcctctctgggcctcatttttctcctctctgtcaaggaaggatggctgggaggatttccaaggtcctttcccgggacggggagtcctcatttagcatgcgcttgttgccctctgctggcagaatttgctcaggaccgttctgtccctgctattcctgaaagctgcagacaaagccagcaactgctgggtggaccagccagtgagtgggatagggacttgagttttgttgtctcgctggttcgactaagacatggaggtgtgtgcgtccttctgcctcatccgttcattcctcaggtgtggagaagcgctagggtaggtctcagacagacagtcggaaagacctatgcccctgagtgcacattaggacagccagggggctaaaaagggagarctggtgcccaggccccacctcagaccaacactggggagtagggcccaagcatccatctatactaaaacatataaaaatctggctgtttctggctgggcgcggtggctcacacctgtaatcccagcactttgggaggccgaggcaggcggattgcctgaggtcaggagttcgagaccagcctgaccaacacggtgaaacctcatctctactgaaaatacaaaaattagccgggcgtggtggtgggtgcctgtaatcccagctactcgggaggctgaggcagaagaattgcttgaacccaggaggcagaggttgcagtgagccgagaccgggccattgtactccagcctgggcaacaagagcgaaactccgtctcaaaaaaaaaaaaaaaaaagctggctgtttctaacatgcagccacatggagaactgctgaaccaagatggtctttacatacgtatctttttgtttgtttgtctgtttgtttgagatggaggttttgctcttgatgcctaggctgtgatctcagctcactgcaacctccacctcccggttcaagcgattctcctgcctcagcctccagggtggctggggttacaggcacccaccaccatgcccagctaattttttgtacttttagtagagacagggtttcatcatgttggccaggctggtcttgaactcctcacctcaggtgatccacccacctcggcctcccaaagtgctgggattacaggcgtgagccaccgcacctggcctacatgtgcatcttgatctaaaagcctagaagcacagttaaaaagagaaaagcctatctagggaaagagtaaagactttgattttctaatacaaaattcgcttagcctatctttaaaaattttctttctttgacaaaccgtgacaacttacaagccatacagttttcttcggggaaccaacaccatttacccattagggatgctgcttccagatccagtttttctttttgagatatagttccctatttttgtgtaccgcacctctgtttcttgtttgatacatgcatattcctgcatttgttaagattcgtttggttgcagacaatggaattcagaatgttgctaacttcagctgcaagtgagaacttgttggaagggaccaagatgccacccacagggttacctgccaggagcagatggcaacaggaactggaactccatggggcaccgagaaatggtctctctgtcctttgcttctgctttgttgtatacatctgattcatttcttctttcttgaggccaactgctgttttctgctcattaatccacaaggccgaatgtggccaacaatgggtctccacttccctgtgttcaatcgccacctgctggagaaaaacttttttctttgtcccagatcgaaatttccagactggcccctttgggccagtcaatcttggcctgcagggctggctacaggatctgtgaggcccagtgagaaataaaagcgtggtagcctttattcccaaagcagggggacrtgtccatcgtggtactcagcgagcttctttgtttcttctgcagtctctttttcgacttgtcatggtgctttttattttccatttactgttgttctaagtaaagaaaactcaatgttaaattattagcaagcattttaccattcatctttatatcaaacaatgccagttttaaatgtaaatttcagagcgtttaacttatatgcagaaccactgaaattacacaattggtgtttgtgacttgttggccagaagagacaaacacaaaccaaactcataaagattggaagcaggaagacaagttgcctccaggtttgcccaacggggatgttctttcaggcctggacatactggatgagcggggggagtccagacccttccaggcatccaagggccctgtcagccaccagacacatgcactgagacccagccagggaggcaggatctagggaaattggtccagctgtctcccctttccacagccttccccagccagccacagcagactaacctccaaggatctctaaacctctgtgctatgacaccctcagtacctgggctaggggtgggcagaggtttgcccccatcgagaaacagcctccggccggccccgccacatacactgtgtgctgccagcctagggcagggacggccaccaccatgccaacccgagatgctgcagggtgcatgcaccctatcctggccctctctgtgcctgtacccaggaccctgtgaagtgtggacagcaacagtggccataggtcagggcagaaagggggaagccaggtggagagcacaggcagctgagagctggtcgtgggaggcagccacaggtggagccatgcataagccaggcttccaaagcacagattcaaagataaagttacgtccgggtgcagtggctcacgcctgtaactccagcactttggaaggccgaggcaggcggatcacttgaggtcagaagttggagaccaacctggccaacatggtgaaaccccatctctactaaaaatacaaargttagccaggcatggtggcagatgcctgtaatcccagctatttgagaggctgaagcaggagaatcacttgaacccgggaggtggaggatgcagtgagccgagatcacaccactgcactccagcttgggcgacagaaaaagactctgtctcaaaaaaaaaataaataaataaaagataaagttatgaagactctcaagacagcgccacagaggattaacccccgcacagagcccttttcattggtcacttgctcagccagctgccccagtggcctgtgatgggagtgggaagtgtggggttgggtgataaccttctaaagttagaaccgttcccagaaatgcagacgggagagctttgggaaaaccatccaaaccttgttattttttatgacaaagtaggaatgccaccctggccctctaaattcataaacagtcacagacatgggattaaactacatataatttctgcaacgtggcttataggcatcattaaacagctgcaatatgttgaatggctatgtcatcatagattagctacgatactggctatggacttcaagactccatgtgtcctggcccctgcccttccacccctctgacccgagatgcagttctaacaggttcccgggtgatgctgctgctgctgacccttgcccatcccggagctcactttgagagctggctgagatcccaggcagggtggccagtggctgctccagggctgtgaagggctccccctgcagacggaggaactaggcctcccagygcctgtaactggaacgttggcggcttgagaatggacttgccctgaaggccggcctcctgctgctctgggaaaaagagggaacagaagaaagcaatccgccaccttggggactcctcctggattagcattatctaggtgaagaaagtgagaccatcacctaccaaccagataactcattccacctctgtgggcaaactggcagagcagcaaataagcttccttaatcccagtgcgcccacaccctgctcaagagctcatgggcacgtgttcatcttcaggccaaagatggggagccagggagtgacagactgtcactccaggagagtcacccgggggtgttaggatccccacatttgcaccccctgaaatctaatcagcattttccagctgttcctaatctgacctgtgcaaatggaatctcattggaacttgcatttttcattatagtaactcatatggcctctgtgtttcgcctgttcatagcctttgaccatttttctagctagttgtcttttcctactgactgatagtagctctttggtttttgttactgttagtcctttatagatgtggcaaacttttttatttgctatttcactatttgccttttgacttcataatgtgccatgactacccatgtgacaggctctttgagcctcagttttctcatctaagagatggggaaacagtcaccacactggcttagtggagcatcaaatgcggtaacgtctatgctgcacttggtcggccacatcgtcagctcccaataaatgctggcggctgtggttgccgctgcagttttataaccaaacttctctgtattacgaagacccctgagccccaggctagcaccgtgaaatataagcacaatagaaccactgagcgccaatcagatgcaatttgggtcataccgactttccattttgtggggtttctgtttaaatgtttgccaaagttggaaacgagattgaaatttaaggaaaagacaaaatgctgtgagatttgggctaacacgaacttctccctttgtcacgacccctccatcagatggcccctgagttctgcagcctcraggaagkcctgccctatctggacatggtgattgcagagacgctraggatgtacccgccagctttcaggtgtgtggtagccccctcccctgcccgagtccccacctcctacccctaccccctgccccagcctgcaggtcagggccctcctccatcagttaccacttgtgtttctggagggcaacgcctgagtcctgggttcctttgtatccccatggcacctcagrtatctggcccgctttcctacaggttaacaaccttctcaaagcttcacaggcattttcttaacaccgccttcctccccagcccaagctggccctttggtctcctagcctttgctggcttttgccatttcccctgcctgttcgttcattcattcattcattcgttcattcattcattcagcaattgtttattgagcatctactctgtgccaagcattgggaaatcagctgtatataaaacagataaaagtccctgactgatcttggagctggcattcagacagtaggggactgtctgagtcctgggagctccttcctgccatccaacacccccagctgtcccatcctggagctccaacacgactcaccctccaaaacgtctcactgcccctcaagacgtctgtgttgggcttgcctcacctggtcctccctgcccttcctcctcagcactttgagctgtaactatacacttcatgttatattcttggacacatatctgccactccatgacatttcactaatgtacacaccaaccagccggtcacaccaacctgtgggtatcttgagagcaaaaccaactattgtgcttcgttcaaactctcccaaacaaggcactccatagagaagggcatcttaattcatgtccccagacccctacagagagtgaagtaacagccagatttcaggctctagaaacagaagcagcacaaagcattaaccgtatgtgataaattccactcaacacttttatgaattaacagatcacataaaccatatggaaatacctttcaccatttttaaagacaatatgtggatgatttgagggtatctcaaaacgatatttcaacacaaaagcattacaaagaatgcaattgtagacattgtccaaatgttcaagtccagaagcaaatacagaaaattccggtggcgtgattcgaactgcattgtcctcaagcacacaaggttttgggtctcagtgtggaagcaggccagtcactcaggggctctgtgccccctctccccatgccagcattaagacctgatgtgcagcccttccctgatctcctttggagcctcttgcaaactgtcatccaattctttcttttattcttttttttttttttttttgagatggagtcttgctctgttgcccaggctggagggcaatggtgtgatctyggctcactgaaacttctgcctcttgggttcaagagatcctcctgtctcagcctcccaagtaactgggattacaggtgcccgccactatgcctggctaattttttgtatttttagtagagacggggtttcaccacgttggccaggctggtctcaaactcctgacctcaggtgatctgcctgccttggcctcccaaagtgctgggattacaggcgtgagccaccaatcccagccttatttttttcataattgatatccagctttcttccaaggggattgtgggaagctggtgtacatgttaaaatgaagttcaagataaagcattcagggatcaaatagaacaaaggccatttaaaggaaagaaggccttacagggccccagagctggctggtagctggggtccagctgtggcttggtgaccagggctcctggccaagagggagagcagccaagccaaacaggtgtgttctccagcaagaggacagcacagaaactgatcaatggacacagtacttcctggacctaaactcagccacgaatccatcagacaagaccttattagctgtcatgttgaataacaaagggrttaggctcttcaacatgaaaatgcggtggccgattctccactgacccgttataaacagcagagcagaaaaggaagttggtgcaggtggaccaggaagctggtgatctcacctgaggaccagacagaaactagagaacctgggtgaagtagttagaattcatctaacaggtctagagggcacgtcagaagaccatcttggccctggccttggcatactgcgtgatcgtgagcctcatgctgctccgtgcctctccttcctacgggttaaatggggacacacacctgcttggctggccctgcagaagcaggcaagaggcagtgggtggcacaggtggaactgtagtgcccgctcagctgcctgcagcatgatgtgtgcagggaggagcgccggcactggtcggacagtggaatggacagcttccatccagcctcgctctcctgagccgccccttccccacacatgccccacacccgccccacaccttccccacacccaccccacacctgccccacacccgccccacacctgccccacacccaccccacacctgccccacacccgctccacacctgccccacacccaccccacacctgccccacacccgctccacacctgccccactcccaccccacacctgctccacacctccatacctgccccacacctgccccacacccgctccacacctgccccacacctccatgctggccccatacctgctccacacctgtcccatgcccgccccacagccgccccacacctgctccacacctccatgcccgccccacacctgccccacaccttcacacctgccccacacctgccccacacctgccccgcacctgccccacacctgccccgcacctgccccacacctgccccacacccgctccacacccgcttcacacccgctccacacccgccccacacctccacacccacaccacacccgccccacacctgctccacacccacaccacacccaccccacacctgcctcacagctgctccacacctgctccatgggcatttttcaccctatcagctctgctggcttttcttattgatcaccagatatgagagagacaaggtgtcacaattctcacccagaccagaggacaatctgcttctgctcaaaggatttgggggtgaatgtagggagagtgagcatttttattttattattttatttcatctcaaaaagcgtgttgacttttcccaagtgctgacacaacttggacttaytcataaaagaaaatcagaatcgcccttgtgggaaacacagcagccctgtctgagcgccactgaggtgactcccggatgctgtgcggtgcagttctgaagcttctgttgatctcttatgaggttcagtttacggggaagggaaggccctattttccagcttccagggggtctgcctccaggtccaggctgtttccagaaaagatgaacaagcagggtgccagggaacagcttcatctgacccctttggaactgcgggtacagacatcacaaaccccagctgcctgccctggtttcagtgctggtgtttgctatcagctccaagcacatataattgcattagcagcttagcatctcaatgggttctccacgccctggcctttttctgttcctgtctgttacatgaaaggctcataacagagagggagcagcaagaagccacaggctgcttttaatctcttacgggcaggaacagggcataacagtaattactgtaatcattgcatttcctttaggatatttagggaagtccaatcctacagcttgaagtaaaatccagcatagaattattttgaatttttaattatttatattgccaaaatagcatgcttatacaaacaaaacaaaaccaaaaaaaaaaaaacagtcccggccgggtgtagtggttcacacctgtaattccagcactttgggaggcaaggagggaagatcacttgagttcaggagttcaagaccagcctgaccaacatgatgaaactctgactctactaaaaatacaaaaattagccgggcatggtggcagaaacctgtaatcccagctacaagggaggctaaggcaggagaattgcttgaatctgggaggcggaggttgcagtgagccaagatagtgccactgcactccaccctgggcggcagagcgagactctgtctcaaaaaaarcaaacaaacaaacaaaaaaaacagtcccctaaacaatgaagaataaaaaaaaaagaaaaaaaaaggccccctgccattctccatcccaatcccatcccctagagaagagaaagatagaaatttaagtattcttctagaaatgttatgttcatatacaagcatatatagtctaccctttaaaagtaaagcataaatgagattgtgccaktgcccttgggtaaaatgaacaatctgatcaaatattttcctctctgggagaagaagctatcggtagagacatagacaacagggaacagattttcaaacccaaatttccttccctcaccaggactcactcagaggagccaaattaacaaagaaagtagaaggctgtctgccagggaccagggagaggggaggggagggagttagtgtttaagggatccagaatttcagtgggggaagaggaaaaagttctggagatggatggcagtgctggttgcacaatgaatgtactaaaaccacagaactgcacactgaaaaatggttcaaatggtccattttatgttctatatatatatatatccacaatgaaataataaacaggtgagcagataaataactaaataaacccagcctcaccaggaccaattctgatgttccaatattccagaattatcatggcatttgatggacggtttgagcctgtcctcattagatgttctcatgtcctgtgttaaggacttaagactcagaagatttttcatggattccaggcacgtgggagtggtacagacaggagcaggagtgggagcccgtgtacgggattcattagggaaacagaactttgctacgttgggagggtatctcgaggacaagccttgacagagggtgtgaccagcgtctcctcccaacccccgtgttacctgggataggaaatggcctgaagtctggaaggtaggaggcaggaagtggggcttggttttcttgctgtgagccagatctgttggagtgggataatgctgaagtcagagagagacttctcaatcgaaccctatagtcacaaaagtagttgggaagggggtgggctgagaggtgcagggaggtgataaagagaagctggggctgtaattctgccctcgtcctaaaaggctctatctcatcctttaaaatcccaaatcacctgtaaccagaactttttttttttttgttttgagacggagtctcgctctgtcgctcaggtgtacagtggtgcgatctcagctcactgcaacctcctcctcccgggttcaagcgattctcgtgcctcagcctcctgagtagcagggactacaggcgcacgacaccatgcytggctaatttgggtatttttagtagagacggggtttcaccatgttggccaggctggtctccagctcctgacctcaggtgatccacacacctctgcctcccaaagtgctgggattacaggcatgagccaccacacacccggccatgaccagaactcttgagagcgtgtgctcaacactcgaagtccaaaagtctacccaagttcaggaagagagcggttcttcacctctccacctcgaattttgtttctagaatgttgcatgtaggtctgaagagtgacagcacgtttgtttaacaggaactcaaagccagcagatcaggaaaggacacttataaggtttggagtttgggttacagaggtttaaggtaggtcttttgtggcaaggaatatttgaaattgggcaagatgagtgagctgagatcgcgccactgcactccagcctgggcaacagagcgagactccatctcaaaaaaaaaaaaaaagaaattggggcaagatgtatgacataacaatttaggaatgagtgaatacaggtaggtgagttgaagggagttctgacaggtaagactgttgtctggcaagtgaactgtttgctcacgcaagcaaaccattgtcctgataggaaagtggtttgctcagacaaattagtttgcattaatttcctgaagccaacagtgaagctgtttcttsgttcagaggtttatcttcctcggcaagaattttctggagcagagaggaagtcactgacacaggtggtctcgatgctcactccaagagttgagttgtgtggctccaggtagactcatttcccagggtcacctgctgggccataatcaacaaggtacaagcttaagagagccatgccgggatttcaagttgcaaggaagagagattcaatggtgctttcttgagtcacgggtgttggttgtaagaaactggtggggtaaggaagctagaactctcccaggaaccaggaacggctctcactggcaggcctcacggaggagacccaagctgggggactggaaggtggttcagattgttcacaagctgcagtggctccagcagtcagattggggtgtgatctcacagcaccaggagccctgaacaccagcctgaggctcagccctgaaggcagcttgaccaggcaaacctggagactgcatcaacaccagcagcctccaacacacctgacctgctcatggccttaatcccaaacccaggtcctaaactacctctcactgtgcatcgcaagtcactgcccatcttcctggcttctgatctgctgccgtccccgattcatggcctcacttcacccactgattgcccttgactttgagctacaggtttcaccagctaactgcgactctagcctcagctctggggccatacagcctcaagcacctgggtcttgctccagctccagctccctgttctaggcagcccatccttgggaagaagcagacaaaactgcatgtcagagacatggctctggttgtcatgagaagactggattgcaaagaggtcaatgagagacgagaatctaaactaaggagatggcagtaaaactggagagatggcaccatacgaaagaccagtgatgaatctgcagacggggagagacgagtacaggatggcttctggtttccggctttctcaagcctgtgtgggaaacagaaggaggagaagattctgatgacctgctgctgctcaggccgacttcgaggattctgtggaccgcccagggaagaggccgggtctgtgggtagaaattggaacctggggttcaggctggggctgaggtaggaggcttaggagataatggaagttgaatctgggagggcagacgaaatccctgggaagtgccaggatttaagaggctggtggatgcagaagagcctgccaatgagggagaaatcaaggaaagaaatgtgtgtgtgcatgtgtgtgtgtgtctgagagagagagacagacacacacacagagaatggtaaagatgatggacacaggccaggtgcagtggctcatgcctgtaatcccagcactttgggaggccgaggcaggggatcacttgaggtcaggagttcgagaccagcctgaccaacatggtgaaaccaccccccgtctctactaaaaacacaaaaattagccaggcctgttgacacacacctgtagtctgagctactcaggaggctgaggcaggagaattgcttgaacctggaaggcagaggttgcagtgagcagagattgtgccactccagcctgggtgacagagcaagaccctgtctcaaaaaaaaaaaaaaaaaaaagaagaagaagaaagaaggaggaggaggagaagaagaagaggaggaggaggatgcagcaaaaaacagcaggtgaatctgggtaaacgatacatgggtatctaatgtactattcttcaacttttctgtaagttcagaattatttcctaatgaaaattaaaacagaaaaacaaacaaaccaaagaaatgtgcaagaggaagacaatcaatgacatagacagaccaagtcagatgaagactgaggagtattcatcagatgtacccataaatattctttggggatcttggcatggggaccatccacaggagggaggggacagatgccaggcagcagggctagtcagtgaaatgggaggagagggagcgagagggtgagcaagggcaattttaagaggcttggctgtgaatgggaagataggataggctgtggcccaggaatgaccctccaggcccccactatgaaagcaatccttccaaagcagtttgcaccccgacatggggcacaagaggggccctttgtgcttgacaaatggatgcatgaagggatggatgagtacattttcatcaaggaccaagtgagcctagcctcggggctgcaggctcctgggcagtgagtggtaatggggtrggggcttggtcaccctgggaagggggctgagcagggggtcctctgtccccagcctcattccacacaccatgctgcctgcccctgatccccttcacactcagactctgcctgcccagcacgccccaagctctgctcctcatctcttctctgtatccacccccgacctggtgtttccctcagattcacacgggaggcagctsaggactgcgaggtgctggggcagygcatccccrcaggcrctgtgctagagatggcygtgggtgccctgcaccatgaccctgagcactggccaagcccggagamcttcaaccctgaaaggtgagtactgccccttttaaaaagctctgaagggatgtgagtgtgtgggatagaaatttaccagtggaggcagcagccgggaggcacagacttagcaaaattgtccccaaatagtcaaaagttatggcaattcagatagatgtttgcaagacataatttccaaaggaaataattataccattttttagccacgcgtggtggctcaygcctgtaatcccagcactttgggaggccaaggtgggcrgatcacaaggtcaggagatsgagaccaycctggctaacacggtgaaaccccrtctctactaaaaatacaaaaacttagctgggcgtggtggcgggcacctgtagtcccagctacttgggaggctgaggcaggagaatggcgtgaacccaggaggcggagcttgcagtgagccgagatggtgccactacactccagcctgggtgacagagcaagactctgtctaaaaaaaaataaataaattaaataaaaataaataaataaataaataattataccattttttcaaggtccaaactgaatccagagatttagcatttcagcagccctgcatgcaaggaacaaggcaatttcaaatgattgtcttccattcattcaagccaggacatgggatacaggattgtatttcaggtctgcactggaaagtaacggaacatcatttcctttttaaaaaacgggcatctatgccaaaacaacagcttcagctgatgtctccatgaatctaaattcacgtgatccactggttgacctgggtccccgccttccaccacctggctttggttcattgtctcctttcatttctgggctctgtgattggaaacatctgagcaggcggcccacactctggtcctcatcagaaccagtcaatatcctgtgtgtgtgatctggcaagggaagggctggcccggcaccagttgtgttttcacctttcatggctccaactgagttcagcccaagcctacgacccagtcactgggaaaacgtgagcaatgggatctacacaacaatattccacagtcagcagctcctgaacgtgccgcagccacagggcttacagcctcacaataaagcccaggggtagtaaaaagtgagctcgctgttacagaacagtgagtgccacctagcttcactgtcatgggacacacgctgcaggcaaatgcactacttggtaggagattcagcagttctgaggaagggcctccagctctccaggtactgcagcttccagtggttcaagtgtccagtgcaggggcctgcaaagcaaacacgggcaggagaggggctgccagtgtggcccaagagacctgcagggcaagccagcaggacacgccccccagggagggcccaggaggtgctgaggtgcccggtaccctgccaaggaagcaggtggcggctgggtcatcctatgggaggggaggtggcgccatgggcccaggtgagggtgatcaccaaaccctggggttcagggatgccgtgtttagactctgattgtgggyggcggtgagtctgtgggcttaytagccacacactgaattcctaaggagaggcagggagggagctgtggacattccaggtgattctgcgaattcagctctgcctctggggctgtgcaggaagacaggaggccaggagcagagagggactgaggctcaggaatgagcagccatcagctcccagagccttggagacatccttgtctcagatgcaggggtggctcagctggagcacagggctgcagaggggagggagcgggtgttctgggccagccctgaccacacggacctgcaggttcacggctgaggccmggcagcagcaccggcccttcacgtacctgcccttcggggccggcccacggagctgcctcggggtgcgtctagggctgcttgaggtcaagttgacactgctccacgtgctgcacaagttccggttccaagcctgccctgagacccaggtgaggcccccctgctcagaggcagrggcaggggcaggggygggagggccaccccagttctctgcgtgagagcaggccagcctgggggcaacatcaggctctgcctccgtgagcttgggcaagctccttaacctctctcggcctcagtttcttgattcgtaaagtgggggtgataataataacaccctctacctctcaacatcctgtgaggatccagtgagttcacacagcgctcaggtaagccctggcaagccaacccgagcacgtgttaaccattgttattagtattgttctctgcacaccagggctggacctcaccttgctgtagctcttcccacttccacaaagggcacacagacaatggcatttgcagttgtgacatgtgcctgcctttgcggggtggggggtgcatggcttgtcctacagaaggtggggacacttcctctggctcctcctgacagagcaaggtgctgtctgcttggaggggaagctgaagggtttcagctccttgaasggtacccccagctttgccttccccccttgtgcagacactcacgtgtccccatggccacagcctggtccctctcacaggtggtgacacagcctcttcccaacaacatatgccttcattcctgaggtcctagactggtgcacagaccctgtcctcacccagagagctgagctctcctgaaatggggcctcacccacttttccagccctatctcccccccacatcacacactccagaaccagcagaccaattcctcaacaggtcagggagcttatatcccctgctttcacactcacagcaaccctgcagagtaggagtgactattcccattctttagatgaggaatcaaagctcagagaggttaaataacttgcctaaggccacacagcaggactgcaggcttcgtgatggcagggacccagtctgtcatattcattgttggactttccagcatctagcttaatgccaggcgcatgacaggtgctcactcattcattcaacaaacattaatgagcaaatggataagcagccagagatgagagaaacgggggtcctcacccakatcctgcccactcccaagctctccctccttcctgacatctggctacgtctctgcacagcrttagctattccctgcctatcctgaccactgctgtcccctgcacctatcctcatgcttgtcctgccacccggaacccactgttcagctgcagacctggacaggcaggcataggaaggcataaggacacagttgacagatagcaacaattctagattgagacaggcagtgcctctgacagagaacctgggaccagctgctggtcctggaggaataatgagcttggatgggggacatagagtctgagatactgaaagtgaacgcatccacatactctgggctggagacagggaggggcagatcggcagagcagagccaaaccaagtgaggtcaaggggcagacggaggagcagccccactgcatcggggcttccacgtgtgcggggcttgtctcacttccccacgatctcaacatacagtrcagcagccagaccagtctcccaaaacgctgcttatgcctggcactccccggcttaagaaccagccaggagtcaagggctccccgttcttccttgtctgctcagacaagtgctggggcctgcagctttttcagatgcctttgagggctatggctcccacaggagacacgtacagccccaagcactaagaccctggtgactctttgctgtcacattagccactggctcatcattttactcagctccagaggaaaccsaactcctcgagtaattctttggtttttcttcaaagtccccagtccaccactggctctgccttttaagctggacataggaaagctttctggatgtcagtgaggccagaccacagcacacatgagcaggaacagcatgaagctgctttccccagagcccctgggccagagggcattgctcagttactggccagaactggagagtgagatggggaggatcagcagggacggctggagtcactgaaagataggtttggggctttgctctctgctttcttcttgtgtgaccttggacaacggacttggccttcttgaacctccaagtcttcatttgtacagtgagatgctactatctctttgacaaatattttaattttctctattttaggtaccgctgcagctagaatccaaatctgccctaggtccaaaaaatggtgtctatatcaagatcgtatcccgctgacacagaaggctgccgggtsgggggagggcacccccaaattcaaagaaaaccctaagtgtggatgttcagaattttggaaaaatgtcactgaagtgattgaaagagtgcctggcatgcaaggrtaagaggttctttacataacatttcctaaatgcttaataaacrtttgttgcacttggttttgacattgccaatggggtttgaaccagtgctctctctaaatgaagaattgctgataaataagtgaaaatgtagttttgacaaaacaactgagaatgtggggttttaaaggaagtcccaggcttgtgctgaaaggaatccatggtgcagggcacatgaggacccccaggtaagcctgtcctgatggcactagctcgtggctctttcagcttctcgtgcattgtggagttgtagagaatgacatttatcgaaagttcaacctcagcagtggttccaaagctttattatgctttgattttcctaggtagggtagtaccaactttacagtcaagtttcaatcgacagaaaaatgagagtctgaaaaatgatatactttttcttttaaagaacactgtatcggccgggcacggtggctcacacctgtaatcccagcactttgggaggctgaggcaggtggattgcctgaggtcaggagttcaagaccagtctggccaacatggtgaaaccccatatctattaaaaatacaaaaaaattagccaggctgtggtggcgggcacctgcaatcccaggtacttgggaggctgaggcaggggaattgcttgaaccagcgaggtggaggttgcagtgagccaagatcgcgccactgcacgccagcctgggtgacagagtgagactccatctcaaaaaaaacaaaaacaaaacaaaaaacactgtatattaattttgatcaaagaatcaaaatatagaggtgattttttttgtaaaaataagtattgtgttgctaagcagttcacattcaaccaagcacttgcaaggtcagtctcacgatcagccaccagcagctgcgcattcatggctgctggtgaagagccgtatcacctccctgtgcctcagagacctcttctgtaaaataaggaggctggcctcgatcaaaagaccacttgtcctctagttgacacctgagcagctttaagaggttgaatgttgtatagagaacgatcttgtagaaatctgtaagccccttatgtgacacccagatgctgacgacccacctttagaaacttcaggccattttgggagagttggcagaatgagtttccacatattcactgctgggactgctgcttccactgtttggtggtcccccatccccttcagccaggagcacccactgtatccctcaaaatcccccttggggggccccttctcttattctctggccctccaggcaggaagaggacaccccagctgcccagcactgggccaggcctgtgagtgactgctgcctcaaggtgtagggctgtcctgtggccctccccacacccttgttgccaccacctgcccttctccatcacctggcccctctgcaatgcccagcctgggactcagactcactggagaaaaccatccacccctgggaacctgtcggcctccctgcctgtcccacaatccctgacctccccacggctgccgccaccatagaacctcagcctgcagacaggcccaatggcgcactcagctccctgcttggagcacagccccacaacctgagtcctcccttgggacctccggccccgccccccggcctgtcagctccatccagcttccctcgccttcccagctcagttggtcaccaccttcagacacagtggtagaggcttcctcatgtgctggggtcactggactccagtccttctactgtgtgaggccaccaaccccacctctgcttaaatcccactgttcacatccaacaccaggtatcacagggcagggaaccgcaccgcctggtcctccaaaaaaccctcttgctagattcccaactgagtcctcacaaagattctggccaatcccacacacatacacccatgtcccagaccctaccacctcttggcaccaaacatcttgagagtcacagtcatttccaccccttcccatcacaatgcccaccctttctgcaccggcaggaacggctccctccccgtcatcaagcaatctggccatgtggctcccaccctccctagcattgctggtccaaggagttgctcttcctaacctgctttcttccaggtcacccagccatggctgccagagtcttcacagctcagtggacttttccggagcaactgagcatctcccaccggatccctctggccgccctccccatctacacccccagtgaaccagttctgctccccaaatctccccagctcccagatgattcagaagcatagaatcagttcacttacatgcaagaccttagcaacagacatgcatctgatttaatggttttctctgacacctctttgcccctgcccaactacaccatagcaggaccaatgacttaatgaaaaagcaatgagtgaaatggcaggatcagtcaggctgtgaggaaatttggagggggttctgaaaatcataccatgggcaaccatgtggctgacccagctgctgggtgaagctgtgttgttcttgctgttcctctggtcatttaccttggctctcctccagcttgactgcacttgcctgtgttaaggtttcagatcactccaaagatggaaaaatgggttcatattcaccttggacctgagaaatacaggcaagccaactgaagcccaagcagcaagtcgccagcagacacacgtcctcaggaaggtggaggctgggcaaaaagcatgtagtgaggaccgagtagggagggctgacagcctggtgacaccagtggccccgccagcccctctgccaacagggccagaaccagccaaagcccagaagggaggctcctgtaaactgccacgtgtgagggacacacacaacactctctccacatgcacagcacattgctcagtggtgaacctgggtcttacggggcctgaaacttatctacgaattggaggaaagagaaaaaaaaagtgtaacatttgcaaattttatcaaaacctatgaccatgtgaccatattgctagggtccctcctagggcctggggaggggctccagcaagtgaggggccctgaaccttcagcttcactgtcttcttaataaatccatacgtagctcaccaagccgtgtcatcagctctgtcacagccctgataacggtctgaatgttacgacccccaaaattccaatgttgaaatcctcacccctgaggtgatagtatttaaagtagaggtgattagaccaccagggcggagccctcatgaatgagattcagtgcctttataaaagaggcccttccaccgcgtagggttacagtgagaagactgaatctatgaggaagcaggaggttgcactttatagactccaaacccggtaaataaacatctgctgttgatgagccgtccagtcaatggtgttttgttacagaagtccaaatgaacaaaggcaatccctgactctcagaaaaacgcctggcactcagtaggtgctcaatcaatagacgcagaaaaatgagcttcagtcttcatccacttcggataaattttcttttatttccatactcttttgtgacatgtgtggcacaagtattcaatctcacagggatgttaaaacccacactcgaagggtgtccagtgtgcttaggaaatgtgggtttgcgcaatcacaggccaagcctgggggtcctcggggaagctactcctccaggtcacctgccaggtggatgcacttccttgggcaatgggtgaccctcccaggacaaggggaaccagcagggactcgatggcaccacacagcagccacctgttctgacaatgtgacacagaccaactaatgccagagcccaggagaagccacagcagagctgcctgggttggtgtcagagcaacaggcagaagtgactgtgccgcccgtgggctgtcatccaccggtggctactgtgtcattctggaaaaactatgatgccatgagactctgagaaaccgaatcactgcagagacaaactcataaaaattaaaaccaatccataaaattgtatctagaaactctgtccctggtgccaataagcagcaaagtcaacaaagagtaaaaactaaaacttcaacacattattaaaaagcaaaactggactcaactacaatcacttctggttagtccactagtgaacccaaaagtgacttaaaagtaaaaatcattattagcaagagattaagaacataacttcattgagaggtcaatgttaagagaacagttcattaaaagtttctgtttaaaaagaaaaggaaaggcccaaatagccatttcaaggcagagcaggtgaaaggcctggaacactcctgtgcgctcactgtcggctgctgaacagggagcccaaggccagcaggatggagggtgtgaccgagggcttggaggaggtggtgtactggatgacatactctgggtagacctggtgtttctcaaagatcacaaagatggaggggtcggacacactgttcacgcagctatcatagaaggcgttgctccagccctccttggccggcggacggacaaaggaggcattgcccctgacgaactcgcccaccagcacccgggccaggaacatcgtgtgggtctgcgtgtcggatttgctgtagtggtgggaatatgcagcatctcgggcaaagtagctccctgaaatgacacacgagggctcagctggtggaggggcctgcagccaggaagggtcagcacactgcgaatagcgtcctggtgatgtgcaacgccagggcctctactcttccaccccgcatctccctccctccctctgtgccatgtctccactctccctcatgaagtcacatgcatcagtgataccaacacccttctgagtggcagcatctgaggagttaccaaactgagatagcaaattcctttcaagttccggatctgccccacgaaacctaaaggcctgtggacacgtcactacttaatcccccaaacctcagattcctcaggcataaaatggggctgttcagcccaaccttacagggttggcatggaaaatgaatgagatcccatatacggaagcagtctgtagactctggcagcccaatgtatagaattatgagccttgtcaaatggaaatctgagttagaagctgtcacctgtacatttaaatccacaagtctaccactggctgctgtccatcttgaccccttgccatcgctgcctcagacggaaactgactaacaaagaactgatggacccggaacatggactgctgggcagaaaatgttctcaacttggtaagcatattgtggttacagaagataatgtcctgttcttgggatgtgttaaagggtgaaaggagacaatatatgccacctacctgaaaatggtgcagaaagagagagggagagagaaagagagaagtggcagcatgttaaaaccaatgaacgcaggtaaaatttacccaaagaggttttttttaattattattattccaattttcttgaatttcgatttccaaagaaatagtattttaaaattttctttggcaagtttaaaaataacagacaagaaaacactcagataactcacgtgatagctagaatacatgtttacatgagtatctctgagggtttctggtttctattctaaggaaatcaatagtaaaggcacagtcagggacttcatcagggctgggaaggtatcccctctcctctcccgtctctgtcaccatctcccagggcctctgctccacagggaagcaacaccccagcctaggcaggccaccctgcccacacctggggccaagctcctgaccatgcccagaggagcaagagcaaggatgtgactggtagctgtgcccaggtaccaccacacatggagtctgaacctgctcatcagctcaggctggtcccctcatgccctctagcagtctgttcctatgcaggggcaaagcaacatgggttttgctggtggaggccagtcatgccttacccttgccgtaggaagtgccatgaacaccacagacccgccagtcaaagttctgctggcagatggcgtccacaaaaatggcgctggtgccgtggaacagctgccgctcgtccacggccttccctccgttctgctt

SEQ ID NO: 8754 - DNA, 32304 bp, Homo sapiens
cggccagccaccctgtccaggaggtgaggggcacctctgcccagccgcccctactgggaagtgaggagcccatctgcccggccaccaccccgtctgggaggtgtactcaacagctcattgagaacgggccatgatgacaatggcggttttgtggaatagaaaggggggaaaggtggggaaaagattgagaaatcggatggttgccatgtctgtgtagaaagaggtagacatgggagacttttcattttgttctgtactaagaaaaattcttctgccttgggatcctgttgatctgtgaccttacccccaaccctgtgctctctgaaacatgtgctgtgtcccctcagggttgaatggattaagggtggtgcaagatgtgctttgttaaacagatgcttgaaggcagcatgctcgttaagagtcatcaccactccctaatctcaagtacccagggacacaaacactgcggaaggccgcagggtcctctgcctaggaaaaccagagacctttgttcacttatctgctgaccttccctccactattgtcctgtgaccctgccaaatccccctctgcgagaaacacccaagaatgatcaataaaaaaaaaaaaaaaaaaaaaaaaaaaaagaaagttggaaaggcttcaggattgtcagttaaatataattgtttttgcctgggtctactgacagacaggtttacatcgtctctattacttttctttttctttttttttttttttaaatttgttttttgtttttgagctggagttttgctctcattgcccaggctggagtgcagtggtgagatctcagctcaccacaacttccgtctcccaggttcaagtgattctcctgcctcagccttccgaatagctaaactacatgtgtatgccaccatacttggctaattgttgtatttgtagtagaaacaggatttcaccatgttggccaggctggtctcgaactcctgacctcaattgatctgcccaccttggcctcccaaagtgctgggattacaggcatgggccaccgtgcccagcctattacatgttttaaggtcataaaactgctacttctggaatatttcttaaacttgcttgatttgtctaaattgagctaaagctgtaaggtctggctgctgggctccctgaaaccttgcacatatcttactgtatgactgtatttcgttttgagtctctggattctggggtttggacagatgaccatagtgaggcctgcagaaatatgcatgtcctcagtgtttggactgccagctgcaaggcagagccaaacccaatatggccccatcatccctggctcagctgtgctacctggccatgctggaaggggtttgatcttccaggaatttgcttcacagctctttcctgtcccaagatctatgcctgatgtgtaaattcaggacccaaaagggcacaaaaaagcaataactactaaatataaggaaaacaactctgtatacagcatgtataaagaaaagcaagatatatttggggagataaaagttgtaaaggcattaagatgtgtgtttgttgagaaaaaataaatttgtgcatttaagaagttaaaaaaaaaaaaaaaaagagtgccctggcagaggaggaagtccattcagatggctggggggccctcagaattttatttttggtttacaaaaagtttaggatatgggggacgttgctcatggctggtcaggagctcgagagtggaagggtttgagggaactggggatgggggaaggggtctgagaaggggatatacagagctgtctggggcaaggggtggcctggggggactcgaactttccatacagagggagaagcagcataatgagcttcatcctggggtctacagtggcagacagtggggaaagcagtgacagggaktttgccagcagaggaggcagctgagggtgtcttactcaaagaccctccctgaatgctgggagctgggaaggggttggttttgcccaagcacatggggtctcacttgtcttcaggcaatggtggctgcctgaggatagcggaggctcattgccctaggccaagtgggaaaactgcctcacccagaaggtcacaccctcccccacaacccagtgcctgattgatgaggggagggagaggagacacaaaatggtcctggcctcaaggcagggacagccgtgaggtgcagtgctcccgagctccccttcatccaaccaggctgaagcagtcacagccttgctcagctctctgcaccggctctctacccccactctcctttcctaggagcacccctccataatcacctccacaggaattccatctcagctctgcttccaggaaacctgacccaagacagaggttgttgcaarggcagaggccacaggcatctacaccagcctctgtgcgttcagtctgtgagcggcccaacgctgcccatgtgctcctccttaaagcctactcaaccctggggtctacaggcaaattcctcgcgggcgccttcccttgtcctggctgccgctctgcttcctttgcaagctccttctcgcacccttgcgctggctccctccagagggctccatcccctgcccactgtgccttcgtgggtggtgcccagatctctgtctcctctgccctggacccctctgcccctgactggcagatctatagagttcagtgcccctggagggctccacgtccatcccacagggacccggactctcatcttcctcctgagcgtgctctccctggagacctggcattggaattcrccctgccaccttctggtctccccaagtggaaacctgggcgtcagtctggacgcttgtcaccaaattctgtcccttccaccttcacatggcctctccatcttcactgcctccgtgtctctatctcatcccgatcaccttcgcctctcctctggcggagagcaccagcattcccactggtctctgcttttcctcaaacgcatctctgtgtaactctcccctcaggatcactctgtggcccccattgctctgggtggaatcttccttccagtggcgtttcagtcccctgggtctgcctcactcttcaccaccgtcttgtgcttctgcactgagctccagccagaccacckgcctgcagccacctggcgctacctgttcccgtgtgcttcctgcctttgcctggagagaataacaatctatagtccaaactcaaggacaaaaacaaactgctttttggccgtggtggcatgaaaccccaataagtcaatgacaatgctgcatgcttctgaaagccggccagtcagggacagccccacactacagaacaggcccaggcagcaagaaccttgtgcccctgaagtcaggctgaacactctcacttctgaaagctggacaatcctcaatgccaggcttcccaagagactcaatttgttttgctctgagagatggtcctataagcacagttccccttttctctcgtaagcaagatactcagcttcagcactgaccagcctcacaatccgtcctcaccaagtggagggccctccctccgggttcctccacggccgtatstgtctctgttcatacaccttcccctcagcacttagagacacgggctggcatggcgggtgctggcggcaggggtgagaaataaactttcagccctagaggaggagcccaagaggagagcatgccrtcacctggagtctctggtatgtgcctggcacctgtactgattgcattaaccactgtgattttttagaagatgtactagtttgaaatgtataatacatacggagaagtgtatgaaatatgtacaatttaaagataaggaaaaatgcatgcctgtgtgcccaccacctagtgaagaaatacaacctggacaccactttggaagcctgtctgtgttcacccgtcgcattctccctcctcccccagcccaggtatcctccatcctttagccatcccctgactttctttagtttcattgcctgtgtatgcagccacgaataaaatattgcttagttatctgggaaaccgggctgtataggaaaagggctcttagaaccccacaccactgtcagatgcaggatcccagaagactctgctcccagtccagcttccaattcctgtgggtttataacgggcctttctagagacactgggggcaggattcacagagctggaacatttgcagttaggaccacattccagatgaccaacagggacatgcttgggggggataggccaatttggactgtccccttctaagcccaccaagacctacctgtagctctcaggagtggggtcagggcaaaacatgtaagtggggtaaaacaggtgacctctgattctaggcaccaggagatggagagaagagcaggaacgagggaacacaaggggaaggcaggcacaggtgagaatctaggccaggctcacctggccattctgtcctgaggcttaaaaacatgcaatgatggcaatgacagcatttgatctgtctctggagtcacttcgcatgaggtcattctccctccaccaccctcctgggggattcctttacctcctctcccccatacatcccatattgggaacttgtgcttccagctaagatgcagtaacagactgaatttaccctcttgcctgaaacaactcaacagctggaaaaaaagaaatgaaacgatggctctgaaaatactagaaaagcagcacaggacagaagcagatcaccttgattccagggacctgaaatcttctctggaacaacacaagatacaatttaaatgtaaattagggtaggcccagtggcccacgcctgtaatcccagcactttgggggaccaagacgggagggttgcttgagcccaggagttggagaacagcctggacaacatagggagacctaatttctaccaaaaaatttcaaaaattagctgggcgtggtgacacgcacctatagttccagctacttgggaggctgaggcaggaggatcgctttagcccaggaggtcgaggctgcagtgagccatgatcatgccactgcactccagcctcgatgacagagaccctatccccccacgcaaaaaaaggaaatgaattaacattaattcctctcaagatgcccaggctctattcaccccctttgtcattgtccctccagttggaaattcctccctcccccggcaaaatcccgcccacccttggaggccttttcagatcattcttgccagatgagctccccttgtcccttctctgagcccaaaggggcccagctgcygtctgtctccctccttccccttgtttcccgcgctacctccagggcacttcccaactcactggccaagcccccaacgagcggtctatgctaactttggctctgtgaatttcctagagtgtcatgggttggggaaaagcgcgcgaagtcctgccttgcagcaggcgcgagagcaggcgcttgggacgcgggttggggcaggggccccgggacgtagggggacgtctgcgcggccctgcgtccccgggacaacctggcctgggcttacccacggccaggcgctccgcggagggcagaagcgggctgggccaggctcctcagcgccaggcccgggccgcagtgccaacccsgcaacggcactggacatgcaagagtcggcgtcagtgcgcgtgaagccggagcattatcaggctcagccaaacgcggcccggttcttgggctttccgctctttctktggggcagagagggaaagaggcctcgagtcgtgcgggctccaggctccgggctctgggtgaggcctgatccctgctcccacccggccaccctcattctccagttgtatcccctgccagagtctgcagcctcgggccgcggcgtggttgcctgggaaacgcttgcgcctgcgcagggcttcctaggcgctggagtccgccggcggcctcgccgctgccggccgctcacggaggaactacaattcccaggagaccgcgcggtgggtgggggcggggtagtgggcggggcatcggcaggctaggttttctccgcgcagsgccagtcgcagaggaagatggcgccgcggagggtcaggtcgtttctgcgcgggctcccggcgctgctactgctgctgctcttcctcgggccctggcccgctgcgagccacggcggcaagtactcgcgggagaagaaccagcccaagccgtccccgaaacgcgagtccggagaggagttccgcatggagaagttgaaccagctgtgggagaaggcccagcgagtgagcgcggcccgcggtcggtggagcggggccygggggcgggggccgtggttggggtcgttggagcggggcccaggggtcggaggcggaggggggcgcagccggggcacctgtgccctacgcgccctgtccttggcacagcctcccccaagtgtcaggtggggcgccccgacccyttctgcagcaggaaaggtacccgtgccggcgacgacgccgtgtgaagcaggtggcggccggcaccccgagggtcagtgtcgccctccccagcctgggcggcctgctgacccgagcgtagggacagaaccaggctagatcacaggtctcctgcctcccgagcctttgcctgttccctcaaccttatctccctatgtggggaaacaagaaaaacaaaatgttgggtagaaagacgtgtccagggacagaaggaatcccagtagcaagcccgtgcttgttcatttgagcgagaaatgaggaggtgaggagatgggatcggtttagagcacataaaacgcgaccttgggaatgctgaaagtcagtcttaacagggcgctcacctgacctctccttcatttgagagatgagggtacggaggccccgaggggaaagggcacccccaaggtggctcggccggtggggccccccgggacaacagcttcctaattggtgcgtgaccctgggccagctgctctcttcattaagatacggttgcttcatttsttaggtgttcctgaaaacacctgaaatgggtgttttcgaactatgccgaccatctgggcctcattatctcatctcaaatgcaggagtcagattagatctctgtctcaatagtccagttttaagcattcctgagtctttgagagggaaagtaartgatttgcagaataagaaggaacttttggaacgaaaagggagaggagaaacaggtgggggacagacagacgacagacggttataagactgcgtggggatggggattgacgcctgggcatcagctccacaggccctycctgaactgctcctgggaccagcagtcaagccccaggcgtaatgttcagcctgcggaggtgggaggtgggagaacgctctgggctggagcggcagggcggcttcttggaggaagggattctggaggggctggggacacggctgggtttggatgtgttgatggcctcccagcagcagggaacaggtgtgaccaggagcagccgggatgcagtgctgcctccccgtgcccactgcactgggcatctgttgagtgggtggagtcccccctccccatgaggaatggggagcccgaaatagactccctgaccgattggaggtggcgctgaggaagtgcactcggrcccaggaaccccagcggctcccttttgggtgctggcccaagtcttccacctgctctgcagggccgccctggtgcgctccaccttacctccagccacctccagctggtcctctgtctttgtcagcccaggcctcctgcagcaatacacctgccctcaggctgcccctgcactggtccagctaccctcgggctgcccctgcactgtcccccggtgctgggtgctcgcctgaccagtttcagtcttgggttgggtcatgtctcctraacctccctgaggttcactgggcaccatggtagggcgagctgctcacctccactttggactgagccttggactagatgatctttctggtccctttaagtcctgaagttctagttgtgtgggcaagtcttttttgctgaacagaacgtgaagttcttcgggggtgagggtgttttgggggattttgtgtgtcttcccccmttccagagagcctggtactatggcaggcaggcctgcagagcccattcgtcctgattttccttccagataacggaagcttggagggtggcggtgctgtgagggtgttctatcctggagccaagtgtgcaggcgtcagacccgtccgggtctttttgaggttctcagtggcggtagtgcatcccgggtggtctttgtgctgtggctctttctgccgagcgtgccagggcccagggtggtcaggaggcaggaggagccacagtcagttcaaacgtagggggagagaattgttcgtgcaaatagtcactccagtcggcttcttaccccacctgactcgccgctctaggtaggtatcagacggagacggggtcttggatcgccccctggaagataattgaggtgagggctgctttttcagagaagcacttcctgcccggctctgcagccactgctctcagcctcctgcgacctgcgctcagcagccaggacggtcttgtcctttctttggtttgcttcatgaaaacatcgtgtccctgttttctgcatgtaaagccacatcctggcatataggattgcgtagtgtgtcagtaggcatagggtgaagggagcgtttcaggaaacctttgcctttgatgggcttgggctgtgagacctgcgttgaggttgccgccaagaagatgctgagacccgctttcatcaggcgagacccggccrggggggtgctgcttcatcctctccagcaacttgaatcttgactttctgtgactctcccagttcctctttcacaggcgggctccactgtgttgcaagactcctgagcagaggctgtccctggagctttggaggtcagaggccatgcagagcccttgtgctcacagacgacttctgaggactctgcctcttcagagctctgtgtgttgtgttgatgctgaggagtaagctccagggtctgcatggtccagctgcggcgctcagggacacactcgtgtacctcttggcctgggctgcacggtgccatgagctcggagtccttggccataggtccttagtttttttggttttttgtttttttgttttttttgagacagagtctcactctgtcgccgaggctggggtgcagtggcgtgatctcggctcactgcaacctccgcctcccaggttcaagcgattctcgtgcctcagcctcctgagtagctgggattacaggcatgcaccaccatgcctggctaatttttatatttttagtagagacggggtttcaccatgttggccaggctggtctcgaactcctgggctcaagtgatcctcccgcctctgcctcctaaagtgttgggattacaggtgtagtcccaggaggcaccgcacgcagacagtccttagttctgacrtgaatggtgactgcaatgagagtgtgtgaagcatcttgttctcagaggtctgacgagtggaaactgaggtctgcagagaggagccctcagagccccaccccagctctcaagcgtcccccctggcttgagaagggcctctgaggatgggccagccagtggcctccatgggcacctaggactcgccaggccaatgcatgacctcacagcagctcaaggcgggtacggctgtgcccttgtccacggagctcaggtggaaggagctggggcacagtggctgggctgggacagtgcatgccacctgccgkggtgagacaggtacagcgtgccaggaagccttggtcaccgccacagcctgctcctcatggtgggtgccttgcagtctggcgcgggcactcaggtgagcgctgggaggatggcacatgccctctgaagaggtggtccattggcgrtcctggtggcattggaacctgcccagcctgaactgtgckgtgtgtgcaggttgacaccagtggtgtagctgtggaccctggcctgggtttcctggggcgttgagaagcagcagcaggttattggaaagttccagaaagctctgctggcacgcgggtggtgctgtgtggggaagggccactgctgaggtcccragcagtgctgggcccttgggtctggtcaggaggacacggtcggctctgcttgtgtctggggacacaggaccggcgtcgtttgatcagctgagccggctttcttgcctgcatgtataccctggttgttgatgatttgcctcgctgcttcatgtttgacaggttcttttctgcagttggtttccacagggtacttctaacttgatgcgttaacatttaacttgagagaggtgaaagaatccagacgtggggtctggggtctgcacgtgacctgctggtcttcctctgcacagagctggggctgctttttgtggtggtgctgccaggctggccccttctgcgctgagcactggcagccacacatcaggggaaagggagctggcttttgtgagacatgcggtgtgaaatttagaccccctgttgcctgagagttkgggaatcagagggagaaaatgactttcccctgtgggttgcagattttacagcccacagagcacctgcccttgattctcccagcaccctagggaggcagacaggaagccagtgaggactgcaagttacaggggttggtgcctggctgtgagcctgccaggatgggcccaggacttcagcagccctgggtcttcagctccgctttccagcaggcagcccatgggcagtcatgggacacctgcatcctctcccctgcagccaaagagggcagacccggggcccctcaaggccagcacacacttgagagcatgggcctgaattgcctgccccagggtgctgcttctggctcagaccatcactgtgggcctcgcatctcagaccctcccgggcagtgcagcacggtaagtaaggcgcctacagggtagcagcagccacggggaagtagagatrgaagcagacctgttcctccaggagtttgggtcacaaacaagataggcaggtgtgggctccccctcctcctgaggcaccgactgcccctcctgagagttcagcgtcactcaggtgcctcattgtcctgggtcctcctgctgggaatgctcagatcagacctcaggtctcctagggccttccagtggacgccgcaggcaagtgtccagggcacagaggggcacggggtggagctctggggagaaggggctgggtggatggggctggctgggtggatggggctggctggggaagaggcacacaggtaggggtgtgtcgaaggctgccagggaaagggttttcaggttgggacartcctggaaagcagcccctgcagagatgggggcgcagagcatctaccaggagggcccagacaaaagactgtcctgggaccacccacyaagggttagagaaccttctagagaattagaagctttcctctgccctaggccctgccattcattttgtgcctaccgtttgctatctttttaccattggggatcttggctcagtaatctgaattcrtccctaactaaattttaaactcctggagggtggggcctgtgtggctagggcagccacagagtcaggctgggcttctgagagaagagagggcggagctgacagccccagcacccagctggagacagggcctgtggtcaggggtctccttcctcccaggcccaacacagactgagctgcagggagcaggatgggctcagtctagatacaggcagagtgaggcgaggaggttccggagtgtggggtgtgccaaacacacagaattggcttcgtgcgagtcttgaaagaaacgtgtgcccctgcgcggcgcggacctgagggctgggcctcctgaggtctcgggctgcaaggcagtgtgggccacaaggcggcgcgggctgcgggacactgggaaggcagccggctcttgacgcttcgtggggatgttcactgttttacgtaaactttattgaaatataacacacrtactttggatactagcttgtgttgtatttatgttagaaaatagctaatgaaatatagataaaagattaatatttcaaacstctaagggaaaacagactccatatttaaacacacatgatcagagacaggcgttaggtgatgggcacctggagctcagaggcaggagctggggttccctcctagagccacgggcagctcatgaggaccagccccgggggaatgtgagaatgcaggtgctcagggaaggggaccctcctgagagccgagagatttggggatctgcactgcacagtgccgagcacttcctttgctgcaggactccacagaggctttaatgcgctggcgtcactacaggcatgcggtgcagcctccccagttagccagggacagcaccctgtctccgtgaaccctggtcccacctcatgacacgttctggttcacacagctgggccactctgctctgcacggmagagccttcgcttccctgaagggctagcctgccccagygcacgcctcttagcggccgggccagccccgaggccagagttgatgagagctggccggtgggtttcattctgctgcttgcctcggccgcctggcattctggcccagtcwttctgacgtggggacactcttggcctaaatcctgtctttgcaaccaaaaagcagtgtgcccagcggtcacctcacttgcttccttctctcacccagggtcccagagctgggagggcaggggtgggatgaatgaagcgtggcctgccctgcggagagggatgagggtggggcggggaagttcctcagccccagtgcggcagctcrttccggggcgctgcctgtgtggtctacgccagcaggtaagtgagagggtgacagattcctgctccagaaggatctggggctgtgtaagaaccgtctcagcaagacagttcggatcatggtacacttgagaggtggtgactgagggtctttgggaaatgaagatggggcagatctgagattacagtgattttttttaaaaaagaacttctaggtgtctgtgtccttgcaatatgtatctgcartggtaatgcagtgggtatcttcttcctgctctgtttatccgagtgcccgatgactgtcctcaggtgctagggtggggtgtcctgttacagccggacaggaatgagcagccgctgctggtggggagcccccgatggacttggggtttccggatcgtgtatacagacaggcctagagactggtgtccatgttgagttcttgtctaaacctgtggggtttgaatcctgctgacagtgaccctgactccacctcttcctggtctcccagaacctcccggtggccagcctcctccgaggtcagtttctcgctgtgtcctggtccgtcctgctcgtggctcacaggctcctccccttcrttcgcagctgcatcttcctcccgtgaggctggccgagctccacgctgatctgaagatacaggagagggacgaactcgcctggaagaaactaaagcttgacggcttggacgaagatggggagaaggaagcgagactcatacgcaacctcartggtacgtttgtttctttcctaatgcaggtcgagtatccctcttcctaaatgcttgagagcggcagtgttttggatgtcggattttgtttttggatttgggaatatttgcattatgcttaatctggatatccaaaatgagcctttccccgagcatcctgagtgcccagaaagcttaggatttgtgttgggggctcaccctcatgagggaggtggccactggcttcagtgtttgggggggctaaccctcatgagggatggtggctgctcscctcagtgctgtgggctacgcctctgactccttggcttttggccaaggggsccattgggcacagcctgcggggggctatcctccgagcacagatgcgcccttggccgtggtctcagtttgctgtcacagatgccattggcacgccagagggagggccaaggcaggggctctgggtgcaggaaggggccggaggacagcaggaggctctgtcacccagaggaggaagcaggtctgccctagcatcttgaagttttggggacatactccagatgtcatcagaatggacacttggttgtcatgcgcttagtgagtcctcgtccctgtgggtattcaagaagaggcaggacagtcgcctgcttggtaccagcatacggaagacaggtgtgtcctcagagccgggagggttttaaatgacagagttgcgactgttccttttggacccctctcctccgccatcctccctcaccacgggcccgtcggcagggcactggcgggcagaggacgcacaccaggtgggcccgtgggactggggttggggctgctccggagagtcgagtgctcagctgcctgctgtcagctatgtgtagcagccctaggagctgctgtgcctccacccaactgctgcccctggscctgaccccaggcaccccttccccaatcccctcccccgctgctccctgtgtgacctgggcccccggcacagtcccctgccccccacctccgtttcctcctcctgtctcacaggacggtggtgtgaaccaagtgggatactccccactgtggtgggggtgggggtggctgccatcgcacttgttgctgtcgtgagggtggccccagagccctggccatgtctggagtctgctgtagccctgcttttcacacgcgctgatggcctcaggcattgcagcgcccgggttgtctctggtaaagagaggaggtgtctacggagttccttcgttaggcctgatgctctaacacctactcctcaaaactcgttgtcgtcccatttgacaggctcagagagggtgatttgtctggagttgcagagccgagtagtgcagcaaagatttggagtcagggttttctgactcctgagcaggtggtctgttmccagccacccctcttctsccattggcaggcatcagcagacatgtcatgtggctgcgcccgggttaaagacagagggccggcttcatttttgctggtttatgccaccatgttcaagagtctggttgagacgtaagccaagatacggcggcagggactgcctggggaagagagacatggctgaaacaattctggatggttgygtccccaccagcgtgtctagtgggccattcccaagggccaagaaagagcctgtcctggaggtgcccccaggaagaagggactggctatgcagcagggcagcattcggggcctggaggagacagagyagcttgcagggggcacagaagtgggctaagaaccagctccctcctgcaggccaggcagtgtccttgcagggtgtccaggtctgtggcccaagtggagctgtcttgttttctgccattgcctagtgacctggcagaaaacttagtgggactctaggagccggcgtcccagaagcagaccctgcccacactcaggaaagaggctcgtcctggccagttccccgccatcttctgggtgtggtccctggacccccgaggtcccccgtgccattatcaagtgtgataccatacctgggggaccagccatagccaggtgtgcctgcccttggcaccctccatgctgaggtccaccctgagacagacgggccacgctccactctgccctgccctgctctgctctggggttcgctcctgtcctcacccccaccgcgcccccagggccacttcactccccaggcagggagtgtggggcggcgtccgtcctccccaggcagggagtgtggggccgtgttcatcctccccaggagctctaagggctcggtgctcctgaggccgcctccagcttcagtgctctgtgactccattccatgcagaagaacccagcacctccagaatccagaascttccatagtccctgctgctgatcgcagccgtgggtactctgccttttgatggggtctgaccagccactttgggctctggctcagagcttttggctccaactaggaaggcttgagccaggctagcctcagagccccaggacatggcccaccctccccgtctccccctctcctcctctcgggctcaggggtgcacggcctgggggtgggacctcagtgctgctgagcagtggctggacttgggggtctgggcaggacggccttcacaggcaggcctggcactggctttctaaggccaggaggcatccaggccacttttttaaaaagtttgtgtatttttgtatgtatttatttcatttattttctcatcccccacagccggtattatttatttaattatttatttattttaaaagatggggtctcactttgctgccctggctggtcttgaacacctgggttcagacggccctcctgccttggcctcccaaagtgctgggatcacaggcatgagccaccgcgcccggcctaaaatagttatttcaggtataaattccctgccatggaagacaggcccagcatgtggttgagctttgaagcatgcatctacgggacccgtgcccagcgccagcagctcttgactgctgtcaggagagacggctttcctcagggacaagaccacaggctggtttttcacgcttaggaagatcacaagcgcttccaggctggaacacaagaagcacatgctgcgtgtggccttgagacccccatggcccaggcttccggacagagtgagacaggagggatcagaggccagggtggtgtcgatgagaaaggaggcctgaggctttcagggtgtccctcgagcagggacactccccagggctggcagtgacagaggatggacctttgggagaggtgcgggggtggggcctgctgagcccagagcatgtggaggccccgctgggagtagttctgtccagtagggtcacgggtgaaggcccagaggaggcgctggggtccgggagtcaccatctgggtgaagaggtcctcggggtgaggggaagtgtgaggcgaagggaggytccgagcccagcatcttgggagaggcctactcggggccctctcggcccggaggggaaggcaggaccccattctgtgggaggcggggccctgggagaattcccccagcccccaggaaagggcgggcaggcaagcccaccrcccgctaaggagrcgggtgtggttgcatgggccccggattccaggggacctagtagagggcctgtcacacagagccacagcacaggacttggaagtgggaattggggcctggggagagctactgccgtggagggcgaggccagcccccaggctctgctctcacatcccaagtgcaggacttgtcctgttggcaccagggcccrcgtcgagcgcctgctttcatatcatgttggtggcagcgtgtggtgacagacacagcccacagatgccgagtcccccctagggaagcggggctaggggagcaccaygtgggcagatcctagagggctccccgagtggctgggccacagcacactgcagactatttattcctcctggctgctaccagtaactttttgttagaagctgctgacactgacgtttctcctttagaaactgtttttcctcccaataaatataagatgtgtgctgtcagaaagccctgccaccctgcacagtctgcaggtggcctctgtcctgtggtccttagagtttttgccctatggcakcaggtgaggctgcaaattttgttcttgaaaatctgtgcagctggtcgctaaagacgggccaatcggtaaccactcttacagcccagcccaccagctgctttcgacagctgcgtctcagggggacacagcttgatggaggactccagccggcgtgtccctggtaggaaagagggaggtcctgggggtgtcccgtgagtcgccagacccgttcctaagtgctgggagaccacagaccccacgcttgtttacattcttgttctccccagatctccagtggtcatccaggaaacaggtgaaaggaaactactggaaaatgagaggcaaacctgtctcacccaccgtggcaacccagatgtgttggcttttgactgtttttcacaggaaaccatatcaaatagwacctcccctctctcctagtcatcttggccaagtatggtctggacggaaagaaggacgctcggcaggtgaccagcaactccctcagtggcacccaggaagacgggctggatgaccccaggctggaaaagctgtggcacaaggtactcttcgattgtttgcataccttgcagaattggtgccgttacgttgagtgttaaggcgggggctgtgaggggcagtctctgctctgcatgggagccggggtttgggaaagtctcaggaagacggtggcttcctaaggaagccattccactgtcattctgtgaatcttttcagctttcctgtttagaagattccttgctctttgagtaaaggagctctgtttggcctttggcctgcagctgtcagaccttcagctcaggtcacgtgtggttacgggatggtgacgtagcatgggctgcgttctttactccgtgtcggatttttaatgtagtgagtggtgccgtggacgtgcctctgtgattagaaaggtgccctcgtgtgtggggctgggctttcaccctgtgcctgggaagggtgcggggccaggcgctgggacccagcagggcctggtgggcyrtggcagggtgtttacctgccgcagctcccccatttccagcggctcctgctccagaacagtttctctggatcacattgatttggggtcaacagttagacttcttgtactagcccagtctcagctcaatgtccttggccaggagagatggagtcggtagaagggggcagagagggagagagggccctgtgtggcctccctggacgtgtgtgagccacgtcatctcacaaccaggaggcaggtgggatgacaatgaggggctggcagaggtccccctaggaaggtggccttgctgtcctcaccacctgcagccgggagagccaggcaagcccggrgtcaccgggctgctgccctgtccccctccttgggatcttctgctccccaccccagccagctcggtagctgtcccctgttgagcctggacacgtccaagaraagggtggttgcctgccggcagctcttctccggtttgttttttgttttcctgcccttcgtgaggccaagaacctggcctggcactcacgtaggcaagggcctgcctggccatgaggagtggttggctgaagagyggccctggccacacgagcccgcggcgggttcactccaggccttgtttccctcttaggcgaagacctctgggaaattctccggcgaagaactggacaagctctggcgggagttcctgcatcacaaagagaaagttcacgagtacaacgtcctgctggagaccctgagcaggaccgaaggtgccccccgcccccaccccctcctgccctctgccccaccccctcctgccccccacccctcctgcacctgaggctcrttgtgctcagtgggcagyctcagctcccctcaggaacacrgcaggkgcagggaggcggcaccagacgccctcccagggttccaccggacttgtgagtggggaggttgctgtgcaggcaggctctgggagtcgcctgcctgcattggatgaaccaagtctcaccggcgcctgcccccactatgggcacagctgctgcctttgtcagacctgagcttcgctratgggtccttcattctggactcgtgaccctccccaaatgtgtgactttcccaccccacaaagctggagtaaaatggagggtgacccagcagagagggggcagggcaggggtccagagtcagcccccaggggacctggtgccccagctgtcaccgccaggcgccacttggtgcgcgtgtcccggcgtctcgcctgtctcgcctggaaaggaagctgtgccaacggtcgtttctgcggcgctgcaggaccgcggaagggggacattttcagcccagaaatgagagcgagtttgagctccccagcagtgggcgttctagacagtggtctgggcaggcagtgcgaggactcccagcctcatggcgtcctgccttcggttttacagaartccacgagaacgtcattagcccctcggacctgagcgacatcaagggcagcgtcctgcacagcaggcacacggagctgaaggagaagctgcgcagcatcaaccagggcctggaccgcctgcgcagggtcagccaccagggctacagcactgaggcyggtgagtgcccgcccgggactgttggttcccgagggtggggccgtctctggttgtgttttggggacaagcagrcaggtgcttgtagcgacgggaacctgggcctgtggacgcagcggagaccctcggygcgctcagtctacccasgggtggtcacaggcctcgctcccaggagctgctccgtgaaggtcactcgccgtccccagccttgtacctggagactagcrgagggcagtggcggcagcgggcctgggagcagcccttcccagcgtctccccagcctcagcagcacggcccctcccgtgctgctgttggccaagaacagagacyactcgtcaaacatagctccgtctccatctcatgccacccacaccgtccatcagtccccctcagcccggcaggggcaggacgcccgctgaggccacagagcttgtggctccgtctcagcagctcatctccctccactgcaggccctcagtggccaggctctgcaccactgcttcttgccccgtacccgggccagagccttgtgcagggtgtaccrgaagcctgctggcctcactcacgcagcttccgattctgtacctcatcctccacgtgcacactgagcaccagctgcacgccaggcactgctctaggctcgaggagrcagcagccgccaggagatggcatctgtgccctcatggtgataagacagcagggctggtctytgtccccggtgccaggcagagccaccgcctmgtctccaggatggtctgcccagaggcagcctccagcacagcagtcaaatgtgtccacgcgggcccaggtccccttgggtggctgtgctgctgtcacctgagtgcccttgggcaagacccctcaccacccacccccaaacccaggctcccttagcctgacctggtgctggtgactgtcagccgtaggcttttggccgtagtgctgggggctggaccaccttgtaggcctgcgatgcagtttgctgagtkcctgtgctggagagacccggatgagcctggctatagtccatgcaggaaagggcgactcagccccacacacttctcttcccacctcgggctgtccycaaggcagttgtgtccagcggctcctgcagttctcttgcgggtctgcctgggccttccagcaagccccaccagcccagggtcctcggggtcctgagcaggaargggtcagcagaggagggagcaggggccactgttgcggggctccatgggcaggcggctctggactactcastcctggttggagagtggtgacagccccggagtctctcacygcgtcccttcgtgagcaccrgggtccaggagccgtcttggtttgtttggctcctcccaggagcccgaatgtttgactttcacgagcacaacatcctgctggagaccctgagcaggaccgaagggaaacggcctgtgcctgcgtctggacctggctgaacttgcaggtgcccccacccgaggtcctggcagcckctgcacacaggccacgtccatcctctgcctcctgcttcagaggcagccagggcgggctgtggcgcttcccaggctctgatggargcaggtgtttctggacacaaaggagaagcagttgtttggccaaggggacagagaagccacatttcagcgaggtcatgtgagctactgacctctctgtgccccataagccccatgtgagctactgagcagatgccctctgtgccccataagactttgagtgcacgcacccgtgtttcacacacatgcargtcgcgcctgcaaaccctcataggctccacgcacactcagcgtggttgccgcggggctggctgtggtgtgcaccccgggtgctgctgaggccactcttgctcctcccctgcagagttcgaggagcccagggtgattgacctgtgggacctggcgcagtccgccaacctcacggacaaggagctggaggcgttccgggtaaggaaacacggccctctccttctagctctctcctgtggtgaagattctcttgcagtttccrggtaaggaaatgcagccctctcctccaagctckctctctcaagattstcgcagtttcttccttaaccactcrgtgaacctgcttgcgttttccttctcatctgcgtgggaactcgtgtttcaggggcggggccaggctctggagggaggggctttggttcttttgtccgtgttcacgtctgagcgtggccttggtgcgggtcctgtggatggtcaacagttggtcgggacccagccacagcctggggggaggggaccaaggacactaccgggatcgtttaggggtgtcaccacttsctgagatggaggcccagggagggaaggagaccacctcaggtggcaggggctcctggggcgtgtggagtgccagatcattctgagggtggagaaytcatcagctcggtgagcacccagcagggctgtgaggagtggggagtccakcgggggtcctgggtgggcagccttgagtatggtatccggccatgagttcacccagggtccctatagctggtgtctgttgggagggaggtgggtgtggtcctgccctcataggacttgggactttcctggccccaggaagggcccttagcacctcccccagaaaggggtcaggagcttccctctggggctggggcaccttagctggccgcaggcacgtgcatggggcttggcaggtggggccacatggagggccctgggtctggagcgtggggtcaaggcagggcagggcrcctacaggagcagggacagagctgcagtccagcagcagtggagcccaggcaggctgggggcagggtgcagaggcagccaccacagaagcacagcccctggacatggggtctggctgggaacgagctggaggccccctagattcggggggcgggggtgccatttgcagagacagggaaggggtcggcttagggctgccaaggaggcgcgggctgggacccgttgctagtgtgatggcctcccagctgccgccccctcattgcccatgtcaccgcaaggcctgtcctgccccgggtatggcgccgtccyttggcgtccttgcagttcacccgggaccacaagatggcgtggcgagcacgggragggaacactcacctatggaaaccttgttccaggaggagctcaagcacttcgaagccaaaatcgagaagcacaaccactaccagaagcagctggagattgcgcacgagaagctgaggcacgcagagagyrtgggcgayggcgagcgtgtgagccgcagccgcgagaagcacgccctgctggaggggcggaccaaggagctgggctacacggtgcgcacgggttccaggaccggggaggccrcagttcccctgcaggaaagatgaggccgcccacatgcagctcagggcttcctgtagatggggtgtgggccccacgctgytgtcttccctgtccgagttgaaccccagggccacaagtgtgtggggcactgaaggccacagcagccatgctaggggagccccccgggcttgtagtgcagtcccccgaccctcaggtgagagcgcaggccccggcgggccactgcctcgtcctcctgtgaccaggatggggcgtgacctggatacccacagccagcccatgagtcagggcactctccagcctttgagacaggcgagcctccttccccacagcccctgggatgtgaggggaggaggggcagagcccaggagaagctgaagccagcgcacagccttgccacagaggcacagaaaaccctggaagctcatgccaagttctttctggagggagctggggctcaggagccccatctgtgccttttaaactttgaactgcaggcatgtgttaccgattcaaaaatagsaaaggcctaaaaaataaatgaaggtagaagttctgataggagagggtggtgcgggtctgcctggcagaatgtgcaggagagcagccygtggcccttgcccgtgggcaggagctcaggtccagggtgagcaccaccatgtggggtttgcagggcgctcccgcgagacgcggggatggaatgctagcgtgcacctagcttcacctgaccacggcaaagctcggtgttggttaagaaagccgtgtggcactgcmtgaggcacccgcaccgttggggcagaggtcagggccgctgagagaagggaccttcggtgagttattcaccctgagccacgggcttctatgtggagagggaggtggcgcccacgagcagggttttgtgagaatctggggagagctacagtgaccccagcccaggctgggctgacgcagcacctgctsccactggggtggtatctgtggggatgctctgggctgttgtgatgtgaggagctggaggtccctctccttccctcccaggccctgaggaggaaggcgcctttcccagagctctgtcccagtctctctggtcattgcttttaaaaataacactgtggggctgggcacagtggctyacacctgtaatcccagcactttgggaggctgaggtgggtggatcatctgagctcaggagttcgagaccagcctgggcaacatggtasaaccccatctctaccaaaagtagaaaaaattagccgggcgtggcggtgggcacctgtartcctaagtacatgggaggctgagrtgggaggatcacttgagcctgggaggcagaggttgcagtgagctgagatcatgccactgcactccagcctgggtgacagagcgagaccctttcagtaagtaaataaataacaccatgggcctatcacagagaccctgagctttccacttcagcatgaactgctcctggctggtggctcttagcgttctttggtgggattttctagttagyactgagctgcttttgtgatttgagcatttctggatgggtgtggaattggaaagtcagatgtgcagggcttgcgccttttccttttggatcgcgcgtctcctgacatgaggctgagctcacagagctggcctcgaggcgcgctgtccccagctgatgagacgtttctgtccacaggtgaagaagcatctgcaggacctgtccggcaggatctccagagctcggcacaacgaactctgaaggcryyggggrgcccagcccggcagggaagaggccagcgtgaaggacctgggctcttggccgtggcatttccgtggacagcccgccrtcagggtggctggggctggcacgggtgtcgaggcaggaaggattgtttctggtgactgcagccgctgccgtcgygacacagggcttggtggtggtagcatttgggtctkagatcggcccagctctgactgaaggggcttggcttccactcagcatcagcgtggcagtcaccaccccagtgaggacctcgatgtccagctgctgtcaggtytgatagtcctctgctaaaacaacacgatttacataaaaaatcttacacatctgccaccggaaataccatgcacagagtccttaaaaaatagagtgcagtatttaaaccacccgcttgttggctggtcactaagtgtcctggtggctggggccggagccagtgctcktgaagggrtcgcgtcatagccagcttcccctctgggccctgtgggtctttgcagccaacctccttttcccgtgagacggcccggcctgatttaaagccaagagcgcttgagttgagtttgaggggaagatgtggagcgtgtggttctgtgkacagtcagagactgtggcctgggggcagcgtctttcaactctcacctctgcagctcagggacctcgggagacctcaccaaacctgcagggcctccgtgtccctaagtgtgctgtgtaaatgccccatctcatgggggagagacagccacggaggccttcctctgaccatagctgatggactggcggttgctcaggtccggctccgagaatgttccygtgtctgagcctggaagaggctcgggtcyggctccrggcgtggttcccttcccgtgtctgagcctggaagaggctcgggtcyggctccrrgcgtggttcccttcccgtgtctgagyctggaagaggctcgggtccggctccgagcgtggttcccttcccgtgtctgagcctggaagaggctcgggtccggctccgagcgtggttcccttcccgtgtctgagcctggaagaggctcgggtccggctctgggcgtggttcccttcccgtgtctgagcctggaagaggctcgggtccggctctgggcgtggttcccgtgtctgagcctggaagaggctcgggtccgggtccagctccgagcgtggttcccgtgtttgaacctggaagaggctccaccaggcgtattgtgttttgactgcagctggatcttggcttgactgttgagatctgccaaacatccgctaagctatcatttctgagaaaggtcaaggctagaggcagcatgtcgggagttggcgcatcagggttggaagggccccagggtacagcatgtgggtgcctgttcctttgtggacttgtgtgtgtgtggctggtggggcggggggtggattctgsttcttttttttcccattatcctgagagccttaaggtactcagtgtgttggtgagactcagccctgtcatctagcagaagcgtgttccttttcattgctgtatagtattccattgcatgactgtcctgtgctctgattttaatgcactttattgtgggtggatatttgagttgcttcctttctggggtaataacactcacttggaaatagctgtggtgaacactcgtgtgggggtgggggtgggggccaactctaggagcacctaatggatcttacgaagcgtgttgtccaagtatagagatgattccaaagtggttggactgtgtttctttctcccagctgggtggaaggagaacactagtggattgctgagacttggtgctcggtatttttaattatggacagcctggctggcgttttgtggtgtctaattgcggagtagcgtgtcttactgtataatggcctcttttgtatgtgggagaccatggtgttgaggggaggcagttacacaaaaagcccagataccgagtgttagttccatgggtgtggctggtcatggtgcgcactcacgaaggatgtaggtgatgccctccactccgcagagccagtcccacaggggtacccattctgactcctaccaccgcagctccctacctcccgcctgccatgggttccamgtgcatggctctgggcagtctgtgtctttgcgtgcgtctgtgtatgtctgcgtgtatctgcttacattcgctcagcatctgagattcacccaggcttttgcgtggatcagcggcagactcctgattgccgcgtggcggcctgttgtgtgggtgtgtgccgcgtgtgtatccagtccctactcaggagtgtacgtttccagtgtgggttgcagtcaggatccatttctcccttaactttcagattatttgctgcataggcttttttctcctaatttggcgcctttgtcagaaatcaactgacctacctgtgtgggtctgtttctgtttgtccttacgctcttgccattgccacactttagacaaggtcttgctctgtccctcaggctggagtgcagtagcgtgatctcagctcactgcacccttgacctcccatactccagcaatcccctcgcctcagtctcctgagtagtagctgcgaccacaggcgtgtgtcaccacacccggctgattttattttttttatttttattttttttgtagagacggggttttactatgttgcccaggcaggtcttgatctgggctcaagtgatgctcctgtctcagcctcccaaactactgggattacaggttgtaggtgtgagccatggtgcccggccgccacactgtcttggctacagttgggtttataataaaccctgaatcgaggtgatgtgcattttccaactcttctttttaaagattcttgtggctgtttatgtccttggtgtttccatatatgttttacaatcagtgtctcaatttctaccaaaaaaacatgccttctggaatttcaatagcaattcccttgaacgcatttttgaataccttttctgaatgtcttgaatacatgttgggaagaatcggtgtcttaacagtctccagtgtccacgcgttgactgccgtgtgtgactccagtcggcgtctcaacagtctccagtgtccacgcgttgactgccgtgtgtgactccagtcggcgtctcagcagtctccagtgtccacgcgttgactgccgtgtgtgactccagtcggcgtctcagcagtctccggtgtccacgcgttgactgccgtgtgtgactccagtcggcgtctcagcagtctccggtgtccacgcgttgactgccgtgtgtgactccagtcggcgtctcaacagtctccggtgtccacgcgttgactgccgtgtgtgactccagtcggcgtctcagcagtctccggtgtccacgcgttgactgccgtgtgtgactccagtcggcgtctcaacagtctccggtgtccacgcgttgactgccgtgtgtgactccagtcggcgtctcaacagtctccggtgtccatgcgttgactgccatgtatgactccaggtattgagttcatcttcaacttctcccaacaatgaactggagttttctgtgcatgtgtctggcatgttttcctttagatctagtcctaggtgttcgatatgctattgaggactgtgtatttttatttcatttgtcacctgtgcgtggtgctttaatcctgtgccctaaactcccgccttggccatggcggtgtttctgtggactcgtggggtttccgtgtgcacacgcgtgtcctctgtctgacagtggctttgcttccccttgtcagtctgtgcctcggcttctcactgcactggcgaggtgagccggcgctcgctaatcttattcccagtctcggtgaacatgggctcagtctctcccggctcagtgttgggtttgcactggtgcacttacaggcggaagagcttcctcatttgctgagggcttttcctgaatccgtgttgaatgtggtcagctgcctttcctgcacctagtgagatgctcatgaggtcacttccttaccgcattactgtagtgaattacgctgactttcatatgccaagatgacctggcatttccaggtaagtccctgtggccatggtgcattggccttttctctgcatggccagatgagatttgctcataccgggctaaggacctcctgtgtaggaatgctcttgagggacactgggcttggatgttcattgtcttgtcatgtgatgtgtctgtcatggtttgatattgcattaagtgggcctcctgaaacaagttctgccatagtttgtataggattggcattatttgtttcatagagatgtgatgggtgaggccatctatgcctgccattttctttttgcttaggtttttcattaagaacttgatttttaaaaatagacatgaggcctggcatggtggctcacgcttgtaatcccagcactttgggaggccaacgtggatggatcacctgaggtcaggagtttgagaccaacctagtcaacatggtgaaaccccgtctccattaaaaatataaaaattagcagggtgtggtggtgcatgcctgtaatcccagctactctggaggctgaggcaggagaatcacttgaactcaggaggtggaggttgcagtgagctgagatcacaccactgcactccagcctgggcaacagagcgaggctctgtctcaaaaaaaaagacatgaggcttttggattttctgtttcttcctttgtcatttttttaaagataggtttgtcgcagaatttcatctaagttatcaaaacaatttacataaatcattcacagtatcctctgtgcagtgatgtccattctcattcctgctctgggccatttgtgttttcttttccccctgatcagactagctaagagtttatcatttttacagatattttccccaaagaaacctacttttgggtccattgattttttttttctattgttttctttttcattgacttttgctcttttcttatgaatttcctttcttctacctattttgtgttcaatttgctgtccttgttttaggttcttttgatagaggcttagatcattgatgaagaatatgaaagaatgggataatacagttaaaaacttggtctacttatgcccattagagaaaacattcttaagcacgcatggaatcttttaaaaatggacgaggtactaggacccaaagcaaatgtcagtaattcgcagatgataatgtaatgtataaatatatgatatgtaggtaaataatacaaatcacattctttggccagagtgcaattgaggaggaaatcagtaacaaaaagacaattaaatccatttgattcttttgttttmgttttgtagtaacttgcacttccctggtgccagaggcatgacacctttttgtctgctcttggccatttgggtggcgtctttgggaagggcctacttaattcttttgcctatttaaaaaactgggtcttggaaatcttgtctttttttttgagtcaggatctttctcgcacaggcttggagtgcagtggtgcgatcatagctcactgcaacctcaaactcctgggctcaagcgagcctcccacctcggtcttctgagtagctgggactacaggcatgcatcactatgctctgctaatttaaagaaaaggttttttttatagagactgggtctcgctgtgttgcccaggctggtctcggagtcctggtctcaagtgattcacctgcctccacctcgcggagtgccaggattacaggtggcgggagccgccacacccagcctggtcttagcgttattcccaggtctaggtgtgagtccttcctcagatatgtgttgtgaataatttccgatcctctggcttgctattttactttcttaatggttatcttttggaaagcaaaggtttccagtttgatgaaatctaatttttattttttatttttccgttctagtggtctttctattttctcatcaaattgagactttggggaaactacacagcagcaaaccaggatatatcctcttaaaaacagctcgagccggccgggtgcggtggctcatgcctggaatcccagcactttgggaggtggaggtgggcggatcacgtgaggtcaggagtttgagaccagcctggccaacatggtgaaaccccatctctactaaaaataaaaaattagccaggcatggtggcaggcacctgtaatcccagctacttgggaggctgaggcaggagaatggcttgaacctgggaggcagaggttgcagtgagccgagatcgcgccattgcactccggcctggggacaagagcaagacttcgcctcaaaaaaaaaaaaaaacccagcttgagccaagtgtgggtggctcccgcctggaatcccagcactttgggaggctgaggcgggcagatcacttgaggccaggagtttgagaccagcctggccaacatcacaaaatcccatctctactaaaaatacaaaaattaaccaggagtggtggcagcatctgcctataatcccagctactcgggagcctaaggcacgagaatcacttgaagctgggagacagagtttgcagtgagccaaaatcgtgccattgctctccagcatggataacagagcaagactctgtctcaaaaaaaaaaagcttgaaaatttaaaaatatctcaataattatgagatgcagtgattttttttttacttccctaagctgggtttccaggtatctctaggttcagctcctccggggctggaagtacatgaagggcagcattgcccaccttgaccagagcaggctcggagcagggcagtggaagagctggtcccagctcagcccagcctgctgggtcagcatccatctgaaaggtcatctctacccaggaacttgatggcttccagctccaccctaacagaaacctccccagcatcttgccgagttgtaatccagggtggtggtatagacggtcttggggtagctggtatagacggtctt

SEQ ID NO: 8755 - DNA, 26213 bp, Homo sapiens
gccggggtttcgtcatgttggccaggctggtctccaacttgtgacctcaggtgatccacccacctcggcctcccagggctctggaattacaggtgtgacccaccgcgcctctatgtctctctccggctcagtccctgttttctctttcttggcttctctccctcaccccctcttatctgtgtctgtgttgtctgtttgtctctgtgtgtgtttctctctgtcgctgtctctctctgtctctctctccccctctctctctctctctctgtttcttctagtctctctcttgtagtctctctctcttggtctttctcttcttgcttttttttttttttttgagacagagtcttgctctgtcgcccaggctggagtttagtggcacaatctcagttcactgcaacctccgcctcctaggttcaagcaattatcctgcctcagtctccccaacagctgggattacaggtgtgcaccaccacacccagttaatttttgtattttagtagagacatggtttcactatgttgtccaggctggtctcaaactcttgacctcaggtgatccgcccgcctcggcctcccaaagtgttgggattacaggcatgagccactgtgtctggcctctcttcttgtctttatctgcctcccactctagatctttcttggtccttgatttctttttttttttttttttttttttttttttgagacaggatctcactctgtcacccaggctggagtgcagttacgcgatcatcacagctcactgcagcctcaatttcctgagctcaagcaaatcctcctgcctcagccatccaagtagctgggaccacaggcgcaccaccaccatgcctggctaattwaaaaaaaaaatgttgagaggccgggcgcggtggctcacgcctgtaatcccagcactttggaaagccgagatgggcagatcacctgcagtcaggagttcgaaaccagccatggctaacatggtgaaaccccatttctactaagaatacaaaaacttagctgggcatggtggtgcgcacctgtaatcccagctacttgggaggcggaggcaggagaatcacttgaacccaggaggcagatgttgccgtgagccgagatcgtgccattgcactccagcttgggcaacaagagcaaaactccatctcaaaaaaaaaaaaaaattggccaggcgcagtggctcatgcctataatcccagcactgtgggaggctgaggcaggccaatcacctgaagtcaggagttcaagaccagcctgaccaatttggtgaaaacccaactctgctaaaagtacaaaaaaaaaaaaatagccaggcatggtggcaggtgcctgtaatcccagcctctcgggaggctgaggcaggagaatcacttgaacctggctcactgcaatctctgccctagcctgggcgacagagtgaaactctgtctcaaaaaaaacaaaaattttgtttttaattctagatgacgtgttgatagatgcagcaaaccaccatggcatatgcatacctatgtaacaaacctgtacgttcagcacatgtatcccagaacttaaggtaaatttttttttttaattggaaaactgaaaaaaaaaaatattttttttttagagacgggatctggctatgttgcccaggctggtctccaactcctgggcttaagtgatcctcccatgttggcctcccaaagtgctgggattacaggtgtaagccaccacactaggctcttagctccttttcctgtttcacaccaccagctcatttcctctccactgcttccccctccctgccagcctctcccttccccctctacagcctccccacccctcactgccttcctctgtggagtgacctcaggccctcattggggccaaggagagactcccttccaacctaaacttctcccaaggtgctgggcaatctcagacccccttccctctccactccaggacaggrgcctttcccaggacccggagggcaccaggaatgtggggcagagagcggggaggcagcctaagtccaggaagcgagaaccctcgcctcccccgagacttgtctccttccagcctctggtgcagacctcatgccaccccttactccctgtccctcctggggcctctgggccttaatttctcctctacaaaatgggcagactcgcctctgtcccacttagagtcccaggggagtgcatgctcacaaatgtccattgtatgattaatgtgcaggaattggagtttgtattaacaggagatgagagctgggagctgggactgggctctgagcctgtcccccacccccagtcacgtacagatgttccccatatttagggcaaaggaacagactggaagtagagacagcagagaatgtgtgtgattcactggcgactgtcatgatgagaccatgtgaggctatgggttagtgtgcaattgtgacacgatggtgtgtgtgaccctgtgtgcacctgtgtgactgtgcgtgactgtgggaggtgggattgcagggtgtgacaagtcactgtgacgtgcacagctatgggacagtgaggttgtgtgygtgacatgtatatgactgtatgtgacttgtgaatatgggtgagactaagggagagttgtgagtctgtatgaccatgtcactcagtgtgaccgtgggggtgagggtgacggtgtgagagtgtttgcctcatgacagttggggaatgtgtgttgttggaatgtgactgaggactctgtgggtgactgtgaagtgtgtgagtgtgtgacggtgttaatgggtgtggttgcatgacattgtgtgtgactttcagcttgtgtcataaaaagactgtataataagacattaaaaaaaaaaaaggccaggcgcggtggctcatgcctgtaatcccagcactttgggaggccgagacgggtggatcacgagatcaggagatcgagaccatcctggctaacacggtgaaaccccgtctctactaaaaatacaaaaaattagccgggcatggtggcgggcacctgtactcccagctactcgggaggctgaagcaggagaatggcgtgaacctgggaggcgaggcttgcagtgagctgagatcacgccactgcactccagcctgagtgacacagcaagactctgtctcaaaaaaaaaaaagagtcgggcacggtggctcatgcctgtgattccagcactttgggaggctgaggcaggcagatcacctgaagtcaggaatttgagaccagcctggccaacatagtgaaaccccatctcttctaaaaaaaaaaaaaaaaaaaaaagccagccacagtggctcacgcctgtaatcccagcactttgggagactgaggcgggaggatcacgaggtcaggagttcaagaccagcctggccaacatggtgaaaacttgtctctactaaaaatacaaaaattagctgggcatggtggcgcgtgcctgtaatcccagctacccgggaggctgaggcaggataattgcttgaaccaggacccgggaggtggagattgcagtgagccaagatcacgccactgtactccagcctgggctacagagggagactcggccaaaaaaaaaaaaaaaattattagccgggcatggttgcgggcgcctgtaatcccagctacttgggaggctaagacaggagaactgcttgaacctgggaagcagaggttccagtgagctgagatcgtgccactgcactccagcctgggcgacagagtgagactccatcccaagaaagaaagagagaaagggagaaagggaggaagggaggggggaggggagaggggagaggggagaggaaaaggaaaggaaagtcctttgcagcaacacagatgcagctggaggccagtatcctaagtgaattaacaaaggaacagaaatccaaacaccagatgctcttacttataagtgggagctgagcactgggtacacatggacaccaacatgcgaacaacagacactggggactcctagagggggcagggaaggagacaagggttaaaaaactacccgttgggtgccatgctcactacctggatgatgggatcatttatacccccaacctccgcatcgtgcaatacacccccgtgacaaacctgcacatgtgccccctgaatctaaaataaaagttaaggccaggcgcggtggttcatacctgtaatcccagcactttgggaggccaaggcgggaggatcacttgaggccaggagttggagaacaatatggccaacatggtgaaacctcatctctactaaaaatataaaaatcagccaggcgtggtggcatacacctgtagtcccagctactctggtggttgaggcatgagaatcgcctgaacccaagaggcagaggttgccaagttggcgccactgcactccagcctgggtgacagagtgagaccctgtctagaaaaaataataaataaaatgaattaaaataaatgaataaataaataaataaaagttgaggctgggtgtgatggcacatccctgtagtcccagcactttgggaggccgaggcaggaggattgcttgaggccaagagttggagaccagcatggccaacatggtgaaaccccatctctactaaaaatacaaaaattttagctgggtgtggtggcacacacctgtagtcccagctactcgggaggctgaggcaggagaatctcctgaaccctggaggcggaggttgaagtgagccaagatggcgccactgcactccatcctgggtgacagagtgagaccctgtctcaaaaaaaaaaaagttgaaattattttttaataaaatggtggggcatggtggctcatgcccatagtcccagctagtcaagaggctgagttaagaggatcccttgagcccaggaagtggaggctgcagtgagctataattgttccagtgcactccactctcataaataaataaataaataaaatgtaaaaaggattgcatgggccgggtgtggtggctgtcgcctgtaatcccaccactttggaaggccaagacatgtggaacacctgaggtcaggagtttgagaccagcctgggcaacatggtgaaacaccgtctctactaaaaatacaaaaattagtcggttgtggtggtgtgtgcctggaatcccagctacttgggaggctgcggtgggagaattgcttgaacccaggaggcggaggttgcagtgagctgagatcatgcttctgtactccagcctcagcaacagaggaagactctgtctcaaaaaaaaaaaattctatgtctgcgagtaaccacacaactgcatactgcgtatatttatttcatgacaatccttccttgaacccctgctcttaacgattttggggacccagtggtgacccagatgtcctggctctaccctcctgggccacacaggctagcagggcaacagtgtttgtgatgaaacccggtgattgcgtgaatgtgtgggtgattgacagtgttgttggaactgtgagacactgtgagcgttactgtgtgtgtgcaggagtccatagccctgggtacatgactgtgtgtcacagtggatgactgtccacctgtgagtgagagactgtggctgtctgggtgtgaccatgggactgtatgggtgtgactgaatgtgtgactgtgtgagtaacagcttgtgaggttctgtgactgtgcctttccatggctcagcctatgggattgtgtgtgacactgcatgtttgattgagtgactgaggctctgggaatgagtggcggtgggggcgggtacctgtgggtgggacagcatgagagattgtacacacttggtgcaggggtcctcaggacgataaggacaattcagtaactgccctccctcatgaccttgatgactgccccctgctcggctctctgccccagagctccccgcttccgttccctgtcccgccttggccccgccccctcccatcaccccgggctgccagcgcctgtcacctctcccagagccgagacaaggcagtggaggcagcggtggcaggggctgcaggagcaagtgaccaggagcaggactggggacaggtgagggctccccaatcccagcccattctccctgcccccccttgacccctcaagtctctggcactctccctctctgcttctctgccctgcctttgtctctctgtctctgtgcccaccaccatctctgctcatctctgtctcttgatgtctctgtctgcgtgtttccatctctggttagctgctagataacttctctttcccctgctctgtctccctccacgtctctgcctcttctttgtctcctagcccacatctgcgtctctttctctgtttgtttttctctggtctctggctgggggtctcattctgtccctccgtctctgcgcctctcagtctttacatttctgtctcttgtgtctgtgacgccgttgtctgtccttctgaggctcgacctgagatcctctctgcttccgtctttctctacgtggagccgcgggggcgcgggtgagtgggtgtcgggcgttagaccgatttccaggcatctgcacatctaaccccggatctgtcgcttctctagtccctaagtatttggatgctgggaaagggttgttccacttactctgggctttatctacccccagcggggaaagttttgtaaggtcaggttcctatgtgtgctagaaaaccctttgggcttggagagtgggagctcggatgggcgtttcaagttctccaccaggctgtgggaactcagatgggcgtttcaagtaccccactagggrgtactgaaaaccttcaagtttttcagttccccatagaaaaggggtctaggctgacggtttctaccccctcctctccaaggcggtccccgggttcccaggagtctgtaggtccagacttgcggtgacactgacacttccgcccagcgtagctctagggcaaccgcccgctcagcaaacaccccscccttccacctttgctgccccaacaacagtcaggggaggccggggaatcacttaaggggycccgcccaccaccggagttccacccactccgcgtgcctctccctccccmcagatcatcacgcctgggagttgcgggagcgggtgcgctgcctcggagtcccgcgtgtatacggctccccagccgtctgcccctgtgtgtgaatccctgaggcggggtgacgctggggttggagtaggagggcagaggtgctgaccttgccctgggaccctccaggcctgatcgcccctgcacgaaccagacccttcgccgccctcasgatgactacctctccgatcctgcagctgctgctgcggctctcactgtgcgggctgctgctccagagggcggaggtgaggaagcgaggagccagaggagctccaggcttggagggaggtatggggacggttttagggcttccgtcgtcagggcgctgtcgctcacgcctgtaatcccagcactttgggaggccgaagcgggtggatcacttgaggccaggagttcgagaccagcctggccaacatggtgaaactccctctctactaaaaaaaatacaaaaattagccgggcgtggtggcggccgcctgtaatcccagctactcggaaggctgaggcaggagaatcgcttgagcccgggaggcagaggttgcggtgagccgagatcgcgccactgcactctaacttgggtgacagagtgagactctgtctcggggtgggggggggaggcttccctcagcgcaaagagagtttcaagactgtcccgcttgcccagattcaagttgttgggtggtggtttgtttgtttgtttcgagacggagtctcactctgtcacccaggctgagatgcagtggcatgatctcggctcactacaacctccgtctcccgggttcaagcgattctcccgcctcagcctctcgagtagctgggactacaggcgcactccaccatgcctggctaatttttggatttttagtagagacggggatttcaccatgttggtcaggctggtctcgaactcctggcctcaagtgatccacccgcttcggcctcccaaagtgctgggattacaggcgtgagccaccgcgcccgggcccagattcgagttttgattatcgtttccactcccttttcttcccccaacaagtcctcctgataatttccagccaccccctccccaattttcttgaaggttttcagtctcccatagcaactccagtgggtggcttccaggcaccccaccccaagacttggaactggtttccaagctacccaagactcccgaacaacacgcaacagaccctcaaagtctctctggggcgcttctgggccacatggacctagcagcctgggagcgggggtcggtctgggggggtcctcccttctttcttttcctagacaggctctaaggggcagacggcgggggagctgtaccagcgctgggaacggtaccgcagggagtgccaggagaccttggcagccgcggaaccgccttcaggtgtgaccaggagggctggggacgcggggaggacctgaggctgagaggggtgggcttgggatgggccttgggctgacgggcggggaagaaatctcggggcgctgtgggctggagaggcccggggactgacctgagcatggtgggaactggggcgggaccacggttcctgggggaggcctgggaggaagcttgaaatgggaggagccttgggcggggcctgcacagaaataaaccttgaagggggcggggtttgggatggagactgggaagggcccttccgggtgggacgatctggggcggggacttgtttggtgggaggagcccagagtggggccgggaggaggggcggagctttgaggctggtgggaggagcttgtggccgagccgggacggaacgccctccgagtgggcggggctagagccgggcttggtgtggccggcggagaagcacttggcccactgcggagaagcacttggcccactgcgcagtagcacttggcccactgcgcagtaggtccactgggcacctggcccccgtgcccacccccaggcctcgcctgtaacgggtccttcgatatgtacgtctgctgggactatgctgcacccaatgccactgcccgtgcgtcctgcccctggtacctgccctggcaccaccatggtgaggtgctccctgggcccggagccctccccagacacaaacaactgctaacctttgcccccagacacctacatccgagtcccacagctcacctgcacccctctcctgctcctctttgccccctactcctttccggcaggctgggtttctcctgtctgtccaaccctgcctatctcacataacgcagcttctctgtctccgtatctctttctatttatttatttggagacggagtctcgctctatcgcccaggctggagtgcagtgggatgaactcggctcactgcaacttccgcctcccgggttcaagcgattctccagcctcagcctcccgagaagccgggattacagaagccgggattacaggcgcgcgccaccacacccggctttttttttwtatatatatttttagtacagacagggtttcaccatgttggccaggctggtctcgaactcctaacctcaagtgatccgccggccttggcttcccaaagttctgggattacaggcatgagccaccgcgcccggccaccacaggattcttattttgtctccttttcctgagtctgtcagtctctgggcatcttaacctaactagctatgtcgcctcagacactttatttatttaacctatttttttctttttgagacagagtctggctctgtcacccatgtggtggcagcatcatagttcactgcagcctgggaactcctgggttgaagcgatcctcccgcctcagcctcccaaatagcagggactacaggcrcacgctaacacacccagctaatttttttaaaaaaattggcagtgacagagtcttgccatgttacccaggctggtcttaaactcctggcctcaagggatcctctcacctcagcctcccaaagcgctgggattacaggcctatttaacttttgttgtttttgttgttgttgagacagagtctcgctttgttgcaaggctggaatgcagtggcgtgatctcggctcactgtaacctcacctcccgggttcaagcgattctcctgcctcagcctcctgagtagctgggactacaggcgcacgccaccacacccagctaatttttgtatttttagtagagacagggtttcaccatgttggccaggatggtctcgatctcttgaccttgtgatccacctgtcttggcctcccaaagtgctgggattacaggtgtgagccaccacgcccagccttaacattttgtacctcaattttcccatatgtagaactaggttaaggatattactaattccatgggctagtatgaatattaaattaatacaaataacatgccatataagggtttatcatcatcatcatcatcatcatcatcatcaccacttcggctctctccctctctgttattgtctcacagtttgtctttctgtatttatctctttctctgtgtgccttaattccctctcttctttccccacagtggctgcaggtttcgtcctccgccagtgtggcagtgatggccaatggggactttggagagaccatacacaatgtgagaacccagagaagaatgaggcctttctggtaagaagaggtgagggcttcaggttaggagtccagggagagatggaaaggcagtagattcaggcagggcctgaaaccccttggactgttcagacctctgggttgtaagtgagagaaactcaactcagacttgcttcaaagagagaaagatgtactgccttctgtgatggaaaagaataagatggccgggtggtgtggctcacgcctgtaatcccagcactttgggaggycaaggagggtggatcacttgaggtcaggagtttgagaccagcctggccaacatgtcaaaaccccgtctttactaaaaatacaaaaattagctgggcatggtggtatgcacctgtagtcccagctactcagagggctgagacatgagaattgcttgaacccaggaggcagaggttgcagtgagccaagatcgtgccactgcactccagcctgagtaacagagcgagactccatctcaaaaaaaaaaaaaaaaaaaaaagaatgctgtagttgggccaaggtcaatggctcatgcctataattccaacactttgagaagatgattgcttgaacgcaggattttgagaccagcctgggtaacatagtgaaactccatctctacaaaaaatataaaaatttggccaggagtggtggctcatgcctgtaatcccagcactttgggaggccaaggcgggcggatcacgaggtcaagagattgagaccattctggccaacatggtgaaaccccgtctctactaaaaatacaaaaattagctgggcatggtggcacgcacctgtagttccagctactctggaggctggggtgggaggatcgcttgggccctggggggcgaggctgcagggaaccatgatcctgccagagcactccagcctgggcaacaaagcaagaccatgtctcaaaaaaaaaaaaatctctggttggctggtcacatgcctcgtgccctggagctgaagggtggagtcagcccttctcaaataagggtaagcagttccccaagataaaatagggtayttgggcagaaacaaagagcagaggtccttccagtctctctctgggcctggggcttcgagccaagccttgttcccttccccttcttgccccgaccaggaccaaaggctcatcttggagcggttgcaggtcatgtacactgtcggctactccctgtctctcgccacactgctgctagccctgctcatcttgagtttgttcaggtgggaccttaaccctgagtggtggcggcagagatgtgagctcggcctcagtttgtccagtaagatggggtggtctgtttccaccaggtccagctatccactggtggttctatggggagcagtgggggtggttaaaggagctctgtgtggccgggagcggtggctgatgcctgtaatcccagctctttgggatgccaaggcaggaggatcgcttgagcccaggagtttgagatcaggctgggcaatatagtgaaaccttgtctctaygacaaataaaattagctaggcatactggtggtgcacctgtggtaccagctatagggggscgctgagacaggaggattgcttgagctcaggaggttgaggctgcagtgagccctgattgtgtcactgcattctagcctgggtgacagagtgagaccctgtttaaaaaaaaaaatagaactctgtgtggctgaggacagctctccaggggcccccacactgccttccaaattcccctaggcggctacattgcactagaaaytatatccacatcaacctgttcacgtctttcatgctgcgagctgcggccattctcagccgagaccgtctgctacctcgacctkgcccctaccttggggaccaggcccttgygctgtggaaccaggtgggcatcctccttccgttcctccaaatgggaatcttgcttctctggtgggaccaggaagttctcagtccatttcctatctcctacactctccacagtttatctgagttgggagggtccctctccaaatgtgtcttggggtgggggatcaagacacatttggagagggaacctcccaactcggcctctgccatcatttaactctcccagcctatcactcccatactggaattttccgttcctctccctcattatttcacccatcattgaactttttcaccaatgagagaatccacctgctggcggtgaggcatggcaggatacgagaaagtaagtgggggtggggatgtggcaggtgccagtttgttactaggagacagggtgggagagactagagtctgggagcagacgtggtaagaactaacttgttgaaagttggaccataccaattgttaagaagccgcacgcacccaggcacagtggctcacatctgtaatcccagcactttgggaggccaagacgggcagatcacgaggccaggagttcaagatcagcctggccaatatggtgaaacccygtctctactaaaaatacaaaaattagctgggtgtggtggcggacacctgtaatcccagctactcaggaggctgaggcagaagaattgcttgaacccaggagacagaggttgcagtgagctgagattgcgccactgcactccagcctgggtgacagagcaagactccatcgcaaaaaaaaaaaaaaaaaaaaaagccatagcgtggcccggcagtggctcatgcctrtaatcccagcactttgggaggctgaggtgggcagatcgctttttgcccaggagttcaagaccagcctgggtaacatagcaaaaccccacctctacaaaaacatacaaaaattagccaggcatggcggccctcgcctgtactcccagctacttgggargctgagatggtaggatcacttgagtccatcaggtcgaggctgcagtgagctgtgatgctgtgatagygccagtgcaatctggcgaaagattgagaccctgtttcaaaaaaataaaatgaaataaaataaaataagaggggccaggcacagtggctcatgcctgtaatccaagcactttgggaggacgaggaaggcaggacacaaggtcaggagttcaagaccagcctgaccaacatagtgaaaccccgtctctactaaaaatacaaaaattagctgggcatggggcacatgcctgtagtcccagctactcaggaggctgaggtaggagaatcacttgaacctgggaggcagagattgcagtgagccgagatcgtgccattgcgctccagcctgggcgacagagcaaggctccgtctaaaaaaaaaaaaaaaaaagaggaagccatagggcaggagagtccataatgtgggtactggcagggagttcagttcttagaaggagctggggtgaccagtgacagaggtcacattttggggatctaggggggaactgacggcaatgatggaagataccaattattttttgttttgtttttgtttgttttgtttctttgagatggagtctcaaaaaagaagctgatttttttttttttttttttttttttgagacggagtctccctctgtcgctcaggctggagtgcagtggtgcaatctcggctcaccgcaacctccacctcccgggttcaagcgattctcctgcatcagcttcccgagtagctgggattacaggcgcctgccaccacacctggctaatttttgtatttttagcagagacagggtttcaccatgttggccaggctggtcaccaactcctgacttcaggtgatccgcccacctcggcctcctaaagtgctgggattacaggcgtgagccaccgcgccctaccagataccaattgttaaggggttcagagtgggagagtccatacagggaaagggaatagggtgagagaaaccaatcacagataccattcactggggacacagagtggaagaacctttgatggcaagagacggggtggaagggcgatcaaagctgggggagrctgggagacacccgggcagcgctgactacccctttaccggtctggcccctccctaggccctcgctgcctgccgcacggcccagatcgtgacccagtactgcgtgggtgccaactacacgtggctgctggtggagggcgtctacctgcacagtctcctggtgctcgtgggaggctccgaggagggccacttccgctactacctgctcstcggctggggtgagctccgatcccgtcccccgcccaacccagcgcgcctctcctcgkctcccccaactgccctgctggttggcctctgcgggtctcctcccgtctctaggcttctgccttccccaccccgacagaggaattccgcgggtcttgggcctggcggggcccgtgagcgcgctgacagctgcggcggggtgggggggcggggtcggggtctgcacaggggcccccgcgcttttcgtcattccctgggtgatcgtcaggtacctgtacgagaacacgcagtgagttgcagggtctggggcggggcgtgggaggtgggcggggctttgagggactgtggcgggttgtgatggacatgtgggcagggtcggaaggctattcggtgctggggatacgtgggcgggatccgaagtaatggggagctaggaaaggttgtgttccagggcaatcggcaaggggagggggtggggcctggatcgtaatgggcgggaccttagagaatgtgtgtggtctcaagtgcggtgggcggggcctagcgagcaaatgagcttggtgatcggtgagtctagagtttttctatctcttagctctactccgccttccccaggtgctgggagcgcaacgaagtcaaggccatttggtggattatacggacccccatcctcatgaccatcttggtaggatcggtcccgcctccaccaggccgccctcagggatttcccattctgggaagtgggctgccacctcctcctgccccttcagaatgggatcgcggctggctcagcccttatctctccccacagattaatttcctcatttttatccgcattcttggcattctcctgtccaagctgaggacacggcaaatgcgctgccgggattaccggctgaggtgagggcatgcgttggggaccgaggggaaggggccgggtgcgagatggggaaccagggctgcgggatcactgctgccgccctctctccccaggctggctcgctccacgctgacgctggtgcccctgctgggtgtccacsaggtggtgtttgctcccgtgacagaggaacaggcccggggcgccctgcgcttcgccaagctcggctttgagatcttcctcagctccttccaggtgctcaggcagggtgcaggggctccatccttccacccagggcctcctccccagaggggcacgaaagctacagtcgttctctggtgcagccactgaatggggtgggaagatgggatttagttcgttcattaattaattcattcttttttttttttgagacggattctcgccctgtcgcccaggctggagtacagtggcgcgatctcggttcattgcagcctctgactcccgggttcaagcgattctcctgcctcagcctctagagtagctgggattacaggaatgtgcgacaacacctggctaattttgtatttttagtagaggcggggtttcaccatgttggccaggctggtctccaactcctaaccttgggtagtccacccgcctcggcctcccaaagtgctgggattacaggcgtgagccatggcgcccagcccgttcattcattcgatacaaaatactgagctaggactgtcctgggctgtggggagcagcagggaccaggacaggagattggcggccccagcagtgctgcctgctagtgaagagtgagggcttcgaagctggacacagctgaggccaaattcaggttctgtcactttctagctgtttgccagctgtgtggccttcacctcagggttgagggtagggagaggtaagtgaggtgccaacgtgcagaatctaaggaaagattcattccaaaattgaaggcccaccttacacttgcttggtttacctgagtccccaacctgcttcacctcattcggcctgttttctcatctctaaagtggggaaaatactagtctcagtggacaaggcagttcattcattaaattcagcaaaaaattactgagcatgtgtatatgctaagcactcctccaggcttatcacaggaatacagccaagaaccaaatggtccctaccctccagtgggaaagacacactaaacacactatagaagtaaggcatacagctgggcgcagtggctcacacctgtaatcccagcattttgggaggccgaggcaggcggatcacctgaggtcaagagttcaagaccagcctgaccaatatggtgaaaccctgtctctactaaaaaaatagaaaaattagctggatgtggtggcggccgcctgtaatcccagctactcaggaggctgaggtcggagaatcgattgaacccgggaggtggaggttgcagtgagccgagatcacgccactgcactccagcctggccacagagggagatcatgtctcaagaaaaaaaaaaaaaaaaaggaaagcatatagaatgtcagatggtgagatgtgcctagagggagaataaagcaagaaaagagatgaggagtgtccactgagggatgggggttactgttttatttatttttatttttttagagatgaggtctccctctgttgtccaggctggatccagtgcaggggtgtgatcctagctcactgcagccttggactcctggtccaaagcaatcctcctgcttcagcctcctaagtggctgggagcacaggagcaagccatcacacttgactaatttttttttttttgagacagagtttcactcttgttgcccaggctgcagtgcaatggtgccatctcagctcactgaaacctctacttcccagattcgagcgattctcttgcctcagcctcccaagtagctgggattacaggtgcccactaccacgcctggctaagttttgtatttttagtagagatggggtttcaacatgttggccagactggtctcgaactcctgacctcaggtgatccgcccgcttcagcctcccaaagcgccgggattacaggtgtgagccaccgcgcctggccaagatcctcatctctaccaaaaataaaaaattagctgccgggcgcggtgcctcatgtctgtaatctcagcactttggaggccaaggaggccagtccagcgtgaccaacatggagaaaccctgtctctacttaaaatacaaaaattagccaggctaggtggcacgtgcctgtaatcccagctattcaggaggctgaggcaggaacatcgcttgaacctgggaggcagaggttgcactgagctgagattgtgccactgcactccagcctgggaaacagaacaaggccctgtctcaaaaacaaaaaaaaaattaacttggtgtggtggtgcatgcctgtagtcttagccactctggaggctgaagtgggaggatccctctagctcaggagttgaggttgaagtgatgaagtgagccatgatcactccactgcactccagcctgggtgacagagccagaccctgtctcaaaaaacaaaaacaggctgggtgcgttggctcacgtctgtaatcctagcactttgggaggctgaggcgggcgtattgcctgagctcaggagtttgagacagcctgggcaacatggcaaaaattctgtctctactaaaaacacaaaaaattagctaggcgtggtggcgcatgcctgtaatcccaggtacttgggaggctgattcaggagaatcgcttgaacstgggaggccaagtttgcagtgagctgagatcgtgccactgcactccagmctgggcaacagagcaagactctgtctccctgtctccaaaaaaaaaaaaaaaaaagcaaaaaacaaaacggcaacacaatcaccctaaattttcacaactactactatattactgctccattttccagatgaagaaactgaggcacagtgtggttaagcagcttgcccaaatgggaaagaaagtggaaaggtggtttttgagtccagggagcccacctccagggtccacagttcttaacccccagccagcagtgctcagctaaccttctggagcaagcagtggggttggtgtgggggaagccaggaaccagtgaaaagatgaccctaatagtttaggaccacggtggcggtagctgaggtgcttcagggcctggcaagggcgcgagcttattaagagaacagttacaaaggctaggcgcggtggctcatgcctgtaatctcagcactttgagaggctgagatgggtggatctccagaggtcaggagttcgagaccagtctggacaacaggatgaaaccccgtctctactaaaaatacaaaaattagctgggcgtggtggagggcgcctgtaatcccagctactcaggaggctgaagcaggataatcacttgaacccgggaggtagaggttgccgtttgccgagatcgtgccactgcactcccgcctgggcaacaagagcaatattccgactcttaaaaacaaacaaacaaacaaacaaacaaaaaacggggagggaggcgcggaggcggttacagtcctgcccccaccagcgatgtaacctccgcgcctcctctgggcagggcttcctggtcagcgtcctctactgcttcatcaacaaggaggtaggcagagacccggccgccgcccccgccctctggcggcagcgcggggtacggcgccgcctctgagcgccatcgtctcacaggtgcagtcggagatccgccgtggctggcaccactgccgcctgcgccgcagcctgggcgaggagcaacgccagctcccggagcgcgccttccgggccctgccctccggctccggcccgggcgaggtccccaccagccgcggcttgtcctcggggaccctcccagggcctgggaatgaggccagccgggagttggaaagttactgctagggggcgggatccccgtgtctgttmagttagcatggatttattgagtgccaactgcgtgccaggcccagtacggaggacgctggggaaatggtgaaggaaacagaaaaaaggtccctgcccttctggagatgacaactgagtggggaaaacagaccgtgaacacaaaacatcaagttccacacacgctatggaatggttatgaagggaagcgagaagggggcctagggtggtctgggaggcgtctccaaggaggtgacacttaarccatccccgaaagaggtgaaagagatcactttggggagagctggagaacaggattctaggcggaagcgatagcataggcaaaggcccttgggcaggaaggcgctcagccttggctggagtagaattaagtcagagccaacaggtggggagagacagagaagtgggcaggggcacccaagttgggatttcatttcaggtgcattggagattcttaggagtgtctcttgggggtaatattttattttttaaaaaatgaggatgtcactcttacccaggttggtcttgaactcctgggctcaagcaatcctcccaccacgggtctctcaaagtgctgggattacaggcgtgagccaccgcacccggcttttttttttttttttaaacggagtctcactctgtcacccaggctggagtgcagtggtgcaatttcagctcactgcaccctccacctcccgagttcaagcctcccgggtagctgggattacaggcaccgccaccatgcctggctaatttttgcattttcagtagagatagggtttctccatgttggccaggctggtctcgaactcctgacctcaagtgatccacccacctcagcctcccaaagtgctgggattacaggcataagccaccatgcccggcccaaatgggctaatgttttaaacagatccttcttgtctgccctgtaggaggacaaattatcaggggcaggggtggaagctggagcccagaaaggaggggactgcaggtgggaagtgatggtggctggaccaggatggaggccactgaggggtatgaagcagtcggatttgaagctgtttaaaaggtggaggtgagaggatttcatgaaggagcacatgaggacacagcagcagagaggactccttggctttggatggtggagagactaaagatagagagattgggttcgggtagggggagaaccacgtgtgctctttggaaaggttaggctggcagtgtttgtaggacatgacaggacactgagtgtaagggtctggagctctcaggagaggggcgagctggagatagtaatgtgagaggcactgggtcctgagagggtgatttggtgtggaccggagcacaggtgaggcaaggcaggcctcgcagctgaaactttatatccagagcagccagggccactgctggctgcggagtgaggacgcatatccccactgtccttagatgggtggcccctggaacctgggagaatgagggggcatgctgacagtctcattgtggctggaccacctgtacatacacccacaagaccctcacccctaaatcctccccctacacatatgcacacttaagttaccgtatgggtgttgtcgagcattttccctggggtctgtggctccctggaccgacatgccccaaagctgaactcagccttttcaagcttgcggccctgctgcccaattcccctacaccctgccttgtgggttctcgcggggtgggggccttagggcaaggctcttgtaaataaagtataagaaacagttgctttttttctttcttgggtagaagcatcttcttggcagtgtcacaaagggaaatgaccgaggcaggctgcctggtggagtaggggcccgtggtggctttactcaaatttatccatgtgttgctacaagaaaacgggacacctgctgccactgtccctcctaagagagtccccaagtggccatgttacatgtgatctgtgacatatacgatcagatgttacctgcatcctagggtcgcctggcatgcccatgagtgacgcttaggaccgtgcctggtgctggtgtgtggacaatgctgggccagtttgcccagggctatgcctgccacctctacttttatttcaccctctggaggcggacgcattggaaagcatgtggggcaggaggtgaggaaggaaattcagacaagctgagcagagcggccaggactggaatcttgggtgccaacccgcaaggtggggaaactgatttccatttcccagtaattacaggtcaataccacacctgagaaggcaggcaggaatggaacccagactgactccagggctgtgttgcttcctgtatcagaaccaaaccccgggtgacctcctgttgcatgccccttgtcccaactttatagattaggacactgcagctccatcttgctacccaagagttaagactttttctggaggacctggctccccgggtttggaaatagtaccattgtttcctaactgggtgaccccgagcaagttgcttaccctctcttggcttcaacgatctcatctataaaatgggatcacttaggtcgggcgtggtggctcacgcctgtaatcccagcactttgggaggccgaggcgggtggatcacaagatcaggagtttgagactagcctggccaacatggtgaaatcctgtctctactaaaaatacaaaaattagctgggcgtggtggcgggcgcctgtaatcccagctacttgggaggctgaggaagaactgtttgaacccgggaggtggaggttgcagtgagcagagatggtgccactgcactccagcctgtgggcaacagggtgagactccttctcaaaaaaaaaaaaaaaaaaaaaaatagctctagtatccaccccacagatggttgtttccaattagatgtagtaaatgcacgcctttataaccccataacccattgccttctgtgtatcaggcctctctctgctgcagggtcccagctctgccacaatgctcacagtgtatctcaggctgtgcctttcttttttttgttttctttttcttttttttttttttgagacggagtctcactctgttgccaggctggagtgcagtggtgcgatctcggctcactgcaaccttcacctcccaggttcaagcgattctcccgcctcagccttccgagtagctgtgactacaggcgtgcaccaccacacccagctaatgtttgtatttttagtagagacacagtttcaccatgttagccaggatggtcttgatctcttgatctcgtgatccgcctgtcttggcctcccaaagtgttgggattacagggcgtgaggcaccacgcccggccccaggctgtgcctttcacagctcagagcagggcacacatctcactgagtgtgcactgacctcaggcctgcaaactcttgcacctttcaggtgtttgcctatatccagaggacagagacataggcagagacaaagatatggggggagggcccaacacagtggctcacacctgtaattccagcattttgggaggccgaggcaggaggatcacttgagcccaggagttcaagatcagcctgggtaacacagtgaaatcccatctctacaaaaagccggcaggaggatcaattgagcctgggcagtcaaggctacagtgagccatgatggtgctgctgcactccagcttggcagacagaatgacaccctgtctcaaaaaaaaaaaaaaacaacaaaaaacaaagatatggggagcacacgatgtgtgtgtcagagcaacacagggaatttccttaatccccccagtatataccacctccctttcccacctccatttatctccccaaatttgtcagagaattcctctcaagggtaatgcagttgaatctgaggggcagcagagctcaggggtgaagccacaggctctggaggtgagtttaaatcacagcaccaccacttcctggctggttgtccccgcaaagtgacattgcctctctgtgtctcagttccttcttctggaaaagggggataataaattaacaggcccgcgccagagctgttgggaggatgtttgaaaagcgctgagcctggcctggcacctaaacagctcagcaagtgttagccaggatcactagcagtaatatttagctactgactgctttcttttcttttctttcttcctttctttccttttttttgagaggtagtcttagaatctgttgcccaggctggagtgcagtggcgcgatctcagctcagtgcaacatccgtctcttggttcaagctattctcctgcttcagcctcccaggtagctgggaccgcaggcgtgcaccaccatgcctggctaattttgtatttttagtagagacagggtttcaccacgttggccaggctggtctcaaactcctgagctcaggtgatccacccgcctggcctcccaaagtgctgggattacaggtgtgagccactgcacccggcccttttttctgtttcttatctatttagtttagagatagtatcacactgtctataaaactcacaaccattctcccaggctagtcctaaacttctgggcttaagcaatgctctcacctcagccgctgtgctggtggcactgactgcgttcatcacctgtctaatcctcctgtctttcagggcagaccagaggctcctgggtacctggtgcccctgcactgcaacacagggctggacacacagggggcatttgggggatgtttgctgaaggaacaaacataaagaaaggctgaaagatacacatatataatttttgagatggagtctcactctgtcacccaggctacagtacagtggggccatctcagctcactgcaacctccatctccggggttcaagcaattctcctgccccagcctcctgagtagctgggattacaggtgcctgccaccatgccctgttaatttttgtatttttagtagagacggggtttcaccatgttggccaggctgatctcaaactcctgacctcaggtgatccacccgccttggcctcccaaagtgttgggattacaggtgtgagacaccacgcccagccagtttttgtatttttagtagagacagcgttttaccatgttggccaggctggtctcgaattcctgacctcaggtgatctgcccgcctccacctcccaaagtactgggattacaggtgtgagccaccatgcctggccccaaaagatactttggtcaagcgaggccaattcattataagaggtagagaagagagcaacagagtgacaaggagaagctcaggaagattaaagcaggagagctaaaatgttctccagagccacaactgggcgctcatttccatgcaaactgtttgctttgcagatggagaaagtgaggcctcgatggggcagagccagggcctctccacttgctcaggggtcctgctcccaccattcagtccgataccagctgcctcccccaagccctcctgaatccaccccactcccaaggctctggaaacagataccactagaaaaaaacacagagctttattattctcaacaccaatggcagcggtcttcataggacagaggagtgagttctgtcaacagacaggcggcccctacttgccggcgatgagcgggttccgcaggaccacgatgactgagtccccgcgcaggaacatcttggagatgtagcggtctttgttgactggcttggacttcttcttgcccttgccacycttgggtacctcagtccacatctccttcacgttctccagcaccatgttgcagtgcctggtggggaacagggaggggaggcactgggcgtgrggggcgtgcctctgacagtgccccctactgcctgctgctcgccccctccagcagcatggcttggggaagggtgcaggtgctaggccgggatgaccaagctgccaaagcaactctgccagtccttaggttgaggctgaggcaaaggactgcacctctctgtgccagtttgctcctttttaagagggaagataatsacgttaccttcctcacagggccattgaaaattatcattttcttttttgagacagaatctcactctgttgcccaggctgcaatgcagtggtgcgatttcagctcaccacaacctccgcctcctgggttcaggctattcttgtgcctcggccacctgagtagctgtgaatacaggcgtgcaccaccacgcctggcttttatatttttagtagagatggggtttcgccattttagctaagctggtcttgaactcctgacctcaggtgatctacccgccttgccttcccaaagtgctgggattacaggcatgagccaccacgcctggccatacaccccaggcttctgagacagctgtctttgagctcttcagactggagctggagtggcctctccaggcctgcggagaacacctcccaggacccagcactcacctatcgaaggccttcacgcggcccaggagtttcttattgttgcggcagttgatgagcacttgggtattgtt

SEQ ID NO: 8756 - DNA, 30659 bp, Homo sapiens
gggtgactgagagagaaagagaaagagagagagaaagtaaagaaagagagagagaaagaaaagagagagcgagaaagaaaagagagagagaaagaaaagagagcaagaaagaaaagagagagagagaaagaaaagagagagaaagacagaaagacagaaggaaggaaggaaagaaagaaagaagaaagaaagaaagaaggaaggaaggaaggaaagaaagaaggaaagaaagaaagaaagaccaacaattgcaccaaacggtcttaatcgcactcaagactcccacagttccctctgcccatgtctcccaggctgtccccatccttcaggccctttctttgactcttcttctgctgtaccctgacccttctctatttctcacacagctcattctagctgcttgacttcctggccctatgccatcctggccccatttctgactctttgctctcagctcagccagaataaagacagggacaaaaggacagagaaatgaccaggcaaagagactgcatgaggtcagatcttgagagctcctttgactgaatgtgagctagaaggagattgagagaaaggtgaaattgtaagcaggctttagggtggaggggagtggtaatcagccaaggtagagaatgatggagaggtggaataaggatggggagaagcttatgttgttgagggagtaggcaatgttgagtaggaaagtatcattgggtcattgctgagcggtgggaattgagggcagaagacagaaggactttgagtaatcatggcatccagaaatttctcttcgggtccttctgtctctgtttcagattttgtcttggccacttcagccactttgtctctttgaattctcccccttcaataactcgcgcgcgggygcgcgcgcgcgtgtgtgtgtgtgtgtgtgtgtgtctccaatacaatccctgacttacaatggttcaacctacaatttttctttttctttttctttttttttttttgagacggagtcctgctctgtcaccaggctggagtgcagtggcacaatcttggctcaccgcaacctccgcctcctgggttcaagtgattctcctgcctcagcctcctgagtagctgggactataggcacgcaccaccaagcccagctaattttttgagtttttagtagagacggggtttcaccatgttggccaggatggtctcgatctcttgacctcatgatccgcccacctcagcctcccaaagtgctgggattacaggtgtgagccaccatgcccaacccaacttataatttttaaactacagtgatgcaaaaatgatagcgtgttcggtaggacccatacttgaattttaaattttgatattttctagggctagcgactggtatattaaatgcattttcaacttatatgttcagtttgcaatgggcttatcaggacataaccccatcataaaagtcaaggagcatttgtatatttttctgtctttaagtttccatttttctcactgtgccttgagatctgtctctcactgtttcgacttttgtgtttttctctctgggttactgccctttttttcctgctgaccagagccagccatctgactttcctgcaaggagctttagaactttccagaagtggccagacttcttccctttggctgctttctagaactatagcaccagtttggggtccccgggcacagtcataaggtctcaatttttgatgaagacctgagtgagcttcaatacatagggccttttcagggagtagaatttccccacagtggggtcttagtgtcaaaataaagatatttgtcccttaacccatactgtggtcctggatttcatggtagtgtgttcatggaaacttgcgaagttcatgggttgagagcaaggaggatggggctctgcacacaactggacctaccgagaaacgggacctgaacatgtcttgcatttagctgcctcctcccctggatggcacactccagctttagggccctcgaggaacaagcaaattcagccccctgatctccaagggttgttaggcaaccaagaaatgtggttatcattaaaggatggggctgggggctgggtattggggaatcggtgggcctgcaggataggcaaagaacaacatagcacatggcaatgttttgatgtaattttctagaaaacaggaggccaccatcctaatattgagcatagtgaagttccatcaggaggggagtaaaggtgttttctaggggaagaaaagctgctggagcccctgtgttctgtatgggggtatgcccatacctcccgggatggagcaggggtgatcctagggaggagcaggaggagtgactttgaagccttggtcctggggggtgagatcaaggcccatattggtaatctttcaccacgtcatcagctccccaacacctttctgtacaaactgcggaaagtttgcaatgagcagatcaggaatagcttatcacagagacaaagctgtacagaaatggatcacaaatattttatccactctcatgcttccaactagttccactctgatttatttttcaccctcctctctccctaagcacaagggactctcccccagcctctgactcttctctgacctgggacttcactgcaggcagacaggatattactcaccaaggagctctctcatctactcctacccccaactcatcctcctgcaccccactctcactcccaccccttccaacctgggcccactccttccctcccccactcaatctgaccctcactctcactcttcttctcccccacaccaccccacccatccttgtccctctctgactcacctcaagtcccattgacacaaacaaaaatttcagcacaacccactccaaccggtttggctgaggcgtgcagcctgtcatggggacagagacaggtataagcggatgcttggatgcatgcagatcatgaagaacatccgctgctgtgcatacagagacagtcccacatatgtgcatagcatgtatgtgtacagagatacgtagggaacacatgatggtgggatatagcatgttacagttgtttctgtgtctgcctctcctgattgarggctccttgaggkcagggactatgtgttatgtgtctcggtctcctcccttgagcctgacacayagtggcactcatttaatgtctgttgaaggaatgcatgggtgcaggcgcgcacgcagcaatgtcactcagacaaacacacatgataaagacactatcatggcttgaattgttctcattcttagcgaccacaatgtgggtaggaggagggtaggagtgaggcatgtggggaatgggaattcaatatggaagggagaaccgaaccaggataccaggcattggtcttgaaaatcttcctcatccaatatttccttccagtctcaatcctagaatatgccttccccagccttcatcctaggagagggtaggaaaggcctaagtttgagggcatattctccaaaagcatggctcttgtgagacatacagggctgaggggaaggaggggacagagggacttgagataggtatttgtgaaatgaggagagagatccctaactctgtcaaaggcctggagtgggctgctggactctagtgctccctctcaggccctgtggtgcccttagcctacttcaaggctgcatcatacccatgaaaaaatgagtatagccataccctaactccacctctggacagttctgcctcctttccatgctccgtatggctagagttcagggtgagtgattaaggggcccaaccaggggttcagagacatcctgactggtagcactttcacggggtatactgtgaatggataggctgaaggagattggatatccatcttgtgaactaactgcttttccactcctgtgcctcagtttctcctgtggcttcctgtacctggaggggtgaatccgtgggaaggaaagcagctcctccgaaagcatgcgataggatccaaggtgtgataattataattataacacaggatgctccccctcccattcccgctggccctactccacccctgccacagaggatctcaaagcagcatctgggtggggctgttcccctggcacaggtggggacctgaaaaagagaaggggttggaggtggagagaaactggggaattctggcaaccggcctggcctttaagggcctctgacctgcaggaaatagcccctgaagaagaggtcactgccgtggtcatttggcatctagagccagagttggggtcatagtccagtgacaggagtaaagtccaggtcacaaccctagttcaggatagtaactcacagccagtcgggatctctgctttactgatccgacttcaccatccttttcatccggacaactcatttattcagaaattcatggcttcaccaaaatgtagtcagttcccatgaaatgctgtggcctgtcctagcatggaagactgagacaagattataaaacaagcccaactttcaaggagttcacaggctacaactcttgtcctgtcccgcaatttaatacatttactgaattcctggcacacagcaggcctcaatcgatgtttttttgacttgaagcttacaatttagttaaggagataagatgtgcacaaattatgagcacataagctataataaaaggactagcaaaggctgaggaagaatagaagaaagattaatttggggtgggaggagcagagaaggcttcacgaagatgtggcatttgaggtcagctttgaaagatgaataagagtttgacaggtagagttggtggggatggtggtggtagaaaatctacacagaacaactcttccttatggcttctttattcctcctttctgccttctccagatggaagggtcctatggcaaaactttaacctatatttttttcttctcccacgtctatctctgtatttacctggtttttgtattagccctagactgcaagtgatgttgtccctcccgttcactaaattttcagtgggctcagaatatgccctcttcctctggctatcccagggaggccaggaaggttttgtgtaatttggcggtcactttttatgcattcagaatggaaacacatggtctgacaaggatgtacttataggaatacagggctagagtacttgaaattaagattctccttgcaaagtccagacatgtggtcttgtccaatgaccttggagtaaactgggtaaaatggccatggagagggtagagaggaacctctctccattcaagttgtgctgctgcgcttttgggactcctggccaggtaacaaggtgttgaagctgagagagggccctgatagggaaaccaggaacccctacggctaattccttggccacttccttggcctcttatatatggaggtggagttagaggagttacgtaagttctttctcaggggtctttgaactacttccctacttcagggatagaggtgtctgagcaaaccatgagactaagttgtgtgtcctctggcaagtccctccccttctctgggccttggttttctcttctgaagaatgaagtatacagcgcagcactgacagactccttcctcctcagttctggccttctccgattctgtggctccaaagctgagaccctccaggagatccgggaacttgtcaaggcccccaggaggtaccaaggctagctggggtgtgggacgcttgggttcctttctacccacaagggccttgcccctttcatcctggcctggcctggtgccctgggcctcccttagtccccacccttgcctctcccttcatagccccttccacatactcgcaggtaaagcctggagctgaggatgggaccccaccgcccccacccaggtccttccctccttccctccctccctggcgcctattagctagcccaggccatgggggcggtggctgctgagtctccgtgccaggcccagcccccagagaygcacctgttctgacctgctgagcaggttcccaggtttctgccgtygttgttggccacagcgtgggaagcagctctgggggagctcggagctcccgatcacggcttcttgggggtagctacggctgggtgtgtagaacggggccggggctggggctgggtcccctagtggagacccaagtgcgagaggcaagaactctgcagcttcctgccttctgggtcagttccttattcaagtctgcagccggctcccagggagatctcggtggaacttcagaaacgctgggcagtctgcctttcaaccatgcccctgtccctgggagccgagatgtgggggcctgaggcctggctgctgctgctgctactgctggcatcatttacaggtaggacttgcctgaaccatcaggacacttgcttctgagcccaacctggcactgacacacatgcacaaacacatagacacrcacgcacgcacacacatatcctcctttctttgactctgaactgaggatccagtctctcctgcccccagcttccagcagtgcccccagaaaagccagtatagccctcccccttcttgtttcctcccagcccccaggccaggtcactatgtctgggatccctgacacctctgccaaagccttgcctaggcctgagctgtcttggggaatagacgtggtgacccagtgtagatgggcaggcaggtgggacttgtgaggatcctgttcaccccagggtttcctagaggtgccttggcctaccccctgggctctggaacggctgcctggaactggggctgactcagagctcagctggtttctgcagtcatcagggtgcaggaagcctgatgcccagagagtggatgggggatttctatttccttcttttctctccatgatgttctagagcaccaggactggggcacctgttggggactataggagagctgagaatgcccgtcactctgaccccttcctttccctgggcacaatattaggtgccagggtggtaataagggggtttagatggatgggggtctaaggaagggaaccttctagatagggtgtggtccccatttgttcatctcctgttcccccattttcttaactagatgccttgtattacttctcacctcctgtctgtctaatgcatatagagcaaatatgaattataggaatgtataatcttcagagtagaggagagtgtgtgtgcgtgtgtgtgcacagtgagacctcagtgggattccatagggtgttcctagggtaatgagtaacagaaatatttctccttcaaaagatagggcctgatctggacaggacagtttgattctcaggcccaggagcagtagcaagggagcctctgttgcccagcaagatctggcagtgattcccctacctccatctccagccaaagctttgaggagggaaataaggcctagatgtgtggattggtggaggtatgggctgctccaactctgatttyattataggtcatgggcccagcctccagtcgtaggatactgagctcctacccctgccatcccctcacagtcccctaccacctgtgttttaattcccatcttccagataatccttctcacttgtttaggccaaaaaggtggagcctagttgctggagttggggaaccagcagtcactttcctgtgggatctacccacacttaaagagtggagtcatgccatctcaggacttggaagagatcaaagagatcaccactccaactctctcattttacagatgaaaaaactgagagagataggcaagtgagatctgcaagattactcaacgttaggagtagacacacacgcacacacacaaacatctctttcctatgactctgaactgaggagccaatctctctctcccacccccagcttccagcagtacccccagaagagccagtgtagcccttccctttcatgttccctcccagcccccaggcccggtcactatggctggaatccctgattacctctgctcagtgttagaagcataaccagggttagtgtcttggtgttctcactctaagttcattgaagaatagtacatttgagtgcacactgggtacaacctggatactagatgctggagatgcaatggtgactgcatcacatggttcttgcctttcttttccatgatggcaaaactgttcttactaagagaagcccagggaaggggacaggagacccccttctagttagacctcatgcaatgcctggcagtaagggaggaagcctggctccagattgccccaggaagctggcacctggtaggaggccactctgctgctgctgcagcagctacaacctgcacagagctgaggttgctctgggggctggaggctcctagcctgaggatcagatggtcctacctccactaccayccccattctggctcttctgtgtgtagactctccttaatggctcccaggaacctggaatgtttcatgtctctgaaaaaatccttggactgggaagtcaggagtcttggtccagatcccgtttctgctattaatctatttggtaaccttgggcagcgatgaaaccagacttcagtagaccgagagctaggaccagatgatctctattgaccttccagctctgaaatacgatgactctgtgatggtccaggcctggctgaagtggggtgctggggtgttggaagggtcactgggtctggctgtggagataggaggaggaaagcgttctggtcgcatctctcagagggtaccagagtacctttccccaggccttyctggccctactgcaaattcaccccccacccaaatcctgggccattagagctctgagccccrgggccctgccccacccctgacagggaaaggagcccaggcttgggaggcgcctcagcaccacagctctttgtctctccttaatgggttgagtttccgggtgargtctcctcccttctccctcccccatctcttgccctggggctgagggacccaaatccacgagacacccctccccccattaggatcctagtccctagctctttgtcgggttcaggagccctgcaggaccaaagggcaagtggtgctctgcattctgaggtctgccttctgggggttaggatcagctttctgtctgaggttaatttccttgaaagggaggggcccatccttacttttctactcstgtttacagaggggggcaggccctttcctgtaggacctacccaaacccagggaagccagcaagggaggtggtgagaactgggagaatcccagggaagccctgtgaccccagtgaccttgttcccaccctagtgtttaaggaggccgggccaaggagagcctagctacagagatgaggaggttagagttcatgattccatcagccagaccagagcctcaggatctgggggtcctctaggcaaagtgaatggggattagctactttggggcccagtgaggagagaatgattggatgttctagcctccaaaaacttgcccttgctctgaccgaagtctaggcagagagaagggatggaggtgatgtggggaacgaagtcagaagggaagggagtagagaagcctagggtcttaatttgggaagagaatctaaatgaggagggggccaggcgtggtggctcacgcctataatcccagcactttgggaggccaaggcaggtgaatcccttgaggccaggagtttgagaccagcctgggcaacacggcaaaatcccgtctctacaaaaaatacaaaagttagccaggcatggtagtatacctgtggtcccagctacttgggaggattgcctgaatccaaggagactgaagttgcagtgagccatgatcgcgccactacactctagcctgggtgacagagtgagactctgtgtcaaaaaaaaaaaaaaaaaaagaggaggcgaagttcagaactggggagacatctgccatgcctcctaaaggaaggccgtggagaaggcggctgaggtcactctttcactggaacaggcagcctctggcctcaggagattttctcatagttttctggccacccccacccccttccctctaaatctggtgtgtcctgagagctggagttgaggctgtgatttgggatggggcagagctggccatggtgggtggaggggcagtgtggagcaggggttaggatctcaggagtttgggagaagctgaatcctggttctcccacccacagtgtggctgttgtggtgactcagccaggctcagactctggctccggggggtttaggggacttatctgtgctgggagctgtgtctgggccagagtggggctgcctcaaggcctgtcctccccattgttctcatctccctttgtgattgtgtggcccccctccccagacactaatctgtgggtgggcgttttgcccaggctgggaagctctcactaagctggggggcttagtacaatggggggtaagtgagggaggtggatgaaggcggagagggaatcttctggtttttaaagttccttagcactccaaggccaaggttatggggcaaagagtggatggaaaggggtttgctgggttgtttgtgtcacctgtcctggatggtgagcttcggtgcgtccctcctaggtcctttctcaccccagactcacccacatactccagctctcggtggagattgttgctgtcaggtaaggggaggcaggagttaacaaaggagcatgagaccctagacagcctggacccctccccctagccccaggcaggattcccctcacccccccaaacccacaccagacaacccttacccaggcctggagccagagctggtttttctggtggtggcagcagcagagccctgacagagattcccagggagaggcctccttggggggccagagctgctgaggggcccaggggagtggctgggggtagtggtgagaaggttggcagtccttttagtaggaacctgaggagcaaggggagagggaacatttgttttgttctgctggggagtccttaatggcaagttcccatcacctggagggacagtgacctcatctctgggtacttccaccttgagcctgagattaatatgtcttcaagtcttggggtaaggtggggaaggatgctgggggtgacattccaggcaggatgcagaggcaaaggctcacagccacataccacwgaccaagggcagctgagacagagagacatgtggaagccaagataaaccgacagcaaaatatttactatgtgtgcagagttccgcgagacaagaatgcactccatgcatacagagggtgtgacatgcacacggaatcatgtgtgcacacacattcacacatactgatacrcagctcttccctctggacacagacaagtaagtacgtatatgcccctaagataagacatgaacacatatatgtgccaaacacccaccagtttatgcaagaagatagcctcacatgcgtttgaaccagcactaagattggccaggccctcagccacagctccccatacacaaaaaactcatacttactcccttcctccttctcacagacccacctctacgatcccctacattcacatctgtaagtcccagcaggggatactgatggagaaaggcccctcataragaaaagatacttccttaaagatgctcttgatggctgggtgtcagcaagtgccagcctcagtttcccctcctgagatcagaggccaggctcacataggaaggaaagttgagacccaggcatagggtggggaagagccagccagcccaaacctggaatggagggcctgtctgggagcgggcggggtacacaaagggctgggctccaaagaggcccgtgggggcctggccagggtgggggaggccaagggcagggatcccgtctggccagttgggcctgttctctcccttgcgcaaggtggtggtggctgtggctaggcttgctgctgtgaggcagcttctgagtcaccaaggctcctgaccagcgtcctggtactccagggaggaggggtgggagggtcagagggaggagtgtctaaccagccggagtccaccagcctcagtaaacaatttgcaacagaagggtccctgggcttggcctggcctggccaccacatgccctcaaggtgacctcaccaggcaggcaatgtgtctcctttggtctgatgacatcatcatgctgacgccaggctgacactgggtggaggagagaaggaggaggcagtcctggcctgccctggcctggaaacctggacttctgggtctgtttagacaaggacagggattctagggcccaaattctattttctcttctcttgtaccctagggtggtaggggggtatgcagctggaggagggtgttgcctcaggctgagatgttcctactaagtagtggatttagaacaatgaggatctgtgggagatatccagaagggaatttcctgttttactgggttcctcggtctgtgaagcttcagtgtgtcccctaggggtggggatcgtggactcacaggtgagaacatggaggattgacattcaggcatgcgctgggtatctaatgcctgctgtaccctaagaaggtattttccaagggaaatataggtgattagtggtggggaggcagcaggtggttggctagtataggaatagggatggaaaatatgccatctgatattgtctcagaaatagtctttagaaaggtttgagtgtcctaatggggcaggtcttgggatccctgtgaccttcacagacaccagcgtttgaagcagaggatatgttgtgctggagatcccctacccaagctcactcacagcccttccttggcagccctgttctttccagtgccaggaggagaaaaagcctgggaggggtgcgggtggttagctggactcccaggctgggctgggtgggaccaacattagcttaggcaggtcagggctctggtatctggccctgcaggtctatcctgtcccatctgggccctctcagcatccttcttccctctccttctggtagcagggccacaggaaccccttcctgtgctctatgtgctgcctcactaaaactctctgatccattctggtggggcttcatttcctccctccatgcctgcctccttccatccctatttttttcctctgtccagtctggaggtgctccctttggcagtgaacccaattagctagcccagcctatcctgcctccaccccaaggttaccatgtaatgttcctccctggccagcccaatgcttgttcctcctcattttttttggtggcggggggatggtgtcttgctttgttgcccaagctggaggtcagtggcatgatcttagctcactgcaacctccacctcctgggttcaccagttctcctacctcagcctcccgagtagctgggactacaggcgcccgccaccacgcccatctaatttttttatttttagtagagacagggtttcaccattttggccaggctggtctcaaactcctgacctcaggtgatctgcctgcctcagcttcccaaagtgctgggattagggtgtgagccactgtgcccagcctgttcctcctcattctacactttccttctgtctctctcatttattaattcacctgttcattcattcacttggtcaataaatgttgacggaacccacataccactgagcactaaatcagaaacaatggttccaatggtgatgtgaggcccagaaaatagggataaagtgctgtgatgggaatgaaagcagggtgctggggagcacagaggaagggcacctaatgctgcctggggtgggggtgggaggagggaggactcctgctggaaatgatgtctaagcrgagtcttaaatgatgagtaggtgctaccagayatagggaggagggcattccaggcagcgggtacggtgtgagcagaggtgaggaacaacaaggtgtgtggcttgctgggcagaggcagggacaacacactgttgggggttgctggggcacgcgttccaaggcaaggagctcctgccatcccagcatgttcctttgctctgcccccaggccccaatccccatatttcacttttgattccatgactccaaatttatttcttcccaaaaatgaacatcctcaggccctgtctccctcataagttactcatcctagaaatttaggagctgcctttgagtctttcctctccttcatctctctttctggtcagtgaccaaatccctgtcaaatctccccccagaactgtcccctcctctccaccctagcrctactgcacccaggctgcagctgcagccttcagtgactgcccctcaccacttgctcatggcactccctggctaaggaacctttagtgactccccatttcctcttgaccaagtatgaattcctttgctggtatggaagttccccggtgatttggccccaccctgtcccaaccatattttccactcctgctcaacacacacaccctgtcttaggctgggtcctctcctctttgcttcctaaacaagccaccttctccatctccttggtgtttgctcaccgtggtycctgatttagaatgcctttctaggcctctctccctcctaatcctacccaactcatgcatggggccctcccaaatgattcagtcccatagtgattgccccatcccacagttggcctgtaacacacccctgagcactaaatcagaaaccatcatcacatgtttccatatgtgtctccatatgtatctcttgctcctgagcagaactcaagtcccatgagagcagggagtggatccttatttgcagataaggtgacatgatggatagctctgattccagaatccctgagggcttcattaatatgctaaatactagccctttgtactagccctttgtcccttgtcctccgattccagcttacaattctgacccggttgttgtgtgtctgccctgatctcatctctctgggcctctgacctgggccctttctgtctttagtggcttgctcattcctgcctctgagccttggttcatgcctttcctcccacatggaacatttcctgcgctataggaatccaggtctctcatcttcaagccatgaaaagaatgttccaaagggcctactgaatagacccttcctaccctatgtgccccattccagacaccaacagttttggattcttgccgtggctcccggccacactttctgaaactatccactttttcccggttggtgggttgaacctcttctgaaagtttgttcatggctttccctgtttctttgtgcataaattctattttccctgatgactgtgagctccctgagggcagaggctgggtctcctgttctgttacagcctcccaccttgcaactgctcaggatacaatcctaggctgcaagagggtgtgagccttccataaatcgtctgtgtggccttaggcaagccacttcctctctctgggtctcagtttcctcatctgttaaacggtgataataacgcctacctcttgggaaggcgttttgtagatttaataaggtaatgaactgaatgtgctttgcaagcccaaatgctccaggagttccggtcacctttgctgtcattatcattatgactgtgctcccccagctctggcagcacccctaatggtggctgtccctctctgccccctgcaggccggtgccccgcgggtgagctggagacctcagacgtggtaactgtggtgctgggccaggacgcaaaactgccctgcytctaccgaggggactccggcgagcaagtggggcaagtggcatgggctcgggtggacgcgggcgaaggcgcccaggaactagcgctactgcactccaaatacgggcttcatgtgagcccggcttacgagggccgcgtggagcagccgccgcccmcacgcaaccccctggacggctcagtgctcctgcgcaacgcagtgcaggcggatgagggcgagtacgagtgccgggtcagcaccttccccgccggcagcttccaggcgcggctgcggctccgagtgctgggtaagcggggatctctgggtayggtctgagccgctgtggatgcagggggaagcagagatggggactgcagagatggatggggcagaggtagaacaggaataaaaagtggggtcatgttcaggtgagggagcttcatccagctagctatcctcgcacccaatccagaaattctctccaagtaaccccaaaagctggggaagaatccatttattaggaagttcttccttccgacgacatgaaactccctctgttacttttgccctgtggcaatatggcactggcttattctcttttctgcacaacaacctttccaaaagcagaggccctttgtcgtgccccacccaaatctactcttctccaagctaaacttactggttcctgacacagttccaccaaagacaatttcaaagcctctctcaccatcctgtgctccatggtattttttacaatgtgggtcctgaatgtgaacacaggcccagcaatggtgtggccatacacgatcagaggagctaataccttccttgatatggaccttcagtgaatgtggtctgagatcacaatcgctttttttattttttgagacagagtctcgctctgtcgcccaggctggagtgcattggcgcgatctcggctcactgcaagctccgcctcccgggttcacgccattctcctgcctcagcctcccgagtagctgggtctacaggcgcccaccaccacgcccagttaatttttgtgtatttttagtagagacaaggtttcaccgtgttagccaggatggtctcgatctcctgacctcgtgatccgctcgtctgggcctcccaaagtgctgggattacaggcgtgagccaccgcgcccagccacaatcactttttaaaccatcactttatattgtgggcacttgtggtgaactctggacttacggtcaagttaagtcttttccattctgtgttaatattttgaaggtaaaaataaaggtttttggctgggtgaggtggctcatgccctgtaatcccagcactttgggaggctgaggtgggcagaccacctgaggtcaggagttcgagaccagcctggccaacatggtgaaaccccatctctactaaaaatacaaaaatcagctgggtgtggtggtgcgcacctgtaatcccagctactcaggaggctgaggcaggagaattgcttgaacccaggaggcggagattgcagtgagccgagatcatgccactgcactccagcctgggcaacagacggagactcagtctcacaagtagwtaaataaataaatamataaatacataaaataaaggtttttatagtttccctttattcacatataagttaataacatcagccttggagtaaaaataaaaacccaagtgtaaatctaggctttgtcacctaatagctgatgacttgggatagtcacttaacttccttgtgctttggtttcctcatctggaaaatagagataataatacctaactcactgtttgttgacagaatttgagataacatttataaggtatttagcataatagttgacacatagtaaatgcttactagatggtggttattattattaggtagatgatatctggttagttttttaattacttcattattttattttttaaaataacctacgttcattgtaaaaaattcgcacagtagagaaggatacaaagtcacctgaatttctaccattcatctgcgtctccatgaaataagagaaggaaagggggcctgaaagtttgtacttgtgcaagactgaaatgcgatgagtgggggcctcctgacagggattgtgtagacctgtgacccctgcctttccccatttgcagtgcctcccctgccctcactgaatcctggtccagcactagaagagggccagggcctgaccctggcagcctcctgcacagctgagggcagcccagcccccagcgtgacctgggacacggaggtcaaaggcacaacgtccagccgttccttcaagcactcccgctctgctgccgtcacctcagagttccacttggtgcctagccgcagcatgaatgggcagccactgacttgtgtggtgtcccatcctggcctgctccaggaccaaaggatcacccacatcctccacgtgtcctgtaagtacttggatgcttgggtagggaggcccaaggggttctcagcagattggtgagatgccacaggtccctgagccatgccaggctggccagcctgggtcctggaggcwatagtatgtgacagagcactagtccaaatgtggaagacctggagcccgatcccagaggatagacctctctgagcttctgtgtccttatctttacaaaggagattgccttgtttcacagggttgttgggagaatcaattagaaacatggaattgaaagcactttctaaaatattagtttaggatttggaaatagataaacttagacaagccctagttctacttaccagctgttattcattcttgttaggcttcattttcttcatcagcaaaatgggtataattatatataactcataccaactttagagggttttgatgggaattagaaactatgaatgcagagcaactcacacagtgcttagcgcatggaaggcgcttggtaaatggtagatattgttttcccagtgctagatttcaagcctctggaggggataagactgtcagcatttggctcaaagcaggtcctcaacaaatgtttgttgaagaaatgaatgaactagtaggattgttacacctttgaaaaatcaggcaacatttattcagcacctgttctatgactagcactatgctaggcaacacaggacatccagaaaatgtgtgatggatcactaccttgagggacttatggtctcattgtacaggtaaaccaatacagactctctgagcttagagaggggagggaacagtgtggccaggagctgtcagcagggtggggctgagctaggtttggcagcagatgagtaggatggagaagggcaaggggagggtgtttcaggcagggtggggtgggggcagggccctttgaggtaccacatgatcaaaggcatcattcccattctttctcctcccacttcccattccagtccttgctgaggcctctgtgaggggccttgaagaccaaaatctgtggcacattggcagagaaggagctatgctcaagtgcctgagtgaagggcagccccctccctcatacaactggacacggtaagggcccgagcctgaggaaggcctaacttkagactaggttcctcccctctcagggccaggatataccactatggaatgggacaacatattctgagcccccaaataaattggggtatgtgttcagatctcttgtattattatactcatcatacaagaatatgtatggtcaccaaatattattggcttgcccagggaatctaagatacatggtcattagtagggaataaatggataagcccttaaattttttgtcttttattttatttattttagttttgagacggagtcttgctctgtcgccaggctggagtgcagtggcatgatctcggctcactgaaacctccgcctcctgggttcaagcagttctcctgcctcagcctcctgagtagctgggattacaggtgcgcgccaccaaccccagctaatttttgtatttttagtagagatggggttttaccatgttggccaggctggtctcgatctctagaccttgtgatctgcccacgttggccttccaaagtactgtgattacaggcgtgagccaccacgcccagcccttgtcttttatttttatttttttgagatggagtttcactctgttgcccaggctggagtgcagtggtgcgatcttggctcactgcaacctctgcctgccaggttcaagagattctcctgcctcagactcccaagtagctgggattacaggtgtgtgccagcatgcccagctagttttttgtatttttagtagagatgggctttcaccatgttgaccaygctggtctcgaactgctgacctcgggtgatccgccagcctcggcctcccaaagtgctggaattataggcgtgagccaccatgcccggccttgtctaacttttaaattgtgaaatataacacaatatttcgatattaatattttatatatttatgtgagtgcataaaatggacaagacagctgtgtctttttctaattgttgttaagccaacactcctataaccaccacaatattgctagyacctcaaaaacacccactacctccagttccctcaaggcatccttggcctttttccaagatctgaaatatctagagagtcagggagaggttgggtacacatgtgtgtgagcacatcatgggcatgttctcacatgtgagcatatgagcgatgcatgtggccttgtgcctggggctatgtttgtgtatcctgccatgcaacatcacgggtgttggagcaggcagtcacattttccaattacctctacacccagctaggagtggagtgtcctgttgtgtggactttataacatgtgtacctggtacccagtgttggatgacgtgatgcctgtggaagcatgtgggatggcacacgtgtggatcttccccgggtgtgtgtggggggtgcccaggtcaggctgggcagcagggagaaaggacctctgcctagacctgcctggtggagggaggggcaccgtgggaacagcctgcggctctgggtgacgtcatgggggtggagggtggagagctgtctggacacgttgggtggtggtggcttcagcccttcccggctggcacccttcagcttccctgtcttccaggctggatgggcctctgcccagtggggtacgagtggatggggacactttgggctttcccccactgaccactgagcacagcggcatctacgtctgccatgtcagcaatgagttctcctcaagggattctcaggtcactgtggatgttcttggtaagcactggagcagargtccttggtaaggacctgggccaagggcttggtgggggcagcaggaagcaagacagagacagtgaattgggaaagtgtttattcagagggggctgggctgtgtgtcttgcagagaatcaaactgaggtgtggttttagatgttttgcgggggagctgtgaggtctggggtgggttgtggctgcaggcttccacctcagacagtggcctgtctccagcagacccccaggaagactctgggaagcaggtggacctagtgtcagcctcggtggtggtggtgggtgtgatcgccgcactcttgttctgccttctggtggtggtggtggtgctcatgtcccgataccatcggcgcaaggcccagcagatgacccagaaatagtgagtactgggcactcctgggtgggtagaactaagctgagaacaaagaagaggatagcaggaggtgggccaggaccgaggagactgggtaggctgaaaactgaggagtttcagactagaggtgggcagggtgtttctagggctgaggaggagctaagggtctggagcacagatggagcactcaatccttccaccttagtgaggctcagatccatgtgcctggatgttgccaagtatgcacaygcacacagcacacacatgctcttcagcckcactgccacctgcagccacacactcacacttgcagggccagcacggcacccacaccctccgggcctgtctcactaggctcagccaggataggctcaccttgggaggctgccactaccctcagctcctgacaagggtgtgtctttcccagtgaggaggagctgaccctgaccagggagaactccatccggaggctgcattcccatcacacggaccccaggagccaggtgtgtgccaaggttgggtgtatgcatgcaggggtgtggtcgcattggggtctgcttgtgcctgggcccctctgcagaccaggagcacagctctctgctgggtcagccactgactcacagctggggttggccggggtagagttgagagggtgtagctgctttgggtctgctagggctgctccagaaggcccccttcagcattggcctagggccttttctgggaagccaccatcagttctgcttccagggtgggtttgtggtcgcagtggggaaatgaggatgtttgtttccaggagagaatggacctgttgggttgggggacaggcaagtagggaggaggctggtggaggacaagaggggaagaggctgaggggaggaggctgagccctgttctaactgccccgtgtctgggccctgcagccggaggagagtgtagggctgagagccgagggccaccctgatagtctcaaggacaacagtagctgctctgtgatggtgaggcccccggccccaccggtgtccccaccactctcctcgggcccctgtcctggtcccagatatggtgcgtcagcagcccccttaccagtccctctttccttagccctggctcatgcagcccagcaccgcatctctgctacgtctttgttctcccgtctccctctccccatgccyaacacttgttcctggtccccgatctctgggcccctatgcttctgaggcaaccgttacccctgcttacgcctggcctctgatcccaccatgacccagccatgccccaccatgtgcagctgccctgcctttgttcctgacttgccctttgcccttggtctccagagtgaagagcccgagggcygcagttactccacgctgaccacggtgagggagatagaaacacagactgaactgctgtctccaggctctgggcgggccgaggaggaggaagatcaggatgaaggcatcaaacaggccatgaaccattttgttcaggagaatgggaccctacgggccaagcccacgggcaatggcatctacatcaatgggcggggacacctggtctgacccaggcctgcctcccttccctaggcctggctccttctgttgacatgggagattttagctcatcttgggggcctccttaaacacccccatttcttgcggaagatgctccccatcccactgactgcttgacctttacctccaacccttctgttcatcgggagggctccaccaattgagtctctcccaccatgcatgcaggtcactgtgtgtgtgcatgtgtgcctgtgtgagtgttgactgactgtgtgtgtgtggaggggtgactgtccgtggaggggtgactgtgtccgtggtgtgtattatgctgtcatatcagagtcaagtgaactgtggtgtatgtgccacgggatttgagtggttgcgtgggcaacactgtcagggtttggcktgtgtgtcatgtggctgtgtgtgacctctgcctgaaaaagcaggtattttctcagaccccagagcagtattaatgatgcagaggttggaggagagaggtggagactgtggctcagacccaggtgtgcgggcatagctggagctggaatctgcctccggtgtgagggaacctgtctcctaccacttcggagccatgggggcaagtgtgaagcagccagtccctgggtcagccagaggcttgaactgttacagaagccctctgccctctggtggcctctgggcctgctgcatgtacatattttctgtaaatatacatgcgccgggagcttcttgcaggaatactgctccgaatcacttttaatttttttcttttttttttcttgccctttccattagttgtattttttatttatttttatttttatttttttttagagatggagtctcactatgttgctcaggctggccttgaactcctgggctcaagcaatcctcctgcctcagcctccctagtagctgggactttaagtgtacaccactgtgcctgctttgaatcctttacgaagagaaaaaaaaaattaaagaaagcctttagatttatccaatgtttactactgggattgcttaaagtgaggcccctccaacaccagggggttaattcctgtgattgtgaaaggggctacttccaaggcatcttcatgcaggcagccccttgggagggcacctgagagctggtagagtctgaaattagggatgtgagcctcgtggttactgagtaaggtaaaattgcatccaccattgtttgtgataccttagggaattgcttggacctggtgacaagggctcctgttcaatagtggtgttggggagagagagagcagtgattatagaccgagagagtaggagttgaggtgaggtgaaggaggtgctgggggtgagaatgtcgcctttccccctgggttttggatcactaattcaaggctcttctggatgtttctctgggttggggctggagttcaatgaggtttatttttagctggcccacccagatacactcagccagaatacctagatttagtacccaaactcttcttagtctgaaatctgctggatttctggcctaagggagaggctcccatccttcgttccccagccagcctaggacttcgaatgtggagcctgaagatctaagatcctaacatgtacattttatgtaaatatgtgcatatttgtacataaaatgatattctgtttttaaataaacagacaaaacttgttctgtctggctcctgtcttgccccttgaactgtgtaagctctgagtcacatactctctgtctcggtaccatccttcctgtagtcccaagtaggggaagacttaggatgcctgtagctgggagggaagggaaagaattggcctccacaaggcctttggccatctctgagagtcccctggtaggaaagtgaagctaagaaccctttcgaggatggccagtaccttagtttgcaaagtgttttaaattccttttttttttttttttgagatgaagtctcactttgtcacccaggctggagtgcagtggcactatctcagctcactgcaacctccgactcccaggttcaagcgattctctcacctcagcctcccgtatagctgggattacaggcacccgtcaccatgctcagttagtttttgtatttttagtagagacagggtttcaccatgttggccaagctggtctcgaactcctgacctcaggtgattcacccgcctcagcctcccaaagtgctgggattacaggcgtgagccactgcgcccagcctgaattccttattgtactggagactcaacaacagctatgtgaaataggcagcagtgtacccttttttacaggtaaagaaactgaaactcaagttaaatgagttttacagactcttagaggtgggaggatttaaaggtcctctagtctgctcccttcattttcctaggtttggaaactgaggctcagtgaagtaatgcgatttgactgaggtgctagatccatcagaggcagaacccaggcatcctcccttgtgagtgtgctttttacagccctgtgtcaacttgctcccaggcaagccccaggtctctaccttggacccaagaattctggtctctaagggagttggtcacctgctcacaccacagacgccatcaccccaccccagggctctgacatcacctcccctgaccaatgaatgaagtccaagcaaagggtgaggatgtgaatgtcagctacctcccccaccctaggccctgtggttgcaaagatgctctaacaggaagtgggttaaggagctgcactgcttcctgccccctaaagctgagcggggcgaggagggcgagtgccaggctgggccacgagacacaggacacaatttcttgccagggtcctggtagcttcctcttcaacagccacttccgtgtggccggggccccaggggcaggagctgctgcccgttgcccaggccaccctccacccccaattgggagccctgcccccctggggccgggccaagcccagcagctggctgggatcccatgggggactggtagggcacaggtcttgggggatagaggtgaccgggccagtgccctggggctctggccatgaagtctcggcagaaaggaaagaagaagggcagcgcaaaggagcgggtttttgggtgcgacttgcaggagcacctgcagcactcaggccaggagggtaaggaggccggctcagcttctgcagggtgggtggggaggcactgggcatctgcagcccgatccagcctgaagggcagaagcagtttccggtgctcctggggaaggggcagtggcctggggtcaccattcaagagaactgtaagtgggcaagacaggaaatgtggctcagtgaagaaggcagggcggctcccttgtgtaactttctggggatggggtggctgaggggatgagaatgtgagtacccaggtagcagtgagggggaggatggagagactggaaaccgaggaggagtggatgaaacagcgggcaggtgactgggaacaggagagggagggtgaggcgacagggtcaggagaggagtggctgaaggggaaatgattatccttaggtctgaatgaaaggagacagggaaatggccccagaagggtctcaagatggcccttgaggcgggtggtttcctggctggagaacacccaaggacaaggtcatgggctctgttcccactgcagccttgctgggccgcaggggatgatgtcgggctggaaacagcctctgcccctagtctttgtgattctcttgttgtccctgtgcaaaagagaaacaggttcaaagtggggggcaaggggagaagctgctgaaatggggaagaatgaaagagagggtgtgaggcctggcttgaagctggaggtggagggtgcaaaggagggtgggtgtggagctgtctgtggagctcacccagctccctccctgggttaccttagagtgggctttgaagccagaaggaccagggacaatatcaggttcacaacggggcctggcatggagcagccactcaaaatcatttcttgattcaatttgaaattgaacccaggcaccctggctgcccagcccagcttgtttttggcacttcaagctcctcctagagaaaggcataattctttccccactccaccccattccaccccaccccaatctgtcatttcctctttgtcccctcctctgctctgggctgtggtgcttgcagcggagggagggtgatggtggttcccagatcatttcctgctcttagccccgcccctgcgtccccagacacctccttccccttttctcctccagtgagaggacccctatccccattgcccttggttaagggaaagcccagaccccaaggaagagtgttaaacagctgaagcgagcttatttgagccttcctcttctcactgggcagagtggaggtggcacagccatcagtgcagggcttactcctttctaagggactcctctcaagagctatgattcttagccaaggattatgagatttaattggggatgatgttctcctcccagctcaatgcaaaccctcagttcagcctttcctggtactgcccttttttgtggtccaccaaccaattttatcttgaaacactgaacccacagccagcccagaccctgctcctataaccctcccggcctcttcctggattcctagcagggaaggggcacactctctagaggggacagacatctgattgctgaatcctgatcctaggtgaatccgagagcaggagaccagaacctcacagaacccaagggtgggttgatcttgggcaccagagtagcagtggtggctccttccctatccctcaggtcttcctggtacagagaggtggaaagtggaaggaaggacagagagaggctggtgatggttcctctctttaatccaacatccacaaaaaaatgagagcagagagatctttgttttcgcttaatttatcctccctgatcacgttggtctcccccatccccacagccttgctccatctcagccctctctccagctctttgcccccacatgggtctcttccttccttaagccctgtatatactgaattctttcttttcctaatctttgatagattgttcaggtttctttctttctttctttctttctttctttcttttttgagatggagtcttgctctgtcccaggctggagtgtagtggggtgatctcggctcactgcaacctctgcctcccaggttcaagcagttctcctgcctcagcctccagagtagctgggattacaggcaggcaccaccacacccagctaatttttgtatttttagtagagacagggtttcaccatgttggccaggctggtctcgaacactgacctcatgatccacccgcctcggcctcccaaagtgctgggattacaggcgtgagccaccgcacctggccgattgttcaggtttctaattctcaggtccctaagctttgggccttcctccctgaccctactcttatttcctcgatgtctccatccctttgacttcatcgctccaatcctgtctgtaggttttatctctgatctcatctctctgatctctatctccctaactcccccatctctgtgaccctgttgtctcttcccccatctccttgacccagttcttctatggctgtgactccttaggcttttgagtgtcccctttaaaggactctggaggttcaaaatcagcagagaaggataggatagagaagacctggtttgtatgctgctcatgtgacaaaaacctggtggtttaggtgacagcagactatttatgagtcaaaagagttggcttagcattaggcacccgagagtacagcagcagctcagacaaggaggggcctgccctatctctgcattcaatgctgggaacctgaggtcagtgggatcctagaaaatgggagtaggtactgaaacgatggatggtgaactgtaggactgagactaagacgaggcaagagacatgactagggtgcaaaatttaaggaagcactcactttcagtgtcgtacaattgccctaggtgccttttttttttttttttttttttttttttgagatgcagtcttgctctgtcacccaggctggagtgcagcacaaccatcttggcttactgcaacctcgacctccagggttcaagcaattctccctgcctcagcctctcgagtagctgggactacaggcaccaccacgcctggctaatttttgtactttttagtggagacggggttttgccatgttggccaggctagtcttgaactcctgagctcaggtgatccactcgcctcggcctcccaaagtgctgggattacaggtgtgagccaccacaccaggcccctagatgcctcattctcaaggaggtactcaagaccgtgcatgggcatggttggcatctccatggccctgagaataagtgcttccttaaattttgcacactagatgcttccctaatcccacccaactcctggctgtggtgtgcaggaggatgaagggtctgaaagccaggtcgtatgaggagagttgaaagattttggttggctgagcatggtggctcacgcctgtaatcccagcactttgggaggccaaggcgggtggatcacttgaggtcaggagtttgaggccagcctggccaacatggtgagattccgtctctactaaaaatacaaaaattagctggacatggtggtgtgcgcctgtagtcccagctactcgggaggctgaggcttcagtgagccaagactgcaccactgcactccagcctgggcaacaaagtgagactctgtctcaaataaataaataaataaataaataaataaataaataaataaataaggggccgggtgcagtggctcacgcctgtaatcccaacactttgggaagccaaggtgggtggatcacctgaggtcgggagtttgagaccagcctgaccaacatggagaaactctgtctctactagaaatataaaaattagccgggcagagtggtgggtgcctgtaatcctagctacttgggaggctgaggcaggagaatctcttgaatctgggaggcggaggttgcagtgaactgagatcgcgccattgcactctccagcctgggcaacaagagtgaaactccgtctcagaaaaaaaaagaaaagaaaaaagaaaaaagaaaaagaaaaaagaaaaaggaaagattgggattgatgaatttattgattattttcttcattccatatttctgtcatactttattcaacaaagagcttggaatgactttcaaaacctaaaactttacaaaaaattagaataaatgattgaaggaattgggttgaaggaaaaacaagaggaagagaaagatcagcacccagaaatgcatattacattgttctgtatggttcttagaggtgggctctgagcttcctagtggttaaagaggtaaacataggccaggcccagtggctcacgcctgtaatcccagcactttaggaggccgaggcaggcagatcacttgtggtcaggagttcgaggccagcctggccaacatggtgagaccccatccctactaaataacataaaaattagcagggcatggtggcgtgcacctgtagtcctggctactcaggaggctgaggcaccagaactgcttgaatgcaccccaactcaaaataaataaataaataaacataatcaagtgcaagactcatgggcccataaggaaaaaaagttagatggtttaggagaaccacagctttttcccccttcccttcccttcttcccttcccttcccttcctttccttttctcttccttccctccctccctt

SEQ ID NO: 8757 - DNA, 189817 bp, Homo sapiens
  misc_feature (1)...(189817): n = A,T,C or G, or insertion/deletion polymorphism (see Tables 1-2)
acagatgtgcacacactcacagacacatacactcacatagacaatgcatacacacagaggcatacatgctcagaaatacccatacacacagatactcagacacactcagtcgctcacacagatgtgtgcacagtcacatgcagacagacatatacactcacaaatatatagccagacacacacagacacacatattcacagggagttgtttaatggaaacagagtttcagttttgcaagacagaaacattctggagatgggtcatacaataccatgaatagccttaacactactgaattgtaaactgaaaaatggttaagattataaattttatgtgtattttaccacaattaaaattttttttaagacagagatatttactgtaagaaggtgggtacattagttaaatctttctttcctaaggcgagaacagctttcttccatttgcctgccatgaggtgaggcagcccccagcaatccatcactgctcctcgggaaggtagattacaggtgatcgtagatccctggcaagagtgggctatgcccagggaagccaaagcaaagagaaaactcctgccatctgcacctgtccctggcatgggttttcatctttcctgaaagaagaaggaaaagaggctgtgggagacatggtcctgtcttagatcccacgccctattgtggtggcaactgcgatgatgctttataaattccttttaaaatgtcattgccagactttgtgaaaacgctcgtgaggctttgaaaaatatgtgaatggatacagagggccgcttgccttcccccactgctcactactgtggctagaacctgactacaaactgcccacccagcctcccttccatcctctcccccaggacacttccatctggagtggaaagttttctccagctcctacaggatgaagggcagtgcaggagaaagactctcccaagagacgaacttgggtcattcatgtcagagggtctggcatctttgaacaaggccagttgttatttatgtatctactcacctccctctggaattacatctataaccaacaaaatccaggtcttgttcagctggaaaaaaccagcagcgtccagacatgactgggttttttgtttgtttgtttgagatgtgaagttttgcatgtaaatcraatagagtttgccagaaaattcattgcctgaacaaatatggtctgctccttgggtattgccaagtaggagaaagatggtttgtctggagagactgcagagaaaagtgtcaataccatagaaatgaaaactcagaattaaaggatcaaggtaaggggatccggaatccctcctcccacgtattttctgtttactcacaactcccaaagtttactacatatttctgagagacgccaggatcccagagtgatgtgtttaggaatttttaccctgcttcttggggaggcaatggggtgagcccttcagcttcagaagagtgagaaggtatgcccaggcccgtgcagccagagggagttcacgtctccttggaggtctcatgctgagctggtaaggccaagaaagtaggggcagaactggattacccttgtgacgttctcattggagtctcctcgtgctccaggcctattgacatctcatgtgagggactggccatgccatgatgaaagagcacagtgtgttgtggcagtcctggaactgtttgcccagagagcctttcctcaccctttccctgtatggatgcagtaaagagttaacatagcaaacctgaaactggcttagaaagccctacttgcaagcttggcccttgtctggcatctgggaacttggacttcaggagtcttcccactgttccctaactgacaagtggggctggctgggcctaaactgtacaaaaattgtggctcatgcttaacacctgcttccttcagggagtctggaaaatggctatgagctaggtagagggtacctatgtgaccagccccccataaacaccctgagcactgagcctctggtgagcatccctggcagatgacattatatcagtgttgtcacaactcattgccagggttggtaggcacagcccatgtgccttgattaggacaggacctttgggaacttctgcctggtcctccagactttgcccaagtgccttttctctgctgatttggatttgtatcttttcgtcatgatttatcgtgtagtatatatgatatatgtacatttgtatctgatcatagctacgtgggtggccgagtctggtgagtcctcctagtgaatcacagaacctgggggtagccttggggccccagcacaggagtggtggggctaactttgcaggcggtattttccagagtcctttgtcaactgattctagtggagttcagcaaaacggcagacaagggagggagagggagcgggaagaaagggacaagctaggatcattcttccctccctcttgacctcagacagtgtttcttggaattatgggatctaaagctcccaccagacaggaccacacggttccagtgcctgacctaccctcagtcctcccgctacaacgacaccaactcctctctgctgttgctaattgtggagttgattcaccttctcgtgtttggtttcttgtctcttctctcacctgtgtaaccaatcccctgccttaaattccttcttttagaaagacctaaagtggtttttgttttcctggatgaaccccgtctgttacatgccttaaatatttacatggctccacttccatgccaggcagggggcattcagaaataaaagacaccatcccatccttaaggacctcagagcctatgcacctgtggaagttgcatccctagcacagttcaagattcactgtgtgaccagaaacctttgttctgatgtctcagccatataaccatgaggaataccctgtaaaatgaatgggcttcaaccgcattctagggcttggtggcttagacacatttttatcgactttgtttagcacaaggaaagccattgcatttatgatgctcttgaggttagtggtttgggggagtcagaaagccaaccactgtgtgtgtatgttcacaaagccaataattagtctaaggccaaaagtgacaccgtggaggtggttgtgagggtgacaatcctgttctgaatgcacaactcaaccccaagtcccaggggtacctggcatctgcgtaacctcatctgaagggtgcaagggtggctgctcatcctccaaccccacatggatgagggtatcttggaattctagacactcagatttgatgtttgccaggagaactaccagaatatgatcgttaaggattgggggagggtttaaaaaatactgaggagacctgaaattgtatgaatgctgaggggaagcagtgctagacatctttagggtctttctctagcactcagcaagggatgtggcaaagacggcctttggatagttaagtggtcagcagcctctctccagggaactctggctggagtccctacctttttgtactctagtgcaggtacagccaaggaaacagaaaatgatcatgcagtgtgaggagcactacaacaaggcaaactccttgcaagacaactggggagtcagtggagggagactgggcagggaagaaagatggcagaggaagatgatagggaagaaagatggaagccaaatggcagaagcttagtgatgaagaggaggagaggagaaacaacagtggaaggcagggagggtagattggtgttgggggaaggttttttaaaaatactggagacctcaaattgtatggatgctgagggaaagagcagtgctagaggcagggtccagcttgtataggccttgtcagtttcagcttgcaatttatccaaaaagcaaagagaagtagccatataagggctttgtgcaaataatttgatttcrgattttagccctgaaatgctcattctgactgcactgtagagaatggactggaaaggggtacatacacgggtagattcaagggctgtttaagaggtaggatagaaaatatttgctcaaggatcggatttgatgattgagggagagaaacaaggaagcctsaagaatgatgcccatgtgtctggtgtaccacctgcgtgcaaagtgatggtattcattgaggtagggaactcctgagatgcaccaggttttccaggaaagtgatacatctcatgttagacatgatgagcgtgtgttgtcactgggatgtgacaaatgaggatagccagtaggcacttagatacgggaatctgcaattctggaaaagatcttggctaaagacccagatttgggaggtgtcaggatatagatggaatttgaaaactatgggagttcctcagacaatcaaggaatattgcgctgcactggaggaaaccacagagtgttcaatgtcaaggaggcctaggaaaaataccttcaaagacagagttcaatgcttccaaaaggtcaggtaaataagaactgaatcctgtcttttggcctgagcacaggccttggagaccgtgacctccactttcagtagaatgatgaggcggaagccagatggcagatacttagtgatgaaggggaggagaggaggagtaacagcaggagtggggacataggttgggggaggtttttaaaaaaatactgaagagacctgaaattgcatgaatgctgagaagacccactattagcaagcaggagcttgaagctgcaagaggaagagtacrtaagagtcacagcaaagccccggagaacaaggcaacgcagaagcctggtttggagatgcagagggaggagggacctttccaacttcagtaacaagaagaaagaggaaaagatagataaggttgcaggcaggttcatagattggtagcagaaaattgagagaatttctaaccaatggcatctttttttttcttctttataacattgggagattgagtggcagggtcagaaatttgaagacagtaaagaaggttagaaatagccatgtttgactgggtgcggtggctcacgcctgtaatcccaacactttgggaagccaaggagggtggatcacctgaggtcagaagttcgagaccagcctggccaacatggtaaagccccatctctactaaaaatacaaaaattaggcgggcatggtggcatgcacctgtagttccagctacttgggaggctgaggcagaagaaycacttgaacccgggaggtggaggttgcactccagcctttgcaacagagcaagacttcatctgaaagatagaaagatgaaagaaagaaagaaagaaagaaagaaagagtaaaagaaaaaaattaaaattttagggggaaaattttctaatttttgaacatgcactaaaatgattttcagagaaaaccaagtgttattttctaatctgcatggcattattaaagatgtttactcatcttccttggggctaggcatcccattcctgcaggaagtcttgtggttaggcggtggctgtggctctgggatgattcaggaatgcagaccatgccttatttgcacaggagggacacgttgctctcactgcatgcatggtcacaactgtctgtgtgacctgtctgtgggagggcagacccccctcctgccaagccacagtagcagctgacctgccaggcaaaagcattcctttgtaaaggaaaccctcccagaccctctgaccaaaggggacgggtggggacttcctggcactgcagggccccttgcctggtactcccagcaactggttgcggtggggagggcagatctagggrtggggatggggaggagaagtgggaatgggaaattgggagtcagaggggcaagtgggagagaagggcgcacctgccgggataacaggccagatgaagtaaatagaaaatcctctgagctcccctactggctccagctgtggagaagggggaggagaaaaccctgtgggacaggggaggagggtgagggctcctcttaggaagttatttaagagccaactgtcttgtctttcccgagtccgtttgaggaagtccccgaggcgcacagagcaagcccacgcgagggcacctctggasgggagcgcctgcaggtaagccaccgmccctgcaccctatgagccagggmccgctgcgtccaccttctgcacctcggtttcctggttgaaccagcaagcggcttgctctgggccctgtggcgccggtcacaggcagctccacttgcccaatcctggcttcccgcccccaactccgcacctgcccagcccagcttctaagcgggacttctctcaggctctcgaggcagctctcccgaagccgttgcttgcttagaatgccaccaaatggggatgggggagttggaggtgcttccccaagggacgagccccctttcctcagggagcagattatggagctggaacacaaaaggtggagggagtggggccaagtgagaacagcctgctagactggaaccccgccggcttggctccccactcctgcgcgcctccccactcctgcgcatcgcctgcctccrtcccaatttggagctgaactcgagccacttctcctccttagacccgcccagaagcgagggctcctgcccgccgcactcacccagccaggcgtgcacctggggctccccccttctcccccttagcactgtgtctcccgacagcgygccacactgttctgcacccctggcaatgccrcagcctaccttcggtatttctcactagaggatggctctcgcagccttctccctatcattaaccctttttcgctcttctccctcccttcccccstcagctcaccaatgactgtaaatatatttatctatacttatggatacccattcacaccttatgcatccaaacactcctgtctccttctcagaccagacaccttaggcgtggttgtcttttctccagcatgttgttagtgctccacatgtctctggaaccatctctctactctggtggcctctataatggggactcttcacctcttgkgggtgtgcmtggtttttgaaaatagccaagtctccaggagtcatgactgggtaatccaggggatcaagggggaaccttcactgggcccagaaacaaagtcccccttcatttggtcatttggtcaacaagtacttactgggcactgaccgtcaggtgtgtgttgtttaaactggctcagtgcctgcacaagctccaagggaaggggaagcaggcttggggaatgggaaatgttggcaaccctgacttcttaagcctattgatagccctattgaaaattgcatgcccaacctctccacctccttatcctcytccatgtggctcaatttccaaagcagttcctacctcctcacccctaagtggatttacttayggctcttcttgggctccaccctaaccctatcagactataatctatcagagcaaacattctgttttgttctctgatgtatcccatgtacctagatcacagcctggcatgtcataggccctcaataaatattggttgaattaaattgcaaatgtaaaygctttagaagacaacatttrtctggacatgsttgtgtgcgtttattcttaaaagtgacttataatctcataaatctgtatgaaatgaacatagatacagcacatgcatataacaggaaacatttcttgcgaagatgctgctgtaggattatggagggtggsggaatctgggtctccaaaaatcttttaatttttaaatttctttgaataagccccttttcttctgctttccatatgttttgacacatacaaaaatctccccaagatccttggggaactgtattccatcattagactaatccttgctgccacttctcagtttttatttatgcaaacggcaaaatgtgttgctcaagtgctatcacacacagatatatctgtttctctattttggaatccttgtctcaaatgttactcactttacatgccttttctgttgtcttctttttttttttttttctgaaggaccttgtaaagtcaaaaatgtcagaaacttccaggaccgcctttggaggcagaagagcagttccacccaataactctaatgcagcggaagatgacctgcccacagtggagcttcagggcktggtgccccggggcrtcaacctgcaaggtatgagcataccccccttccccaccactctgggtccaggcacagccgggccctggcccctcttccctgcaggtaaacatcctctgtctccactggggttcccacaaaaggaagccccctgccaatctctggttttataaaggaagaaagcaaaagctttcttttaagtggtgaaagcaccgaagacccagagccttgtcccagttctgccccttactgaccttgtaacctcagagaagttgctttgtctttctgcctctcaactatttcctctacaaaaccagagtgctggattagctagggcctcttccagccctactgctcaatgctttagagaattttctctagctggaatattccacttccaaaatattgtggctgttttgattgtctggcttgcacctccttccttctccctcctccctcctccatccattgctgtgaatttcagagccggggagaagtgccagactctgacagtaatagagatagaagccctctatttctctccagagcagcctggtgagctggcaaggcaagctgcttccccagcctcttgcctctgcctgatccctagaaacctgttccgggtacagcagccrgcagctgacctcctctcagccctgtcagtggtgacaaggyccaggtgccagcactggtttggtgatacagacatcattcccctgggccatggsagggacattcagactcatgtccccgagtggcattgagcagggagtcttttttgtcaataacattcatgcaccaaaatctaattttactcctaagggtgttctgtgctgggttycactggggataarcamcyatttgctgggataggtgagcatggtcatgctggagctgtgtggtcgattcccctcattagaaggagacsaatgcctgaaagcccagattgatgcagctctccatatagcaaagggaaaggggaagtgcagtttatccagcaagccagacacttgcccaggtgttgtggactggtgtcattgtgttactgtcacactagatgatwtgatatcaaatagtgaaatcagggaggtatccagtaccatccaagtttgggaaaagaagttcacagaacagaagggcatcttcagtcaggtggtagagtttgaggggctaagacgaacttgtagttctgaaatctgtctcccagctggatgccactctctaaaaccccaccttgacagccacagaactgagtttaagaggacttgctaatcaatgaatcctcatccccatgttatatgttaggaaatagaggctgaaggtaagcagttgatattcactgcttacccagtctacgagtctttttctttaagaatgcaaataaaatgcaaaagcctacagatatcaaattattaagcaggttgcctttgtgtattccatcttctagcaaaattcccctgtggcccaaaagactctgggcccccggaaagggggtgtaggcactggaagaagtgggcagtaagaacaggaggagtaatgacacaaccgtccttgccacgaggagtcaggacacagccacccttgccaggattgggaaaaacgggaacctctacaaaggcagtgcagggaagcagggaagcagagagcagaggcagaagacctggcttcctgttccacatctgccacttcttgctcactctgggaaagtcatattggtgcccaagcctcagtttctccatcagcaaaatggaagcaatgcctacttcacagattgtcgtgagcatctagtgagcagtgtctgtgatcaagtctgacccacagcacgtgaccaataagtgttcattgactgggaatgtgcaacttatcataycccagcaaggtcaggaaagcactccagggaatacttgttcctatgaggaatatgtacgacctgtagcccccataaatctgacatctgaacaaaatgctgctagtaagacattaaaactgtcagagaacatgtgcaggtaggccaattaagaaaaataaaatctgggattactgcttttgttgatttctggaggcacaggtggggagcagcataactgaattactctgaaaaaatcagtcattatttacttggcagacatatgtgtccacaacccaagtgacattctgggatatccattagaggcactggcataggaatatgaatgtccagtgrctgtagaatgaatgaacgaacagtcaatcacttgtgaattgaatgactcatagctctagtggcattataatttattattaataacaagctacagatttcatacatatgcattcatttaatatttttcacagacaagataagtgttacatgctctggggatacggtttctgaagcccagaatcatgacagcaagtcccagatgagaaggacaggaaaaaaactatatatatatatatatatatatatatatatatatatatatatatatatatatatatatatatgcacacacacatagcagcacacaaaccatctgaacaaggaggtctatctcctggttaccttttgcatttcagatttatatttaattgttctaaaagcaggttttctggcactatatatcaagttttctccaagtcactaagggaygaaatttgctaagcgactaaaccttggaaagmacackcatttttaaaatgccatcttcatgcagttcacccagtggccactagtggcctctaagaggccttgtatccgcggttaccaatctgcggatgatgactttggctccaggaacaccagcmccaagttaaaytcttgtctccatttttttcagtggccactcttccagttagcaagctgctcttgtaatactgactgagaaatgcagagaggcaagaagaggaaaaggggggaaatggcggstttttcatttctaatagttctgtagcagtgagtcctgcccatyactgygtgtgatatayacagtgttctaaggtatactgagtgtatataacgcccttaagtcatggctttggtaacatttggttaagaattattttggtaaaatctrtattttaaaatgtataaactcatgtaagtttcctctcatacacaccatgatattcaagaaaaaraaatgaaatatttgaggtaggcacggaaatcccagaggtgggaccagccattcagtggtagcgtttgacatctttgcatgattttaggcatctttaatgtcaccctttgaattcagttgtagccaggaaaggtactgagacgatctcctcagatttggatttgtatcaatttctaatagactgttctgcaggcttagttggtgtttctgaaaaatctctccactgccttcctggtctgaaaggttatgtgtagctggaaatgtaatattccagaagaaaccttatgttgttggtctgctttggctctatattgttaacaataggcgaccatttgtagcagtaattggaatcatttaacagttctattgtattgaattaaaactggaaagcaagcctggccctatttaaaaactgggttctagtagtttttcaggctaatggggtcttatrcctttctaagaatctcctccatcccaccactccttgtcagaattaaatcaaccaattaatgataaacctcctctttgtgcagagtaaacctctctggattgaaggttactgagagactaagaggcattcagtgtatgactgagaaatgctattgtccagcagcagttcctcctttcattcagttcctggaaaaatatacactggttttcacatatgtgtcaggagctgctccaggctgtcccttgggacatgaagttgagtaagttagtccctggcctcaagaaactctcagtgtagaagacaaaataaataaaagatcattgcaattcagtgtrataaagactgtgactgtgatttatgcaaattgcagtgaaataacagaaatcaatgtctagcrgtgtggtggagtggggaagaggatgaggagggcttcctgatgcaaggatattggagccgagacttagaggatgagtatgagtgttcctgacaggcaagcgcrtggaaaagtgtttgcagtagagggaacagtatattgcaagtgaggagggactaaaagatgaaagagaagatataagcctgggaaargatggcaggcatcacaccataccaggccttggggatcttgctttcctcctgcagataatgsgggacttgagaaggattctaattagcagaaatacataatcagaattatgctttacaaagtggtagggagggctgggcacggtggctcatgcttgtaaccccagcactttgggaggccgaggtgggcagatcaccagatcaggagttcgagaccagcctggccaacatggtgaaaccctgtctctactaaaaatacaaaaattagcctggkgtggtggtgggcgcctgtaatcccagctactcgggaggctgaggcaggagaatcgcttgaacctgggaggtggaggttgcagtgagccgagattgtgccattgcactccagcctgggcgacaagaccaagactctgtttcaaaaaaaaaaaaaaaaaaaagtgtaaggagaaaatggagaacaggagatatgtttggaagctgtagagatactccaggctagaagaggaatagaccagagggrttttagcccctggaggtatggggctcatttctcttgttscagcttcctctgagcacctgagcaatccttcaacattataggttccaggatgtattaataacaacactttataaattaagccacttaagaaaatgcttttaatcattctaattaaggacatgttaaaattctgggtacccaaaagaaatgtgagaaagagttatttttcctgtttttttttaaataaataaaccagtttctcatggatagcatttatgcttatagttcaataayaatattaccaaaaattgcatggagaattcagttcactagggaattcctagtatataaacctaaacatttaacttatttcaagatcccatctgtgacaggtataatcattctctgaagaatattttacaacctagggagacaataatttacattttgttcatattagasaaaaagyaggaggacagggaggcagttgctcctccggagatttttttcttttctttaacagtccattttccgatatgtttggaattaggctaaattgtgttaggtagacagtttgaaagctgtcactttgaaagagcgagctgccaagtttctagctacmgtatttaaaaaaaaaaaaaaaaaaaaggcggcttagcaatgarctgttccattttgccaggaactaggcttggacaggggaagcaaattcatttcctgtttgtggcaaacggagtctggatgatgataagactttttccatctaaactgccttgtkaacccagtaaacaaagcaaaaatcaatatgctagattcatcaatgcttgctggaacacactccatggcaagggacatttcctaggcaaaatggacaatggaatgaacaatgatatttttatgtctatgttcatattttatacagtcatcttcagagtctttgatactatcagctgttataagaaccaaatacttggttgacctgtgtgtggctgactcatgggcaatgaaataaattttgttgaatcagtggtattggggacctcacctctatccccaatactttggacaacccattaagcttsctcatgtcttttccatttgactacagtctggaacattatttctttaaactctcaacctctctgtgtagcttttaatcttccccttcttagccaagttttattttttttttatgaaatgtctttctttgtttaaatcattttaagacagactttttttgtttttgttttgagacggagtccggctctgtcgccaggctggagtgcagtggcgcgatctcggctcactgcaagctccacctcccrggttcaagcggttctcctgcctcagcctcccgagtagctgggactacaggcgcccaccaccactcccggctaattttttktwtttttagtagagacwgggtttcaccgtgttagccaggatggtctcgatctcctgatctcgtgatctgcccctctcgcctyccaaagtactggaattacaggcatgagccaccgcgcccggcccccaagacgcacttttaagagattatacaggaaagttttacttatcactgccttagtttttccccacttatagtaccactgtgattttatgtttttcctgaggcattggcttgttgaagtkatattgcaacagagaatcaaaagatcacttagaaaaagtaacatgttagaaaacatcatgcttagaattaaatgtctaaagtataccagtatagatgatataatttaaaacaaytgataytatcagctgtcataagaaccaaatacttggttgacctgtgggtggctgactcatgggcaatgaaataaattttgttttatacgtataactttatatatatgtaactttatatatatawaaaaagtttgcttatatataatatatatacacatatcatatataaatatattgtttataatatgtaaacaatatatacataaataatatataaaaastatatattatatatgtaaacaatatatttttaaaamccaaactcatgggtttatagttttttcatagtgaaaacaaacaaatatatagtttgcttatatctattatatataaacagtatataatatataaagatataaataatatataatatataaatatatatttgtaatatattatttgtttatatccatcatataatataaacacatgtaatatatataatttatatgaacaatatataatatataaacaatatatgtttttatatattatatgtaaacaatatatgtttttatatattatatataaacatatatattcatgatatatatgtatgtttgtttacactatggaaaaactataaacccatgagctggggttttgtctttttttttttgacttaggttttctattctcaaaggcattaatcagcaccctttttctcacccttygttatcaacatataagcaggctagraagacagtattttattccratgtgaaacaaaactgctgatctggagktcttatgttataaattcccacatcataccttcaactatatatatgtcctgaaactagcatattttgagaataaaatggkaaatgacatttaaaggacacctatggttaatcctacagtaaatgagataatttattttgaaatgaatgatcaactctacgctccaaattttcacgtaaaaggtgttcaggtgaaaggaggcatatttgctgtggcatttctgcacactgccccaggcactatagcaagataattaagacatggtccagtcttcaaggggattacaatcccatggctaaaaaatcacctatataaagataatacaaagagacratgatacttttttttttttaaaaagaagacagatgtttcctgcgaatcaagaggagaaatgctttctatttacctgtggaaattcaaagcaagcctgtctgctcagaagayaaggagtataaaatggcatgcttccctgggaaggctggaaggccactgctaaaaagcttcccagggacmttctttaccttgtgacttccattgctcagattccagcctcrcaccatgccttctcagatacctgactacttaatgattggtcctaagggccaatccaaatgctcagtgctattatgattattattgccatcaatttctgagcatttaccatgtaccaggccctaggatagagcactcggtgcattttctcatttaatcctcacaccaacttcattttgcagatgagaaaactgaggcacaggacatttatgtaacttgccaaggtcacaaagacagtacgtgagagttgggatttgggttcaggcagcctagctccacagtctatgctcttactatgctcttctacttctcttaataataataacaacaacaataataataaacatttattaagaatgtacttgstgtcagccactctataagataggtacttcattcccatattaaagataagaaaactgaggctcagakagattaaataacttttctgaggctgcacaatwagtaagtagtgaagcatttccaaaaacatattctgaaaaatgcagatctccaaagaaaaaagtttccatagtcatttacrtttggaaaccattgcccctctgagatatctgtggtatacatcagcatattaaagtctcacatgaatgcttcagtaaagaatcctgatcagctttggttaggcyagcattttccacactggtttaaacatggagctctaattcttccaatacctgtcaatatcccataaaactagcactatgccatgatggactgactctaaccagtctcactagacattaaccaggtacactaggctaggaggtaaagctggaaagccaggttttcatttgcaatgagaactaggatggatgagacataccaatgataccaaagaaatactcgaatatttctccgtctccagccttactttgccttgtaggtagagctgcttgggaagccaaggcaggactcatttcagggacacattatcatgcagggagggagggtaggaatagagaaggcaaatccaggagtaccagaggagcagtgccttgaacccctacatgcaggctaaactcacgtggcccctcacccagaacactgcaacagcttcttaactgggttcagcttccagctttgccccttccaatcccttttccactctgccaccagaagcagtttcaatatatatataaatctaatcatgtcagtttgctgtttcagattcttcactggatccaccatgcaattaaaacccaaactccttcgcatggtctccaaggctcgtgtgatgagcaggctcctccttactcttccaccgtggctcccactagtacatttcagccaaccatcatctttcaatttcttaagcaactatgcactctcttgcctcagtcttcacctatccttctttctcygcctgaagcattcctctccacccccctttccacatggacaactgactcctcttttgctcactgcttatgtctcacttccttcagagaaattccttattttctaccccctaaatgtgggttaggggctcctccctgatactcccctcagttctctttacttcctttgtcagagatgtctgacactgtgtcataattatctgtccacattttagcatctactgctgtgcgtttacttagttagtagttattagacagttgcctaatcaacatttatacccatgtcttgagtggcaacataaaatagcacacttataacattcccagaggacaagaagctagggagaatattaaatatattaaatgcatacttaggggttaaaatgatcttaagagcatgggacagtgagccaaattcaataagaagaaatttaacccatgcaaagtcttaatatcgaactaaacagaagaaaacaattgcacaaataaatatagccaaatagcaacatgagtgggtgacttgtaggggcctcaactgaattttgatccattgttgctagaaataacattagaatgtgttttaagggaggctgaggcagggggattacctgaggtcaggagttcaagaccagcctgaccaatatagtgaaaccccatctctactaaaacaaaaacaaaaacaaamaaattagccaggcatggtggtgtgagcctgtagtcttagcaacttgagaggctgagacatgagaattgcttgaacccgggaggcagaagttgcagtgagctgaaattgcaccactgaactccagcctgagcaacagagcaggactctgyctcaaaaaaaaaaaaaaaaaaaaaaaagaatgtgttttaagggttttgctttatcagatgcataatataaatcaacagtgagttaagagtatccaagacactgacaatatcttgatktgaaataatagactgtttattttaaaagatgtaatggtctcttttttttttttttacagaaaaaccacaactagagtaatgtacttaattccagaaaataacacttcaaaagagaaattgacaaagtggaaaatattccaaaacagagcgttggataaaagttctagaaataacttcttaaaaacagttaaataggctggatgtgatggctcacgcctataatcttagcactttggaaagccaagccggcggatcacctgaggtcaggagttcaagaccagcctggccaacatggtgaaaccccgtctctattaaattttttaaaaatacaaaaattagcggggyatggtggtgagtgcctgcaatcccagctactcaggaggatgaggtggggaggattgcttgaacccaggaggcagaggttgcagtgagccgagatcgcgccactgcactccagtctgggtaacagagcaagactctgtttcaaacaagcaaacagttaaataaatgaagaatgttttactcagaaaaaaaaaaaatcctatgagcagtctttaaatacctagagagtgccagctaaaatgaataagaggacttattctatatttatctagaagtcagaacgaggacccatggttagaaaaattacaaggaagcagatgtcagtttatcttaagagaagttttcaaataattagagttgtttaaaaatggactgtttgccctatgaaaaaatgagttccctgttcaaatggaagctagaagcccaagtagtagggctctcatgaaaatgtttcatgcagggtatagtagttctaccagatggctgagaaaatgctattgctgttctgtgagattctgtaaggatgtaatatcagtatattccttccattggtgctggtaaacggagaactgatgaaacccatttctaaggactttggtgtttagctatttttaaaaaaaaaaytttaaagcccctgtgctaagaaagaggaccagaggagttgattgctaagctccttttcaacaggaacatttgtgctcctccagctcattcttgggctggtttatcacggrgattgtggtcttaataagaccagaggacttaggagaaaggcagcttggaatagagaggtctagagaattaaacatctttagctcacagcataatgsaaagaaagtgcccttcaggggaacatgtatacaacagggttctgagaagaggtaaaaataaaactgcatcctgcactttctgcttgccgtaatgctgcagtcagggtaacccggggagcaccacgccctgtgaaatggctgtcacagtttaggggcagtgagccacagtaagcctaggacccactatgtgccaggcatagtgccagacccactgcaccgttatctcattgagccttcatagaccttctcagggtattagtatcctcattttaaaataagaaaattcagattctgaaaggtaaagtaccttaacgcagtaattttgacacctgagattcaaactcaggattgcctgaactttgaattgctcagcagtgtttcaggaactcctggactttaggaccgaagaggatcttaaagagcccaacttcttggttttgactatggaacacaatggggtccaaagggaccaggcatcctgcacaggatttatgtgtggaggtaaaggaagccattcgactatggcaggagatgccccggcatgggtacaagctcagcaactgtgctttctgcgcacatggtgcttatagccatgaaggcaaatcatgcatcaggcaggggcagggagggggagggcaagaggccagggcacccctgccgacccttctaccctcccaccccaccttctccccaataactctttacaatgccaaatgcacatgcagaaaccagtctctagactagatcttctaaagtacagtgaggacagggagttaggatgacccccactttcagtcatcattcatagaggggaaggggaaaagggcaggaagagagctgactttcatgtgtcagaccctttgctaaatgcttgcatacgtgtcatctcatgccgtctcctgtcacattcctgtaagaagtggaacatgttaggctatgaaatgaatattagtgtctccattctatgatgaagaaatgaatttaagtcacacatacaaagttagacaactaagaaacatgtgatttacgtttacactcctgatgccacaaatcaaaagaaaaacctgtgaatgttggcatcagacagtccaggttttgacttttgaactggcccattagtagctaaggaaagctgaggatagtttctgtgtcactgaaaacaatcacacttayctcatggaaatcttagtgtcctttctccagacctgctccctctctttcctgcatttgagggatgagatctacttttagaattacagagggaggaggcatttgaccctttttgaggtaaaaggagaattttagattaatggctaactttgtccttcgaatgtccccttgaggctttgtcagatttgattccttcctttggaaagataagaaaattgaagtggctattccctgcttctgcctggttagtcacagagtgaggcagtgacatgatgggaagcttctaacataacgaaaactagcgtgagactgagaacctgaagacttcaactctggccctagcttctctgtatttggatctcccagacaggcatccatctatcccacagtgagtgccttgtggtctgaaacgagatcaaaggtggaaaaagctttaaaaagctctcttcaaaaacaagaatgtcacaagaggctgactctcgagactgtgttcccctacccctgcctcctacagagtttcattcagcagaccttgctacctgccttcttcagggaaaataatcttgtttttgagtttatgtttaaactaaagttagttgattattttcttcaacccttgtttttcttgttcatagagtttcttaatgtcacgagcgttcacctgttcaaggagagatgggacactaamaaggtggaccaccacactgacaagtatgaaaacaacaagctgattgtcygcagagggcagtctttctatgtgcagattgacytcagtcgtccatatgaccccagaagggatctcttcagggtggaatacgtcattggtgagtgccatgtgcaagctccagtcttgacaccatgggttgcattgtagagagaggtgggtacaggcacagttgtgtgatttcctagtgtcatatgtcaacagtgkcaggagctggaatgacatscagcccctgaattaccctgtgctctaagactggtctgtatagtgccaaatattgataacttgggcccacccaaggagaaaatctcatataaataaaagtaaaactggtataatgtgttgcttaactaaattattcttcctcaaacaaatggttttggcatcctatgattctaacttttatctccatgatttaattggtctcgtgctgaaaatgtttgtaaatcttagcatgcaatccaagtatgcattccgaaagttgattctgctctgatctagtcccatgggatggcccgtgaaaaatatagtccaataaacttcactaaacactttgtactttaatcacccttttttttttttttttttttgagacagagtcttgctctgttgcccaggctggaacagtggtgtgatctcagctcactgcaacctcttcctcctaggttcaagcgattctggtgcctcagcctccagagtagctgggaccacagttgcacaccaytacgcccagctaattttatgtatttttggtagaggcagagtttcaccatgttgtccaggctggtttcgcactcctaacctcaagttatccacccacctcagcttcccaaagtgctgggattgcaggcatgagacaccatgcccagcctttaacctcctcttgaagattaacgatgcacattagcttcaaaggtctggggaaggaccatttaactttggtctggtgcttcttaaattaatttgatcatggaacccttttattaagttatagctattaacttttgacacattttggtaaacatttctataggaatttataagattatcaaggaaatacatgcacagagaagcaggggtggcacaacataggaaatctgcccatataatcctatgcacaaattaaaggaaaaaattaggcaatcaaatcagyagtcacagaaaggtacatggtaaaattcagcatccagttttaggaagagtttaaggggaaaaatttagaaaaaaaacacctcaatgataataaagattgcttacatcaaaacaacaacttttgatatctaagtggaaaaaagttaacaaatttcactgtaatcagaaattagaaagaaatgcctgctatcatcattccctttttaaaaagaagtactttaaaggytttagtaaatgaacaatgtaagagatacatctgctataaatgctggaaactaagaagtaaaactatatatttgctaatactatgattgtgtatgtagaaaacccaacagattcaagggaaaaaagcactgtattaataaaactttgtaagttggctagatagaagataaatatataaaaatcaataacttttatcttccccagcactaagcacccagaaatagacataaaaaaatttcacatgaccaaaactataaaatgtaggactaaaacctgaacacgcaacctatataaaccagctattaaatcttaataaaaaacatgagaaaccaatgaaaagtcaaacatgttcttgagtgggaagtctttctgtatacatttttagtctcccaaggggttggtcaaagaatacaaaatttcagttagatggaaggaatgagttttagtgacctattccacagcatggtgactatagttaataataatgtatatttccaaattactaaaagagtagattttaaatattctcaccacaaagaaatggtatgtgaaggaatgaatatgttaattagcttgaattaatcaatccacaatgtatattttgatcaaaacatcacatattgatcaaaacatcacatcccaaaaccccataaacatatacaattatgattgtcaatttttaaaagcctcccaaaattaatatgtaaatttaatgcatttccaattagaatcccagtggagttttgagttgtctttggctttggttttggttttttggacttgtataaaataatcttaaagttcatttgaaataataattacctggtgataaccaaggaaatcatacaaagaaataataagtaagagtattttctttctgaagcggctatcagaacatactatgaaaaatatttagtaggacataatagagaatccagaaatggatttcagtatatgagttaatatgattgttggtttcatgaagtaagaagaccatatgagattttawctgtttgcttgtttgtttttacataaatgatgcagaaataactgactctccractggaagaaagtttaaaaattgaccctcatcttrtcccatatacagtagtaaatctcagatggaatgagtattaatgtaaaaaagacaattttttgaggaaatttaacagacttaactaaaaactggaaactctgacactgtagaagaaagcaagaaccatgtacagttatgtgccacatagcaacatttcagtcaatgacagatyatgcataggtgatcttatgagattctgatggagctgaaaaattcctgttacatagtgatgtcatagctatcataatagaatagtgagattacttatttttttaaatgtactgtagcctaagtttatagtgtttataaagtctacagtagcatgcagtaatgacctaggccttcgcattcactcaccactcacccagggctacttctggtcctgcacgttccattcatggtaagtgtcctatgcaggtgtaccattttttacttttyatattgtatttttactgtactttttctatgtttatatataaatgtttctatgtttatatataaatacttaccattgtgttacaattgcctgcagtgctgtattcagtacagtaaaacacactatgagtctgtaacctaacagcagtaggctctgccatatagcctaggtgtgtagtgggctgtaccatctttgtttctatgatgttcacacaatgacaaaatcacctgcctaacaacatattacatcccgtgcatgacaacaaattcacgtttgaagctctggaccacagttctgctgcaattatgagggaagttttatctccatctttaaagccaaatatttagggtggggagaagaggagagggaagcttcaattctgaattggacttgtctgaggtttgaaacactctcataggccgttcagaaaataattatgataatggaagtcttagaaaaactggtaagatgaatgtcttagatcgggttactaggaaataaactctgagaagaagacttgtgcgcagaaagtttactggggagatctctcaggatcaacatctgcaagggagtggaggaatcactgttggacagagggaggagttgaactgcagtgcagacagggcccccgtggatctcaaggtgaactctagctatgggttggatcttcagagttgtctcgccttgagccaagggcatgggcctgttataccttttataccttgactggggttacagccttggtgtaattggttctctgtggctgagggtaacccctgaaagcaactaaatgaatgagaattgtcagccaccaacactcccaacaatgggaaaggtccaggcagcccaccacagcatccattacagtgaacattttaagtcctcttttcttttttacacaagaaatactattacttttgttccctcaataaaagagggggaaaagcatagctaatttgtttttgagataaaatctgtatatttttaaaccaacatgtattctaaacctttcagaacccatgatgtgtgcgttcagagttaagctgtattctagtatgtgtgggccattacagggccacatgtatttgaagattttctattataggtcacacacatttgaagatgtttcattgcccaacctgttgtagatacaagaaaggcaagtgacaaaattccacactctactatttagtgtagaaattaagcacacttcgaggggcgtggaaggacccatggtagaggatttatcttgatcagagtcatttctgcatctcacatcaytcaggaagttacatgagagcctcaacttcatggctgccatagttgtaagacaggaagaaaaaagaacattgctggggaaataattmtcttaaaattcagtgcctgtttcaataggactgaataaagccaaggaaattagattttaaggctaattgctataatgagaagagacaagtatagaacgtgaactagaaatgaaattaagtgcaaaggtttctatatacaggtgcacctcaatttccagaaactcagaaggtaaaagtgatggtttaaaaacgaaaaagaatataatttctattcatttttaaaaatctggcaacaccatttcaagagaagatccattttagctaacgttttacaatcagctaaatgtctaaacatttgagatatcatttactattaaaagtgaaccaaaatgtaacataaattaaaaaaaaaaacagacgagaataaatactttgttaaaaataaagggcacttaaaagaatctcggggggaggagccaagatggccgaataggaacagctcaggtctacagctcccagcctgagcgacccagaagacagtgatttctgcatttccatctgaggtatggggttcatctcactagggagtgccgcacagtgggcacaagtcagtgggtgcgtgcactgtgcgcgagcygaagcagggcgaggcattgcctcactcaggaagtgcaaggggtcagggagttccctttccgagtcaaagaaaggggtgacggacggcacctggaaaatggggtcactcccaccccaatactgcacttttccgacaggcttaaaaaacggcgcatcaggagattatatcccgcacctggatcagagggtcctacgcccacggagtctcgctgattgctggcacagcagtctgagatcaaactgcaaggcggcagagaggctgggggaggggcgcccgccattgcccaggcttgcttactgaaacaaagcagcctggaagctcgaactgggtggagcccaccacagctcaaggaggccagcctgcctctgtaggctccacctcagggcacagacaaacaaaaagacagcagtaacctctgcasacttaaatgtccctgtctgacagctttgaagagagcagtggttctcccagcacacagctggagatctgagaacaggcagactgcctcctcaagtgggtccctgacccctgacccccaagcagcctaactgggaggcaccccccagcaggggcacactgacacttcacacggcagggtactccaacagacctgcagctgagtgtcctgtctgttagaaggaaaactgacaaacagaaaggacatccacaccaaaaacccatctgtacatcaccatcatcaaagaccaaaagtagataaaaccacaaagatggggaaaaaacagaacagaaaaactggaaactctaaaaagcagaccgcctctcctcctccaaagaaatgaagttcctcaccagcaacggaacaaagctggatggagaatgactttgacgagctgagagaagaaggcttcagacgatcaaattactctgagctacgggaggacattcaaaccaaaggcaaagaagttgaaaactttgaaaaaaatttagaagaatgtataactagaataaccaatacagagaagtgcttaaaggagctgatggagctgaaaagcaaggctcgagaactacgtgaagaatgcagaagcctcaggagccgatgcgatcaactggaagaaagggtatcagcgatggaagatgaaatgaacgaaatgaagtgagaagggaagtttagagaaaaaagaataaaaagaaatgagcaaagcctctaagaaatatgggactatgtgaaaagaccaaatctacgtctgattggtgtacctgaaagtgatggggagaatggaaccaagttggaaaacactctgcaggatattatccaggagaacttccccaatctagcaaggcaggccaacgttcagattcaggaaatacagagaacgccacaaagatactcctcgagaagagcaactccaagacacataattgtcagattcaccaaagttgaaatgaaggaaaaaatgttaagggcagccagagagaaaggttgggttaccctcaaagggaagcccatcagactaacagcggatctctcggcagaaaccctacaagccagaagagagtgggggccaatattcaacattcttaaagaaaagaattttcaaccccgaatttcatatccagccaaactaagcttcataagtgaaggagaaataaaatackttacagacaagcaaatgctaagagattttgtcaccaccaggcctgccctaaaagagctcctgaaggaagcgctaaacatggaaaggaacaaccrgtaccagccactgcaaaatcatgccaaaatgtaaagaccatcaagactaggaagaaactccatcaactaatgagcaaaatcaccagctaacatcataatgacaggatcaaattcacacataacaatattaactttgaatgtaaatggactaaatgctccaattaaaagacacagactggcaaattggataaagagtcaagacccatcagtgtgctgtattcaggaaacccatctcacatgcagagacacacataggctcaagataaaaggatggaggaagatctaccaagcaaatggaaaacaaaaaaaagcaggggttgcaatcctagtctctgataaaacagacttcaaaccaacaaagatcaaaagagacaaagaaggccattacataatggtaaagggatcaattcaacaagaagagctaactctcctaaatttatatgcacccaatacaggagcaccaagattcataaagcaagtcctgagtgacctacaaagagacttagactcccacacattaataatgggaggctttaacaccccactgtcaacattagacagatcaacgagacagaaagtcaacaaggatacccaggaattgaactcagctctgcaccaagcggacctaatagacatctacagaactctccaccccaaatcaacagaatatacatttttttcagcaccacaccacacctattccaaaattgaccacatactgggaagtaaagctctcctcagcaaatgtaaaagaacagaaattataacaaactatctctcagaccacagtgcaatcaaactagaactcaggattaagaatctcactcaaaacggctcaactacatggaaactgaacaacttgcccctgaatgactactggatacataatgaaatgaaggcagaaataaagatgttctttgaaaccaacgagaacaaagacacaacacaccagaatctcagggacgcattcaaagcagtgtgtagagggaaatttatagcactaaatgcccacaagagaaagcaggaaagatccaaaattgacaccctaacatcacaattaaaggaactagaaaagcaagagcaaacacattcaaaagctagcagaaggcaagaaataactaaaatcagagcagaactgaaggaaatagagacacaaaaaacccttcaaaaaattaatgaatccaggagctggttttttgaaaggatcaacaaaattgatagaccgctaacaagactaataaagaaaaaaagagagaagaatcaaatagacacaataaaaaatgataaaggggatatcaccaccgatcccacagaaatacaaactaccatcagagaatactacaaacacctctatgcaaataaactagaaaatctagaagaaatggataaatttctggacacatacactctcccaagactaaaccaggaagaagttgaatctctgaatagaccaataacaggatctgaaattgtggcaatgatcaatagcttaccaaccaaaaagagtccaggaccagatggattcacagccaaattctaccagaggtacaaggaggaactggtaccattccttctgaaactattccaatcaatagaaaaagagggaatcctccctaagtcatttcatgaggccagcatcatcctgataccaaagccgggcagagacacaaccaaaaaagagaattttagaccaatatctttgatgaacattgatgcaaaaatcctcagtaaaatactggcaaaccgaatccagcagcacatcaaaaagcttatccaccatgatcaagtgggcttcatccctgggatgcaaggctggttcaatatacgcaaatcaataaatgtaatccagcatataaacagaaccaaagacaaaaaccacatgattatctcaatagatgcagaaaaggcctttgacaaaattcaacaacscttcatgctaaaaactctcaataaattaggtattgatgggatgtatttcaaaataataagagctatctatgacaaacccacagccaatatcatactgaatgggccaaaactggaagcattccctttgaaaactggcacaagacagggatgccctctctcaccactcctattcaacatagtgttggaagttctggccagggcaattaggcagragaaggaaataaagggtattcaattaggagaagaggaagtcaaattgtccctgtttgcagacgacatgattgtatatctagaaaaccccattgtctcagcccaaaagctccttaagctgataagcaacttcagcaaagtctcaggatacaaaatcaatgtacaaaaatcacaagcattcttatacaccagcaacagacaaacagagagccaaatcatgagtgaattcccattcacaattgcttcaaagagaataaaatacctaggaatccaacttacaagggatgtgaaggacctcttcaaggagaactacaaaccactgctcaaggaaataaaagaggatacaaacaaatggaagaacattccatgctcatgggtaggaagaatcaatatcgtgaaaatggccatactgcccaaggtaatttacagattcaatgccatccccatcaagctaccagtgactttcttcacagaattggaaaaaactactttaaagttcacatggaaccaaaaaagagcccgcattgccaaatcaatcctaagccaaaagaacaaagctggaggcatcacactacctgacttcaaactatactacaaggctacagtaaccaaaacagcatagtactggtaccaaaacagagatatagatcaatggaacagaacagagccctcagaaataatgccacatatctacaactatctgatctttgacaaacctgagaaaaacaagcaatggggaaaggattccctatttaataaatggtgctgggaaaactggctagccatatgtagaaagctgaaattggatcccttccttacagcttatacaaaaatcaattcaagatggattaaagacttaaacgttagacctaaaaccataaaaaccctagaagaaaacctaggcattaccattcaggacataggcatgggcaaggacttcatgtctaaaacaccaaaagcaatggcaacaaaagccaaaattgacaaatgggatctaattaaactcaagagcttctgcacagcaaaagaaactaccatcagagtgaacaggcaacctacagaatgggagaaaatttttgcaacctactcatctgacaaagggctaatatccagaatctacaatgaactcaaacaaatttacaagaaaaaaacaaacaaccccatcaaaaagtgggcgaaggatatgaacagacacttctcaaaagaagacatttatgcagccaaaaaacacatgaaaaaatgctcaccatcactggccatcagagaaatgcaaatcaaaaccacaatgagatgccatctcacaccagttagaatggcaatcattaaaaagtcaggaaacaacaggtgctggagaggatgtggagaaataggaacaattttacactgttggtgggactgtaaactagttcaaccattgtggaagtcagtgtggcaattcctcagagatctagaactagaaataccatttgacccagccatcccattactgggtatatacccaaaggactataaatcatgctgctataaagacacatgcacacgtatgtttattgcggcattattcacaatagcaaagacttggaaccaacccaaatatccaacaatgatagactggattaagaaaatgtggcacatatacaccatggaatactatgcagccataaaaaaggatgagttcatgtcctttgtagggacatggatgaaattggaaatcatcattctcagtaaactatcgcaagaacaaaaaaccaaacaccgcatattctcactcacaggtgggaattgaacaatgagaacacatggacacaggaaggggaacatcacactctggggcctgttgtggggtggggggaggggggagggatagcattgggagatatacctaatgctggatgacgagttagtgggtgcagcgcaccaccatggcacatgtatacacatgtaactaacctgcacattgtgcacatgtaccctaaaacttaaagtattataataataaataaataaatttttaaaaaaagactaaaaaaaaaagaatctctaccagtacatctttaagagtgtttataacaagagacttaccaacaaagattgacttactgtcactcactatattagtcagtgttctcttgagggacagacctaataggatatatatatgtgtgtgtgtgtgtttgtacatatacgtgtgtgtatatatatatatgtgtgtgtgtgtgtgtgagtgttgtgtgtatatacatataaaggggagtttatttaagtattaatttatatggtcacaaggtcccacaataggctgtctgcaagctgaggagcaatgagagccagtccaagtcccaaaactgaagaacttggagtctgatgttcaaaggcaggaagcatccagcatgggagaaagatgtaggctgggaggctaggcccatctctccttttcaagttttkctgcctgctttatattcactggaagctgattagcttgtgcccaccagattaagggtggatctgccttccccagcccactgactcaaatgttaatctcttttggcaacacctaggattaatactttgtatccttccatccaatcaagttgacagtattaaccatcacactcactatatacttaaaaaaactttttttttaggttcgggggtaaatgtgcaggtttgttatataggtaaaaacatagctgtttcataaagcaagctattattatatttaaaatacagaaaaaataactttatacttagttgcttccaatttgcattcagtttttttgttgaggttgctctctcattccctgtgcctgtatagatgagctgagatatgttagtacactggagtttccctatgttgctgttctcagaacctaggtcatgggatttatttatgtgattctgccttctaaccaatttccttctctccctccctccctccctccctccctccctccctccctccctctctctctcactccctccattccttccttcctccctcccttcctcccttcctcccttctttccttcttccttctttctttctaaatatttaaataaatagggctcttggatggtgtgctgggctctgagtagagaaggtgagcaggagagctactgccttacctggccacggcttgatgagctgtgctgcaggggttctttgtgctttgataactgcgttcatgagttgctggcagagcacagctatctctgtgttaggtgggaggtgttaatgaatctgaggaggtgggtgtggctgaaaaatgccctgggagtctgcagggccttctctctctctcacctctgagcctgcagcctcgacaaatcatgaaaggcaaggaggggagtggtaatcacaggttttactaacctgtggctgagrctgtgaaagcttgggagcagcttctggtgttaatttgctgttactttgacatgggcccctgcttttttgatacccagttgagggtgaaatcccaagctgtatttcttaccaggtctccccctcaaaacggcagaggtttcactccctgaggagccctccgaagtgacagtagggtccatgagcaagtttctttctccctggagttcaaccacaggaacctgggggtgtccaggtcagcgctttggagattctcctgacctttccctcaattctatgatggccctcacagattcaagcttcacatttctggttacagcagaaagatgaggagaaggatggcattagcatgccccaccccacttatcaggaaaacaaaagctttcccaggcacttctggcaatcgtttatgtttcatttgctacccttagctgtaaggcaagctgtgaaagtattccctttttccagtctcttcagaggagagggatggggcagagctgaaagtgggtgctggtggacccgcagtcatgtgtgctgggcatcccccctagctgggccatcctgtgagtataaaagtgctgtcctaatgctggcagccttgaggcaggttgttcatcacccgctcaagcatttctaggactgggtcaactgcacatgttctgcatcacaaaccctataaaacatggaaatgtcatcagcaacactttaatatctttctttcacttatttcttgagtagcatttatggaaagccagcggcggtgttggatggtgttttcagggtgggagtgacatggatgattctcatttgagatagcttgctctggcccacttcagggaatcagggtaattcaggataggagaggagatgatcagaagagagaggatgagaaccggggttatggctgcagttgtagacatggacaggagtgacagggtttgagaaatayttaggaggcaaaatctgcaggayttgtgttggggagtctgtgaggggtggaagggaggagggtcaaggtcracttccaggtggctggcttatgtgactatgatgacagatgctagcacttccaaatgagataaagaatgcctggaattccagaggraaaaaatcgagtgtggaaaatgctaatggaggtagtagcttcattgataactcattggcactgktgctgtgcagaggtgctgtatgcctcccatttaattgttcaagcagccctctgggcattggactatggccatctccatttttcccatgagataatggttgaaaggattaagtaatttacccaggtcacacctggaaagtgctgggacctcaatttggacccaagcagcctcttctacttacaatgcttactacctccaccragggagcctccaccaaggagatggtggaggtatgaatatgcttctgtttgaattgatgagtgtgaattasttgagggactttcaggtaaacctgtccaatagayaatatgagtctgaagcttcrggaggaggtttgggttggacaggagataatttggatatcatacacacgtgggcaagctcactcagaaaaaggtaaatcaagtcagcagtggactgaggcttaagccctggggaaaacaacttctaaggcatcagtccagaaactagagcccctggaggagacaaagaccaaatgagcagataaacagaaggaaaataagggggttgcagtgtcactcaatccacgagagttgtgtgtttcaagaggaaagcatgaccaatgttattaaatataactaggagatgcagtgagataggaacttcccactggagtcaacagttgggggacactggttgaactcgggtagattccaaattttaatggtctaaaagtcaaggagatgtgaggaaatgggtgtagtcaatttggatgaatctttaaagaaatttgaaggagaggaaaagaaaatttgggtggtaactagagaggaatgtgggtgagaggaggggtgtttcaatttcagtatttgtttcaggattggagggactggaacatgtagcaggcagagagggaagaatcagtcaaggaagaattctgaagattcaggagggactggaggagaagcatagaggacaggggcacgggtgaggggctgagtaggaaggaaaattcctcatcttccaaggttgtcgagaaagaggtgaaggagggtatgactgccgtaggtggagaagtatgaactaagcctcatgcctgacaatctcaagttatttaaagatgtaggtggtgagcaggtgctatagggtcttagaggggcagatgagtacccttacatctgaaaacatcatccatatcctttaagactatgtcttcctatggattttgtttcagaaagtccaggtaaaatcatcatgctgatgtgtgattttcacatacataacatactttctctattgagaaatgtcttgccccaaactgtgcagcttgtaacgtgtagataactatttcttagcctrtactctttcaactattttgtgctgcattttggtgaaaatagacagcctatttcatcattttgaagcaacatttatatagaatgtcatttcagatttttgctcctatgggtttctgcattgatgatcaacgtgtttatttttaagcatctctgtgaagtgactaataatggcatctaagaaagtaggacagtgtttcccagagtgtrttctctatgaacacctgtcatgtgagattctccttgggggaaaaaagttccatcrtcaaatayagttggatcatgctgtgttttgtgtctcttctcatagaggcccaaggcacattaatatataaaaggctatgagtagacacgtagtcaaaaaatgaatcttgtttagcccaataattcccaaaattgttctactataaacactaccctaccacatttttatttttataataccattgaataaggtgcagaactcattccaggaaatgctgaactatagaggcatattacctctattccatacaacactgaggcaggtggctgacagaacttgaacagatttgtagtctatgtgttgtgataactttatatccattttttctttttgacacttaagattttgtgcaaacattgaaataactattaatttggcattcatatttagtaacttttcaaaaataattgttaagagtatgtttttatatttatttttcagatatttatttggcttctttcaaccataaagcctatttattttctttttgaatgtgcttattgaactcttatttaatactttgtatgtgcaaagcaccatattgggattagagtagtaagatatgttcatcccttgcctccagaggatttgttgtccagaggggacagtctgagtaggaaaggctgtgttcaatgccaaccttttgaacaaaatgcttagaagctactttggagggagtgactgatggcaagaatagttgaaagaatcctccagaaagtgctatttgaggcgggtctcaaaaaacgaatagaaattgacccaggggratggaaattgtatacattctagaaaaaaaaaaatagaaaagttcagtggagcatgacattttggaagcacactgatgtctttgtatgacttgataagaagtttagatgtaattctataaacagccagaagcctctgtagtagcattttaggtagagtattaagatctgatttttttctactttttagattactatagcagaagtgtggaagataaattggaggamcgagattttgttagggacattagtaagagactcaagggggaaaaaaatctcactaataaatgataggataaatggatgctgcatgagtttgtatgatttttcccctcctttttttcccccaaaggaacttatgtttacttctataactagaagtagtaaaatgtgtgtgtgcgtgtgtgtgtgtgtgtgtgtatttgcatagtaaaatgggactcacctgtagtgaagtaacacactgtggtctgaggactaacaatatgccccagtggctggccctctgccatttgtaggccatctcagggatgacagctcacgtgattaaagggctaaatgaagccctttttggtggggaaagaggsggcttggactcaaggcagtgcccagtcagaacccgagctccaccatggatagcagtgacagaatcactttaccccaccccccatcacattactgtttcctcacctgcaaataaggactatactatttattttaaacagccatttatgggttaaaggagataatgtataggaaaccacttttttattctcacaataaactgggaggcagggaaggtagaaataaaacttattaaaaacatggaaaccaatgttcacagggattaagtgatttaccccaggttgtgggcaaaggatctgagcaaacatttctcaaaagaagacaccaaaatggccaactggcttatggaagaatgctcaacacctctaatcatcagggaaacgcaaattaaaaccacaatgaggtgccacctcatacctgttagaatggttactaccaaagagaatgataacaagccttggcaagaatgcagggaatagagaaccctatacactattagtgggaatgtaaattaaggcagctgttttggaaagtcgtgtggcagttcctcacaaaactagcaatagaactaacgtgattcagcaatcccacttctgggtatgtatctaaagaaaattgaaatcaggatgttgaaaagatgtatgtagtctcatgttcatttcagcatcactcacaataaccaagatatgaaagcaacctaaccaatggataaagaaaatgtggtatatagacacaatggagtactatacagcccttagaagaaggaaaattctgccattctcaacaagggtagaactggagagcactatgctaactgaaataagccagrcacagaaagatgaatactgtatgatctcacttatatgtggaatctgaaaaagtcaatctcagaaacacagtagaaagttgtttaccagaggctggggcttgggggcaaggaatgaggaaaaagaagatgttgatcaatgggtacaaagtctcagttagactgaaagaataagttttagtgatctactgcatggcttggtgaccacagtttaaaataatgtattgtatatttcaaaattgctaaaagaatagatttttaatgtcttcaccacagttacctttcttttttccatgtacatagaaaagaaaggtaactatgtaaggtaataaacatgtgaattagctgattgaatctttctacaatgtatacatagatcaaaacttcacattgtatcccaatagattccccataagtgattgtctattttttaaaaaacatctacacacgcacaaagaaaatgcttccaaaagcaaataggagggcattgctctcatgtcttttgtctcctggtggcaaagacaaccatcactgaacctcccaacagaaatacccagtctccttgttacatccattctgacagcttcattagtcacataggggctctgacaatccacaggccaagttctgcctggaattatttgcccatagttctagctgaagtgacagaaacagtttaatctcaaagtaggtgggattgccatccatattttggtgccagagaccttaccatgtgcttcctcagccctgccctgtcacccacatcatgtctgcagagctggagtttcccagtgaagcttatggtccctagggtaatagagtcgctgatgtctttgtcacattaagggtgccacacagagcacttatgaagggccatgggtatcggaatgagaacactcagmacatccacaaacgcttcctccctgactgcctcctgtgctttctcccctctttcctattcccctaatttgccttcacccttgctcctatgtctgtttctctctgtcttcacacttgtatcttatgatgacctctttcacttacaagaattcataaaygtggctcatttgcacccacataattgaaactgtactccaccagaaagcgctggtctgaactcagggaggacggactgtgggcattccctggcttttccacataaattctaagacattcttgcagcatatgaagcaagaggtgaaaaaggtgggggaaaatatttaatgaaaacaaatgtgcccactgcgataacttgctcttgagtctctaatctaaaaagagagcatgcaagtggaattacagcccactaaagaaaggatccaaatggactaaatattcttcatctttgccctccagttactccagaagcatgttgtaaggattaatgagggaataactggaagctctttgaactgcttcgtgatagttccttcctaataagatgacccaattaccagscttattttcaatattgcaactatgtaggaaagctaaattcttatggtattccttaaggaaggataaccttcataaaatgctactataacagcagccagagccagacaggtattacacaaccataagacaggctataaatagctgtacctctctcttgctaccctcttcaccctctttcttctcagtatcttggcctcttttctgatcttttctcttctttcttaagatttctattactttcatcccggcctgtctgtttctgtcttgctcttcctctctgtctgtctctcatgcatacatacacactgtcctgtggatgcacgtctaggtgttagtggcagcaaatgtactggagtcccacrgcaccaaagtatgttagcagcagtgaatccayatggatctacagcagcctcaattcttgcctcctcataaggcaggagagactggggcaagttttagagcaggagtgaaagtttattcaaaagctttagaacaggaatgaaaggaaagaaaatacacttggaaaagggccaagtgggtaacttgaaagacaagtgtacagtttgactttgacttagggtttttgttcgtttttttgagacagactcttgctctgtcacccaggctggagagaagtggcgcgatctcagcttactgcaacctccacttcccaggttcaagtgattctcctgcctcagcctctccagtagctgggattacaggcacttgccacaacacacggctaatttttgtatttttaatggagatgaggtttcaccatgttgaccaggctggtctcaaactccttacctcaaataatccatctgaaagtgctgagatgacaggcatgagccaccgcacctgactgacttcaggttttacctgttggcatacttctggggtcttgcgtccctactyctgtgattcttcccttaagtggtgtgtctgcgtgtgcagtggcctgctagcgcttagaagcggagcatgcacagtgcgtttactastgttgtactcgtgaccacttgatgcattttttccttaccagttgagtgtccctggaggaaggccacatactggttaaattccgccattttggctcttagtgcgcatgcctgagcccactcacccaactgctgaggttttattgggaagctgctgatcaccagtttcaggtatttctgtttattgggagactgcccttccctagcactggctgggaccaattattattttagaaggacagtttaacaatgaccgtcacctgatggtcgcctgccattcctggtgtgtgcgtagtgggggaagccctctcctcccctactcatgcctgactaggtacctactgtagcataggtatttactcatttgttagagaagtaatgggagttacccttgggaggtgggtctgaccgtttttgtgtctgttcatgagcatttctttagccttcaggaagctggggctggatgtgctaaatgtgctgcccatctctggctaaagcctagcttagccattgggatgctccttctctgcactgttggaggttttgctttggcttcttcaacttccttgtctatttcctttccaattctgtttacaaatctctataacatcttgtcccatgtctggttcagtgaatttgtgatgcagaaacctctgctgtgtccagcagtttgtgacaccccagagggggtttaagaggaatgaaagaccccatctctgtcttttttctttttgagttggagtctcgctctggtgcccatgccggagtgcagtggcgtgatctcagctcactgcaacctctgcctcccaggttcawgtgattctcttgcctcagcctcctgagtagctgggattacaggtgcccgccaccaggcctagctaatttattttttgtatttttagtagaaacgggatttcaccatgttggccaggctggtttcaaacttttgaccatctctgtctttaaagagcttactgtagttggagtgagaggaattccacaaacaatgaacacagtcagagagtatataattgagctatactgatacagttgccttccagaaatgtgtgacacgactggccgaagtgactctgggcagtcaagagcaagaggatcagctagagttgaagggtaaaatctcagaaaagggcagggaggtcttgagatgactcttgaggaactgggagcattccaagagggctacgaagtatgtaccctccatgcaaggaggacggcattcttggtagtccaggagcttattgttctgctgatgcaaacaagcttctagtgagaaggaaatatttccctgaatcaagtgtctggctgcatttggagtttggacaccactcagtttcaaggctctggagttgtaagaagcttgcagcggcaggaaaggcccatcaggcaggcccatgaggaatgtgctcccctcatgcaatcagtctgctgttattgcttggttagtgcccagggtggacaggggccttttgtattaaagcaattaattttacaaaaagaggaagaaacccttatgtttctgtgactaaaatgacggaaatgaagtagtggagacagctgcagtggcattttccatcaaacagcttttctatttgtgcaacatatttctaagtgatagaaaatgacacactctctccattacttcacttccatcatttccatcatttcaaccttttctaactttcatatttgtgaaacaaattgctttaaacatgtcaaagacatttgagtggagtgttagccaaattttaaaaataaagatgattcataaagacagtgcttgtgtttatagccatcaagacaaaatttcaggaaaaaaaatcacagtcctaattactgaaggcgcatgcataaggtaatcatatttggaagttagaaacaaatctctttttgctctctgcctcttttcccttagatttatatgggttggtaaacctggccttgtggtactcaatcatccttgcttcagtgattcactaagtaaccccttgcgagttgatttctccagcctctggatttatttgcattgttatgcaatgggtggaacacctcactgctgttctgctcctcagcagttagttctatcttctcttacagctgatgcttcttgaggggaaaggccaccttgtgtcttttgttagagataggatgttgccaagggtagggcaaccaggagggtatcccttagcatgtaactttgaagaatcaagattggtgctccacacaaagttcgttcaaaaatgtttctcttaagaaacttaaaaacctacatcgctgatggaaaaaaaaaaggaaggacatgaatatacaggataattgtacaaaaattgggtacatgtattgttgttgtttaaaagttttttttaaatttcgaaacaaactccactttacagaaaatttacaagacaaaccatacaaagaactgttttttcccagaaccgttattagagttgtcaatctgatgtctcgtcatccctgaatactttagtgtgtactacctatgagcaaagacattcttctgtgcaaccatmaaaataaggaaattaacactgatatttgatggtagtctaatctttagaacacatttgagtttttctacttgttcagtaatgtaccttatagcaacagaagctagtccaggatcacatgttatatttagatgtcatgtctcatgtctttagttttctttaatttggaacagattcataatcttgctttgactttcatgatttgacacttttgaacattacaaggcagtaatttttagaatgcccctccatttgggtttgactgatgtttcctcacttgatgttaaaatcaagtcacrtatctttcacaggaagattgcagaaatgatgctgtgttcttcttggtgcctcctacctggttgcacataacttttacagatcccattactgatgatgttaacttaaccactcgattaaggtggtggcacaggttgagtgcccaggaagtagactgtgaaattagcatgcaagctgttgattagggagtgctgttgggatcaactcctgtggaaggaagcagtattaggtagtgggggagtcaggctgcaatgcactcacaccaaaggcctcagatgaccctctgtgaaactctggagctgagatagctcttcatagtgctcctgagatgaggacaaagggatggggctttgttcctccatagtgatcagtcactggatgtgagccacccctggaatgaggtgtgaccctggatgaggcagttttctyctgctaaggcaactcccaaggaggcctgaaccaccaaggactattttctgtcatcactcccagcagctgaggataagcctgtcggtcatttccgaaggtgtcttgggcagaacatcacagagcccaacacagaggtgactgttggggttacccctgcaaagttattctttgttccttttatagttaataagtactttataggaaattatcttgagactataaaatcccatttattaccaaaattattattgatagaatgattgattaatacctggatgaatcctgattttctcttttaattaaataggttacttaaatcttttattatcattaaataacttaatgttcaaacagcctcgattttgccagttggactgttccaactagtttcagtatccttacttcctcatagtctgttacagtaagatgtttcaggcccgttttgagttttccctgcacctaccctcaaaataaccatttatctaaggagaaacatttctccaaagaactccacttcattttaatagaaagtagtatttagaaaccaaggtctagatcctaggtgtgctcattagtattttacctcctttcagtatttcccaattcaacctaggtatatctcacttaccattcttttcacctctctgtcatacctatggtgacccctgattcatgactcttgtcctccatacatttttttttttttttttttttttgagacggagtctcactctgtcgcccaggctggagtgcagtggcatgatctcggctcactgmaagctctgcctcccgggttcataccattttcctgcctcagcctcctgggtagctggggactacaggcgcccgccaccaggcctggctaatttattgtatttttagtagaggyggggtttcaccaagttcgccaggatggtctcgatctcctgacctcgtgatctgcctgccttggcctcccaaggtgctaggattacaggcgtgagccaccragcccggccgtcctccatacattttttatctttgagcttgtcatttactgagtcttcacaatgtgccaacagtgtgctctgtgtttgcattagttttatgttgctgttgtaacaaaatatcataatcttagtggcttaaaacaacaaacatttattattttgatataaggtataatgatatataaaaggtgtaatgacatcttaactgagctcctcctacctagtgtcgtcccttagggaggaatcagtggaattcagatcctgattattctggctctaaatggtccagaataatcaggatccgatggctggtcctggtatacctggtctgacactgggcctgggatctggaaaggtcttagaagaaattacattgagactgtaaaatcccctgaggaagaagacaaggtcttcagaatgtgaagtaaagagcatgccctctcccaattttatgcaatgagtgaaattctattatggcaatttattcatttaagatatgaaggaattattttctacaaagtgtaaatatggaggtaagaagaagtattagcactcttcttagacattaacattttagcaaaatgaatttattagactcttgccattaactgttagctgagaccagttcccttagaacgagttgccaaatgaccgttttcatggggagccatgcgatgttcaatgactaggtgctgccagggaaggctggcccagctgagtcccaaagtgaggattctccagccactccgcaaacagtatgaaactccagggtacatgcttaaagcactctggaatttaagtagtggcagatgttttagaagaaattccactgtgccactttccaaagcactggaattaggtgttatttacggaaggcaatattgtaccccttcaagcccacaaataaagaggtactcagcagtgacctttattaaaggcaaatcagtggggaacacatgaccagaggaaatgagagaagattggaatatattctaaggccttaaaaagatgtcaagaacaattgtgttcccccacaaggcatcmttaggcaaggatggtccaacctcaatacggtttctttacatccctgtgtttcagctacatccgtggtctcytgtattgtttatctatgtcacttgcaaaaaactaggcttgaatacagttttttaaaagtgatgcttttaaatataagcggtaatcaacttatgaaggaacaatgaacatctatagtaagcaaataaacatccacacataaatatacatatgaataaacaaaatgcaaatgtgtgtcattctttctgccagtcctttgagttccatatttgttgtcatgtagttaataaagtcgttgacttcccccacggtctactactcttgctctgttattctcatgtggcattagtattatgaattaaattacagtctaaacttgcgtatttaattataaacccattgagcacaggaaatgtatcatatctcagcacattcaccaccctgtctcctccagattaagtggtatcactctgctcatcataagcactagtaaacatctgtttaaataaatgtttattgagtatgtattgtaaatatccacttgtaggttaatactagatggactgtaccatactccttagaatgttttctatgttgatttttgtttctccartaattgctttaatctctggcaatgcaaactcatttaacacttgcttttatatattgcattcatatatactccaaagacaaacaaatgctttatcagaattaccagtgatttattctcattattgttgccattcaattattaacaggaattgactgttttagcaaaaatgtcatcagttggcctgttttgtttggaagacattcagctaaactttttcctttgttggctaatgacactttattttttaagtcagttgccatgattttaacgaaatgagcctttcttgtaaaacctagaaggctcattctgctcatataatggatggaacacaagcaaatgagcaaatggtgctttggctccatagacttgccatttgctgggggaaattcagttgctgtaggagattctttacggcatgtgttctgagctgactgagaacatgaaagagatgggtctcgaagatgctaaatgcagtgcatctggtcagtgaccttcatgttcagtgcaaagtgtgcctccccaccaagtccctctccaccccttgggcttccagaccccagcacgaggggtcagaaacccaagaaatatggaaacattctttgtcagttgaaagaattgcataacagttggggtcagatggggcaaaaagctgggtatgcagtttggtttataactgtgaaatctggcaaactacaataaattagacattgtgacaccaacatcctatttctctgtctcacatctctagatcttaaagagtttagccttcatggattgatagaataacacagtcttgtttaaactcatgccaaggaagggctggaaactgccctagaaacaatggtcatgtagatgaactttgtgcttctggtggccacattttttataccatgtcccctgagcaagtttccctatttccaacctccactttcctccctatttccaacacccagttccagcttttaggaaaggtacatagtgcagtaaatttaagcaaacacattgcctttcccagggatataaacatttcagcatcatctctaatttctcttctgttggtaggattttcattaccaacaagcaaagggggaatattgagaggtcaagagatcttcatagcaatcctgattgctctcctgcagtcttcacagaacaaccaaagtgattttttaaaagaacttaaagcagaccatgcctcttttctagtgactgcttttctcaatcagaataagatccaaagtcctacaaagccctgcttgatctggctgtctctgacatcatcttccatggtttcccctgctccaggaactttctcgtctcccacaattcccctgctcaggcactgtcacctcccacaattccctctgctccaggcgtctaatctcccccaattccctctgttcaggcacctcatctcccacaattccctctgtcccaggcatcttatctcccacagttccctctgctcaggcacctaatctcccacaattccctctgccccaggcatcatacctcccccaattcccctgctcagatacctcacctcccacagtttctctgcttcaggcacattggcctcctcaagcatgccaagtaccacctcccacagggtctttgcactgatgacacctgtcccctgatatttgcactgctcattccctcacttttctcaagtctcttctcaaatgtctcctctggccactgtctctaaaatagcacccccagctctgaccctctctgtcctcttaagctgctctagtcattttttcatagcacttgtctccgtttgacgtatcatgtatttatttgtttattgtccgtatactcccactagactatacactccattaatctttatgtgttgacactgctgtattctcagtacctagaacagtgcctggcacttaaatggtgcttaataaataacctgttgacgaaaaagatcctgaatcgtgccacagcaacaattacttgttaattgaaaaatcacaaatctatacatttggaaaggagtctttatttcttataaaaggttacagcctgcagagtgactatccggacaggctgagaagcacagcctctggcagaggctgaaaggtgggcacttcaagggaaaggaagatggaacaggaatttatgctgagctggttggccaaatatacatattccacaggttacaggaggagctatgaacatttatgaagagggtcttaatgtatgcatactgaataaacatgcatgttatgtgtgacccatgttcgctttggggtgagacttaacatttatatgtgcttcagttaggccctatacatcaaaaggtgaagcagggacaggaatgcattgtagtgtgcagcttcggtaaatcgtccagaaccagtccatggttgatagtctcttaccaggagaaagatgctgaaatcagtctcttacgcaatcaaaactgtagttgtggctggtggaatgtgagttagttagtcagcatctggtgatggatgaactgtagttgttccaacattgctcatcttgagaccagggcttgtttagctgctagacaaaaagaaaaactttgtggcagttagaacatagtttattctttaaatgcaggggttcatgacttaatccttgcctggtgtggccttgggtcttgtttataattatatattttattgccacagtgtcagtcttatgatctctattttaacattgattctgttcaattttgtctaaacagcaaaaggaaagggaatatagtgaggtgtgtaccacctcccatcccatcatggctgcggctcagtttttaaggtttctctggggtccccttagccaagaaagagtctgtacagttggttgggagtggggtggggataagattttacttttagttctcacaccttattcactacctgtgtggttatgctcagaaataaaaataaaataagtttagtaagatttctttgctattatagccatcagacaccatataatacggagaataataatttgttcagtttatgaaatgcccttcacacacactattgtttaatcctcatcttctggaatgccaattttacagatggaaaatgcactgagagggttcattagcctccccagtcacagctctggaccaagccgacctgggttcaaatgattgttctgcatcctgatagctatgtagcctagagctagttacttaagttacctgagcctcagttttcccatatataaaatggacataacccttaaaggtgatagagcaaatagaaactgctctagatttgtaagcagtgggagcttactggaggcaattgggtacacaagcgagtgaatgactaagaagccaaacaaacgacatggtgaggcaacccaggaattaggaacagtagaaaactgccaccacaccaggagctggaggcacayggaggaggaggtcccatcagaacccagaaggcatcagcaggtgctggagccatggaggagactcagactctcacctcaagacagagagagcacaggagacacaccctgacatctcccctcctcctgcttccaatcctctctttggccgaacctacctcgaagtcagagagcagaggagcrtgggaacatggcttcctgtggaacctgacagaagattctaggggtgcaggcaataggtctgagaacagccagtctgtcaataggtggagttgctgagacaaactataagtggttgttattcccgaatggacaacaggaaacacaagtccagattctttgactcctgttcctcctggtccttcggaattgaatgggcaacgtgaacaaatctgcagtgtaatgttatgctctgtaaccaactttgtctacattgtagaacattttctgctggttattttttcttaaagactaaaaatatcctgtcttctcttaaatgaggcaacacacatgtgggttagggaatttctagaaaactagcttcctggagtaaatttgtatcgcagttaacaacaccaggtcctaacttttggagcaaactcctcataaagcagcatgttctcccatgcttgaagcttagtctggaatctttgggttagagggaatgactgtttggttcrtggctgtatctcacttaaaacagtgcctagggccaggcacagtggctcacgcctgtaatcccagcacattgggaggccaaggcgggtggatctcttgaggtcaggagttcaagaccagcctggctaacatggcaaaattccctatctactaaaagtacaaaaattagtgggtgtggtggcccacaccagtagtcccagctacttgggaggctgaggcaggagaatcgcttgaacctggaaggtggaggttacaatgagctgagatggcacccctgcactccagcctgggcaacagagcaagactccgtctccaaacaaaacaaaacaaacaaaaaaaataaaaaaaatggtgcctggcaccttgtaggcactgaaaaactctttcaagaatgaacaaaacctggggtcgcctatggctctgcccccctacttaatgccaacatcaaatacctgttgcgtctacttcctgcttccrctggcacccctccacttaccttcccccgagagtcagtcaaagacaccatcatgcctcccttgagcacttcagcaccctctgactggtttccttgctccactcttgtccctctcaaaccattttccatcttgcagacagactgatctttctaaaatgtaatctcaccagatcacttaagcttttcaatggctcctgccccatctccatcccctccctaggacacactctacatacctttgcacagcgttggaggtccctttgctttttaccctccctgggtcaaatgcttcttctgccacaggtatcctgagtttcctgccattccctttatgcaccatcctttccttattccctcagttggttactcccccagctgggaagacttttctctaccttttccacctttaagattgtatcccaaaaccacattctctgaggaatcttcttcaacttccacagacactgttagccacttcctcctctgggtttccacactgtgttcctcgtgaccagtagtcccaggaagaggctggcatgctgtaggaatgtttaaaatgcatgcacatttcactgaaggggcttcacagtcctctttctcagaaataagccattcttagggagaaattctcctatctcaatgctgttcgtattttctctgaagttcatgttatgttcttacttcctgtgaatgccactggcatcatcctgagacagggtgtcctcatgttcacattcctgccttggttagccatctaagtggtgcacttcttaaagccagggaccaggtagtcagcatcaggtgacagccttatgatttmtttctgattcactcaaaaaacctagcacgatgctggtttcatgtatatcccacaaaattacgccttacrtttactccaaaagaggctttaagtgatgtaggaagcactgaaagaaaagtaaaataaaatcaaggtagaaaagacaccttaacaagtacctagcttccatttgccaaatatttattgagcacctactacgttccaaacatcatgcaagctgctgggtatacaaagttaaacaaaactccatctctgtcttcacaaagtttccccccaaccctwcctaagtttgcctgagctagaataaacatggccaggaaggtctcttttctttaggaaacatctggaaatatgtatgtaatctgccaatggcaacttagcaatggaaagggcggatttctacagtcctcaaagagatgatttgcttttgaatacttgtgtttctctcctcttagttgctatcatccatgatttctgygcctttttgattgtttcttttttggtggtggcattttgtttttgtagctggtaacctggtatttctaagagttattyggtgacttattcccacttggtctcagcacactccctttccatcctaagactgttagcacaagttttgcttccttttccaaagcaactgtattcacacttccagcgctgccacatacatcatgctgttaccttcatacttcaagggcccatttggaaatagattgattattttgaacatgaaaggtgcgccttgggaaaaacaaatgaatcaaatggaaaaatgaattaacatcatgaaatttaccttctcagctgaagacatgatagattcctgtgttccttagagacagtcctcttataagaatgaactcttaagggaagtctgcaggtagatggagtcagggctcagcttaaaatgtgtttatataagaatggaaaacaccctctgaggaagaagcttagaaataaaaaagtttctttcttgtgaggggtgcttggattgaacacccagattgctgtgggcatctcattccagagcttctaacatctctatgatgatcttagtggggcttgccatttgcagagagctcagttcagcctcactgacatttattaggtaccgactgggtacaaaacactgtgacattctatgggagctatacagacatattagacaatgtcttcagttcagtttaacaagcggaatagatatctaagtgaataaggagaaaaatgtttgtttgggcttttctggcaaataattgttataggaaaaggggtctcgatgcagaccccaagagagtgttcttggatctcatgcaggaaggaattcagggtgagtcacagagagcagtgagaagagatagtttattaaaagctgctccattacaaagtagggtatcctcagaaagcaagtggaggaatgcgctgtcattgttttaagcttttcttacataggagtcttgtctatgtaaagactaaacaaagctgtgcttttgtgtgggtaggatgacagcatgacaaaatttattattctattgatttaaagaaaactatccttgacattttagtgtgtgagtatatcaaagcataactgtaattctcttgaaagtatatatcattatgggtattgggacatctggactttctgttgttgtaggagtttgtccttgcaggcattactaagttgtttccttagctgtcaacatcttaggaccatgggttttgactggcaaggaaagtgccttgctagttttcagatgcagttgatttaaaaaggttgtgaccctggctctcctacgttcgtttccctaacgatatggccagaagtcttcttattactaagtatagcatatgaggggcacagactgcagccactggacttacagatgacatgcccaaaagaggagagaagtgggagtgtcctgagttatcagcttctttattttggagcacgagagggagcagtgattgatagatgtgtctactcagtcactgataccaaccctccttgatggcaagtatgttcttccaggtcctaggcatgagagaggtggagtcagaacagttctattaggaacaatattcaaccatactgaccataccatgtgctatttgatgtcctttctagactacctgggaacctaatcaccacctaggacattgtatttttaatgtaaaaatatttcaaagccatcaactaacccaaaagattaattttttaaaaggcaatgaattcttctagtgggcactaccaatgcagggctttgcgtgcagtgggctctctggtctgtggaatgcattgaaaggttgagaggacattttccccagggtcacatagcactgaatttgagctgtggctagatttctctttcctatcttgtgaagaatactaatatcaagaaactgtgcacaaagctcaatcaagcctaggtagctaaggttggaaaagagtaacrtcacaaatggaattaaagattttcatcttcttcctcctacatcccagctggggggattaaggtaggtctgtgtaaggagagtgaggccctcagtaaagggacaatgagacattcgaatataggcatatggtccaagcggcttttgccttaaaaacattagttttgtggcctcaataataattcacaaatggaagcaagcactgaaactaagagcatatgttaatttctagatcacttgggaagatggcactagtttttgataagtgtgaaaaaatgcaattggtaattataatatttcctcatgtttagtagtccaatttcaaaggctgcaattattaaaaacaaaacgggattcctttcttggatgctgtctttcccgatgtctttttcttgccctgatgtttttaacgcaaagttgcatgatttgggggagaaaaacacatctatccaggcattatatactctaggcaaacacgtgcatggaggttccctgtatggagccatgttttccatccagattgggccaaggatagctgatgggcagtcatggatgttgatggatgggttttccmagggtagctggattgtggtctcgtaaccatgccgactcctggggctgagaagggctatttagtgaaatgaaatactactctgtcacaacttcctcactcacaattcaatcatggagagtacttccccagtgctgtcactgaaatcattacattcagaattaaacatgggtgtaatagagcagtccctgaggttctattggcacatcaggttccacattcctaaccagctttcccatacaggaatatgaaaagcctgccaatcaggattctttttccttcctttggaattaatctcaccactccctgtccctgataacgcttccataacctgttcccgggccacgtggcatcagcgtatcagcaggattgctcagccttcaccctttggtgtctgacattactttggaagtcttcccaatgcaaatcacaaaaaaatgagttggcccagagagaccctcatgcaggttctctccacctggtcttccttctcttcactcactcagttgttacctcctttgatccacatttctggctcacacaactcttatccayggcagcatattttctcaatgtcccttttcctcatattcctttggactttccagttttattcttctcttgtctcctttcatctccctagatcccttttgccattctccaccttcctccacagaggaagcatgacatggagcaaagagaacaggcttccctgtccccagttctgtctccacttctgcctagctatgtgatgtgcacacatgacgccctcaccaagcctcagtttcccrtctgtaaaaatttcctcacagaggttttgtaaggaccccaagaaataaaacttatttcctgtcactttatttgcatcactatgtgaactgccttggcaactctaaacaacttttgcaatcttaaaattgaatattttagccatgaatcataaaatcaataaaaagctacaaacttcctatgttttcaacaccccctgagactgtggggaatttaggcgactttaaggaaactaaaggttgacctactagtagtacagatgtttgcgaatagtttagaaacatatttctccttggaaggagaagctaggtgatggtattttcttcttaggctcaagtgttagacttcaagagtctgtaataaatcgctccttaaataaataaaatgtgaaatcctctaaggcagatgttggcaattgtttactgtaagggccagctactgtgttaggcgttgcagaccatagggactctgtcacaactactcaactctgctcttacaagagtagggttgtattgtagcacaataatacacaagcaaatcaacataactgtgttccaattaaactttatataaacagtaggtaggctgggcgcagtggctcatgcctgtaatcccagcactttgggaggcctaggcgggcagatcatgaggtcaggagatcaagaccatcctggctaacaaggtgaaaccccgtctctactaaaaatacaaaaattagccgggcgtgatggtgggcgcctgtaatcccagctactagggaggctgaggcaggagaatggcatgaacccaggaggcagagcttgcagtgagccaagattgcaccactgcactccagcctgggcaacagtgcaagactccatctcaaaacaaaacaaaataaaacaaacaaamaaaaaaacagtaggtaagctacatttggcccgcagactatagttttctaaccattgctctaaaggatgaatggagattacattgatcattaacaactcagaaaatcagaaattatgattgaatgggaggtttcaggtgactccatgatgattctggaattattaaggcttttggttactaataaatggcaacccttttttttttctttttttacttctacaagttctcctgatggaaaaatcagtcagctcaaggttttttagtttgggatgaattggcctttgaaatagatttgggctttgataggtttgttggcaattggtaaacccatcctaatttcccacagatggagcagagaaggatcacttagaggaatcagaaagcccaggacaacagggaagtaatgataactaccaattattaagctgccctccccatcacaaactatgaccaccatgatctccattttgtagaagaagcaaagttttagttgacaggggatgagtgctttgcccgagatcacacagaagtgttagagccagctgaattgctttccccttagccacaatatctcaatcaacacaagtaacgtactttccttgggacattcacctttcttcagattcagaaccagagagsaaaaaagaaatcaccccttcttccttctgcctttactttctagtagaagttatacttaaaaaaaaaaaacaatttgccaggcatggtggctcacacctgtaatcccagtactttgggaggctgaggcgggggggaacacctgaggtcaggagtttgagaccagcctgccctacatggcaaaaacttgtctctactaaaaatacaaaaagttagccaggcatggtggtgggtgcctgtaatcccagctacytgggaggctgaggcaggaaaattgcttgaacccaggaggcagaggttgcagtgagctgagactatgccactgcactccagcctgggtggcaagagtgaaagtccttctcaaaaaaaaaaaaaaaaaatgagtgccccctcagccagcccctactgtgtgctaagcataaagctttcattatattataaaatctattgtctttttatttcccaaactaaactgcaaagaatcaagaaaatggaagctaagacaagtaagtgatttgcctgaagttgcaccagtagttaatagtggagtcagaatttgacatggttctcatcaactccaaaacattttcaactcacacagctgccatagagcttagaacaggccgactctcaaaccagatggtctgggttcaaatctgaactccactatttgctagttgtatcaccctaggtaagttgcttaatgactcttagtttcctgatttgtcaaattaggatgatgataatggtttccttctcatcttttgttatagggaataaaggggtaataagaacatggtaagccacatgctttggctttttctgtggaatatcagctctatgagcacagaagttattgtctgttttcttcactgttgtatccttagcacttaggataatgtctagcacatagtaggcaatatcaatatatgaatgaaaaatgtcagaagtagtctttaaattaggttatgactggattcaaagtcagcatgaaaaagcatagctttccttttgctttactatttttgtataacttggatttgataggtgaaattcaatatgagtctttgaagtcttaatttaaagtgtaacagtggaaactagtgattgtcttcattctttccatgttcccaacaaaagtagaagttagtacaaaggtgaagcttttaaaacaaaagtggaagttagcacaaaggtgaagctgaggttgagcacataacaggtacaaagagtgctttcagatgtacttctctagttttttgctattccccaaagtgcatccttacataattagctttaaaattcctttcatcccttatttttttttaaatctatcattaacacgtagatttttatctctaagtttatttttactaaacttgcatctttttaaatacgacgtattctgaatctaaatcagtatttagtgacaacagctgctgggaaccactgtaataaatgaattatgggtcccatttacctggcaagattgcctttgatgtctacacgtcaacagtgaaaggggttccagagaaaaacaaagcctctggtaaaaagggcaagctcatcccaagattgagtatgcacgaagagggagcagaaacaggagatgggtgcctctggaacaaacatgcttatgcaggtgggtttatggaggggctcctgagaggstgagtcccatgagtcttcaagagcattacttagatgccatggcacctaggcagaaaacaatgtttaaatttgtgctggatttacaagtatatgtgatattcattctgagtggtataacctatatccctaatagcaaagtgttgaagttctaatctttctcagtggtttgcactgtgtaaattattattttcattaagattaagcatcctcacagaattgcacagcagtaacttatgtaaccacctccttagaatgttctctctctgacaatatgcctaccaaagactcttttaaagatctttgaaattagtaattagggaggttamaatggagcactgtttgcttgtcttaatgtggaatcctctacatgctttatagaaaacaaatgaagtgaataagttttgctcttgaaggttctcctgcttacaatcaaagtaatttgcagacttgcctgatttgtatgtttcttcaagtcaagaataattctaakggattactcctgtcccttcagctataagataacagagtgagaacaaaaatggcttgtgaaatcaacctaacagagtatttcttctctcttctcataggtcgctacccacaggagaacaagggaacctacatcccagtgcctatagtctcagagttacaaagtggaaagtggggggccaagattgtcatgagagaggacaggtctgtgcggctgtccatccagtcttcccccaaatgtattgtggggaaattccgcatgtatgttgctgtctggactccctatggcgtacttygaaccagtcgaaacccagaaacagacacgtacattctcttcaatccttggtgtgaaggtaagaggcagacatttagttttctcatttaaaaattcacctatttggcggggtgccatggcacatgcctatactcccagctctttgggaggccaagatgggaggatcgcttgaggccaggagtttgagacctagtctctaaaaaataaaaattaaaaattagatgggtgtggtggtgcacacctrtactcccagctacttgggaggctgaagtgggagaattgcttgagttcgggarttggaggttacagtgagcaatgattgtgccactgtactccagcctgggcaacagagcaagactccgtctttgaaaaaagaaaaaaaacaagctcatgtatttccaatacatctctttttgaaggggtagtaagattattctaaatacatatgcctctcctacatataccatctttaatgattgaaagagaaagatagaaaaytcatcctccatgtgtatgargataaaacctctatatgtgaagtcaatgctgctatacatttatttcgggattaattggagattgtctaaagttgcagttagttatttgtggagctattaattgcagttttgtaattaaaagtaattgcaaaaatcacaattacttttgcaccaacctcaccaacctaatatatgttgacagtataacctctgtacactattactctgtaaacaaattgggcttattaagcttgattatcaaaactattagagtctataactctgacttcagaaaaataaaataaagtcgacgctgttcatagtagaactaacctctctatccccctactttaagaacagaaagtctgtatatctaaaggattccacaaagttgtttatgtgcatagtgggtgcaaattttgcaaaccataactctggatgtgcaaagatgtagctgtactttaatataatataacttgatctctagtgctattttcagtcttcctttctgtctgcggcagaagcttaatctagttatattcaaataaaactcagtcaagttcaatgatttctctatcaattctgttttgtgcctcagtcacacatagcattttctcctcatcttcatctctgccctttcatacctctcccctgctcccacactttgtacgaagctgttttaagttccagaggcagatgcagatgttgcagcagcatcaatgtgggagagaccacttctaggtcctaggaaataaggcagtgaaagatatgaaagctcacatggggcaggagacttcccatggcaccctaccccatatgcactgctctctaacatcatccaaaatgagcccatattattgctgattttgaatgatccttgtatgtgaaagtcacatttgaatcagggttaatctgtcctagatatagataagtgcacaacaatatttgctactcatctagaacatacaccttggtcctactgatcttttctttgttttatatttatatttatttactttttgtagagacgtggtgtcactatgttgtccaggctggtctcgaactcttgggctcaagcagtgctcctgcctgagcctcccaaagtgttgggattacagtcatgaaccaccatgcccagcatggcttgggaattacctgttccactagtgttggcaaaaggcgccaagctattcctacactccctatacatccatcctcatcatattgtacccaacactcctatctatgagacagatattcaaggtaaatggtaacaggaaatgttaactgggccatgtgcagttcaaaaaatgaactcttgatagtaatcttaaaaccagatgtgaggcatttgcaactggttgatggggtgatatttacagagatgaaaaatactgagaggatcagagttacagatatataaattaagattttgaatatgttaagttggagataaccatagatagacagcagaaatgacaaataggtatgtgaatctggagaagaaaatcagagatatatatttgggagttatctgtacctagggagaaaatatagataaagaaggaaataggatatagtatctagccttcaggaacaccatcatttaggagtccagtagagaaggagtcagcaaaagagaatgagatggaagagtatgtaggaagcaacctattctaagaaaattgtatttaaaaattcatacttatcaatcaagagtttgttattgactttctttttattacaaaaagaaaatcctaggctacatataactgttcagaactctaggaaatttcaggaatgctataatttacccagactttggtttgtttgcaacttttctggattatatcatgtgtgtaaatgggatatgtgtctgcattcatttcaacttatgtgaccactcttcttgacgggaaaagggttagttaagttgcttgacatattaactttcaggataactactcaggaggtggacaatctaataaccttctaattgctgccttgatcttcagttgtatccatgatgagcagcttccagatacctctgttctgaaaaagtcacttaggtctggaggcgttcttgttctagaggctgtacagggacctcccctaggttttcagttcatggaaaggattggaggaaggtgggacaaaaaccagagaccaatttggaagctgtggtctaggacaaagatgatgataaactaaacatgstggtaccagtggagatgagaaggggttagattggagatctattttgtatttagaacaaaaattgcacagggattcaagatgagaagtaaagaaatgggaggactcaagaataactctagatttcttgttagaccaattgggttgatggcggtgccattttcagagctgggaaaactgtgggaagtggaggggaagcactgggggtgaagctaagagttacattcagaaatgttaatttggtgatgtctatgagacatgcaaatgaaaacgtcaagtaagcacttgaataaagtgaatctagaactcaaaggagatggctgagctagacatgtaaacatgggcacggttaggagcaataacggacacaaatgattcagggtcattaacaattaagagttgagacaaaggagaagtcaacaaaggaggctgagcaggagcagtcagtggagcgcaaggagatcaaaagagcccagagccagacacattgatagattcaagacagcagtcaactctgtttaatgctatgattagttgaataggataggggaggaaagtggccatatagtgtggaaatatggatgtcttcgatgatcttgaaaaggacggtttcactaaagtgatagagacagaagccagggagatggtcatgggctgtgttgtaaacaggaggcgagaaagtagagacggcrggagatggcacctttctcaagactttctgtagcacctagatgttgaagcgaaggtcaaaggagaattttttaaagacaagagagagtgggtgttattttatggtgayggagaggaaccaggaaagagagtttgcagtccagagagaggacggtggttcacagccttggctgcacgttgcaatcatctgggaagctttgaaactatggatgcttcagtcccccatgcaggcattctgatgtaattgctctggactgcagcctgggctttggggttttttaaagttctgcaggtgattcttggagctaaggttgagaagtttcaggagtgaaatccttgagtggttggaatccagggaacaggtgaagaagggcctgtgatgggtggggctatctactctctccagagacaggagtagagtagaagaagaggggtgcagattttccagtttaatggaagaagaatgaggtgattgccattttgtgactcctttttttttttttttgtcagtgaagtgtaaagcaaagtcatgtgttgagaagcagcagcaaggaagggcatgaaacgcttgatagggaagatgtgagctagtcatctggagggtagaaggtgaacttattacagggacatgccgggagggtgctccctgcttccagaacacagggcaaactagcacaatcttcttcattacttggcctgtggaggcccaaacatctctgcaaattctttagggatttctgacttcatggctgcctctgcctctaggagtcctactcacacttgtgctgctgcaagtgagaaacttgaccgtcaccttcaatttcaatgttggcaacaacaacaaaagcagccacacacaacayctgtgaatgcccagaccttaactgcagtttgggatggagggtgagagcaggaaggatgcactctgtggtcaccacgcttggagcacatcagaatcacctggagggtcaccacgcttggagcacatcagaatcacctggagggtcaccacgcttggagcacatcagaatcacctggagggtcaccacgcttggagcacatcagaatcacctggagggtcaccacgcttggagcacatcagaatcacctggagggtcaccacgcttggagcacatcagaatcacctggagggtcaccacgcttggagcacatcagaatcacctggagggtcaccacgcttggagcacatcagaatcacctggagggtcaccacgcttggagcacatcagaatcacctggagggtcaccacgcttggagcacatcagaatcacctggagggtcaccacgcttggagcacatcagaatcacctggagggtcaccacgcttggagcacatcagaatcacctggagggtcaccacgcttggagcacatcagaatcacctggagggtcaccacgcttggagcacatcagaatcacctggagggcttgttcagccacttctgtgcagcaccctcaggttgagtaggtctgaggcctggcctgagaatttgcatttctaaccagttcctgggagatgctgttgctgctggtcggggtcaacacttagcggaccactgnnnnnnnnnnnnnnnnnnnnaaaagcagccacacacaacatctgtgaatgcccagaccttaactgcagtttgggatggagggtgagagcaggaaggatgcactctgtggtcaccacgcttggagcacatcagaatcacctggagggtcaccacgcttggagcacatcagaatcacctggagggtcaccacgcttggagcacatcagaatcacctggagggtcaccacgcttggagcacatcagaatcacctggagggtcaccacgcttggagcacatcagaatcacctggagggtcaccacgcttggagcacatcagaatcacctggagggtcaccacgcttggagcacatcagaatcacctggagggtcaccacgcttggagcacatcagaatcacctggagggtcaccacgcttggagcacatcagaatcacctggagggtcaccacgcttggagcacatcagaatcacctggagggtcaccacgcttggagcacatcagaatcacctggagggtcaccacgcttggagcacatcagaatcacctggagggtcaccacgcttggagcacatcagaatcacctggagggtcaccacgcttggagcacatcagaatcacctggagggtcaccacgcttggagcacatcagaatcacctggagggtcaccacgcttggagcacatcagaatcacctggagggtcagcacgcttggagcacatcagaatcacctggagggtcaccacgcttggagcacatcagaatcacctggagggtcaccacgcttggagcacatcagaatcacctggagggtcaccacgcttggagcacatcagaatcacctggagggtcaccacgcttggagcacatcagaatcacctggagggtcaccacgcttggagcacatcagaatcacctggagggtcaccacgcttggagcacatcagaatcacctggagggtcaccacgcttggagcacatcagaatcacctggagggtcaccacgcttggagcacatcagaatcacctggagggtcaccacgcttggagcacatcagaatcacctggagggtcasccacgcttggagcacatcagaatcacctggagggtcaccacgcttggagcacatcagaatcacctggagggtcaccacgcttggagcacatcagaatcacctggagggtcaccacgcttggagcacatcagaatcacctggagggtcaccacgcttggagcacatcagaatcacctggagggtcaccacgcttggagcacatcagaatcacctggagggtcaccacgcttggagcacatcagaatcacctggagggtcaccacgcttggagcacatcagaatcacctggagggtcaccacgcttggagcacatcagaatcacctggagggtcaccacgcttggagcacatcagaatcacctggagggtcaccacgcttggagcacatcagaatcacctggagggtcaccacgcttggagcacatcagaatcacctggagggtcaccacgcttggarcacatcagaatcacctggagggcttgttcagccacttctgtgcagcaccctcaggttgagtaggtctgaggcctggcctgagaatttgcatttctaaccagttcctgggagatgctgttgctgctggtcggggtcaacacttagcggaccactggtttcataataatcacgaaacaataaagctgggcatggcccccagagcagcctgcggtcccagctacttgggaagctgaggcaggaggattgcttgggcccaggagttcgaggcagccccgccagcctgtctctaagaagaaagaragacaataagcaataactttaaaactcaagaggcagggccgggcccagtggctcacgcctgtaatcccagcacttcgggagaccaaggcaggcagatcatgaggtcaggagttcaagatcagcctgatcaacatggtgaaaccccatctctactaaacatacaaaaattagctgggcatggtggtgtgtgcctgtaatctcagctactcaggaggctgaggcaggagaactgcttgaacctgggaggcggaggttgcagtgagccgagatcgtaccactgcactccagcctgggccacagagtgagactccatctcaaaaaacaaaaacaaaacaaacaaacaaaaaacctcaggagattataatttactcttcttaaaatttcactggctctaccctgaacctaattccagtctctctcccttaccaccccttctctctctcctactgttctcctttattctctgaacttttctctcccattctgtcccaggagcaaattctccttccttaatgcagagggatccagtgagctttattatttttgttgcttgatctcttccaacaaccatgcttttgggccctgaacaccatttttttaaatgaagtgagagaaagagttcatctccccacttattgtgtggtttcccggcctagcacgcaaagcataacccaaaaaggggatgatatgatgaaccgctccccccaacacacacacaagcacatacactgtagcccagcagtcccctgcagttttatgcttgtgtgtgtgttaatgcataacaaargattcagcgctatggcctggtaactggaaagtaggtcaaaagagaggggtgagactgtcrcccaagtgaaaaagatagcagaagataagaaggaaaactgtttccagaaattgtcaaaagacagccaggtgaacaagattgtggyccgakgtggcacaggatgctgggctgaaaattacagcagcatgcacagcacttattgataggagaatgctcagctgtgctcctgagggcccttcagcctgctttgcattcataggcaatttatcctccttaatcactaaatcattaatggggatcaatagcaatgccacatcagwgaaggcaggggtgcatgcggggagaataattgcttgcttagtttttagtttagtggtgctaaccgggcttcgggtccattctgggaggaaacccttctcctgggtgttagagagaactgtacccacaaaggcagcaggagtgagacgggcagttattatgaattcatcatgtttttctaactactcaggaactctgaactattgaatgtatttcactatttaaatatagaatgttccagtttggtagtctagcactagtgccagatagtgggtcctgaaagatttagatttctgatatctgtgcctagtactctggagaagcagtgagcagtatttttgattgggcatcagttacctttaagggatctttctcctcttgataagttgttcccccattccattctccatcactgcttttccctcacctcattcgacctcatatccttagcctctggcacacttgaggtttaataaatgtttgctgtgttgatttaataatcccaagtaaatactctaggttcgccgcaccctgtcattacagataacttgtaaatgtaatctcagaccttaccatcttgagaaaagtcaaaaacatatctggtgtgctgggaggagtgtgtctgtgggtgatgtgtgtgtggatttctctatctcttagcatctgacaccaaattagcatctaatatttcctttttattcaatgtgttttttcacttttctttaaacaaataaatcaatttaatttaatatgaagaaatcaatatgttcccaatatcttggatgcttttaacagcaaataaataaatatgacctgcttgtattttatyattaaattcatccttagccwatttgctttgtatttatataaggtctttttagcccctttcatacagaatggagtaagtaaccaagactggtgtcctcagagtaacaatgacccacattccttctcttggagactcttgagcccagaccagcatttacgccctcaggctagagccattcatccatcaatccacaaatattgatagtatgtcgcatcccatgcccatgacaacacaatgacctgtgcacagtacgacagtattatgtattcattcagaaaaattcaaagtcaatactgaattaggtactgggactatggcagtgaaaaaggcagacacaatcttcgtatagcttctagcaaggattttacaaatgagctcctaataaaaaactgattacaattgtaaaaagtactaaaataagtcagtgcacaagaagaacacaaaactggggactccgacctatttggggaacgaggagagactggccagtggcttagctttgcaccttggctagcacccagaacagtatttgcataggatagtaatcaaatagttggttaattgaatttttatgaagttttaataaagcttatggaaaaattttaacctttatttactcaatattcctcttaaataaaatagtatgcatcattcttcctagtatctgagtcattagagacttattatgctttttatgccaagcgaggatcatttagtgtggccctgtaatcagaaaggatcccagagagctcacagtaaaccttcttttcaatggcatgtaggtgaccccaggattgaggtgcaaaggtctttacaaggtgtttctagaaagagcatggttggaagtgtctaatgcagagacacattcacccaccaattcatgtggtttacaattccttccttgtagagtctcttatatgcttcaaagtgtgctcatagtcagtatctccctagattgtgtgtttggaaggtgtaatccttatctcattcagcctttygtggtgcctggaattgagtcaatgttcagtaaatgtttgctgaactgaactgataatcaccattctgagaggcaaggagacgattattagactcagatttcaagagagaaagcaggttctgtgatgttacgtgcatttctcaaagtcctatagaaaattaagaaacaaactgaggctaaccctggagcatcctgactctgtcaaggtaagcacttatatttttaaaacaaaagccatcagtatctggcattgtgtaacaaaagaaaaaaaaccaatagatggccagccgagaagattctgtaatgacctaatcaacgtggaaatttctgccataataaataaatacataaataaataaataaattcaggttgatatttacaagatcaaatgaaagctttctctgggaaaaaaaattaaarcataccaacaagggcacaggctcccttagaggatatgtgctaagtaaagaagctctgacattttctttgtagaattgcttcatgaataatagtctatcttctgaagatatctcagtacactaaaaagcccttaaccagcaaaacaggcaaattagcacaaatccagtaaccttctcaagctggtgtgagctgtaatgcagcatgtttgtaaggaatgtaaactatgttgtactatgcacgcacggatgattgtgctgtcgtgagcactgtgggagatatactatcaatatctgtgaattgatggatgaatggcagtagcctgagggtgcaaattctggtctaggctcaagggtctccaagagaagcggtgttagtcattgttatttcgaggataccagtcctggcgaactactctactttatactgaaggggctaaaaggaaagaagcaaactcaactgactattgaggaamcatttgcttgtgcttcatagattgattccattccagtgttactagataggmaagcaacgtctctggagtggctatatgaaaccattttaggaaggcagtgcgtttggatccttccagaataaaaagctcagactctaaaaatgccattccttaatatgctcacaattgccaccgacaggaagttactcctggtatgccacagcacacacagcctgttagaatctgccaccccttttgatgtactttgtgatggaaaaacatatcatggtgacaccagtccggagtcacatttgctctgcagatcaagccactccctctaagagtgattacacactcccagcatgaatctttcctctttttagtggtgctcagcttttatataaagggggaagcaagtgtaagtgattcctaatcccctcgctctaaattccttccttccctaaatggtgactcattttgccttttggaagggccaaaccattattccttctaaaggattagaaacaacaccaaactctggtttaaactgttgaaagagaccatgtaggttagctgttctagcaccatagttttgtttaattcctgggctccctttgccagacttgagcctaatgaccaaggaaatggaacttgctctgactttgaaatagcatgtaaataagcagaaggaatgtatcagcccatgcaatgatgaatgatcttccttctcacaaagaggttatacagatactaaaatcagtaggctcagcatttgtttttacatgtttgttataaatccttaccttctctgggtcgggaggacagtgggaatgtcagagggtgactgaaatccaccscaaattttcttggcccactcttttcttttttaactacccttcyattcccaccagaggaacagtaaaataaatgaggtcattattcttcactacatgcctcttgtaaattgttagtcagcctgcaagggtggttatttacgaggcattttgaaggtctgttctggtgacagagttgctctgggcagtggatggaggtgctgtgtcacactcaccaatggtgccatgtgtaatctgtttttctcagagttttatcgtaatggtggttgtctgccagaggtcacctacgatcaaagagttgtcagttggtccaaggtgcagccgctcctactctgggagctgtctagaccttatttctcccctcagtcctcagttaagtatagtttccagctcccacattccacacaagcctcatacacgtctaccttctaccagtccaaattgttgggtttctagaatagtgagttgtttgttagtttgtttttcctattagtcgagccttccattttactaagtgaagaactagcttcccctgaaacttagtgaaaccccaccgctctgaagctaaccaaaaatttaaaaacaaacgaaaacactatcaaaaagccaacagcaaaaatctccaagggcaaatgattacatttttctatttttgttagccttccaaacatagggagtttttttggagtttccatcgtgatacaattttttttaaccttgctttggacaactatattttaaagtgacagatctgaataaaaacgggaaataaagcactgctttccaccctcaatcttctttttaaaatcataaataaatttaaaattaaaatcgagccttcccatttgacttccttgccatactgtggattcatgataatgtctgcctgtttgaggtgagatttaattcaagtgttggaagggaaagggtggcctagtctggagctccagaactcctctctatcatgctttgccacttaaatttatcacttcccatcaatactaacgcaaagcccaaaggtaaatccttcattttcttggacttcttccttactctctaagctccagacatcttccccatctctcattctttcagtacacattgattgatttcctaccgtgttccaaggcacagtgttgggggctggggacgcagtcatccgatcctttggacccaagagccatggactacttagaaggcagcttattcaaatcctagcttcacaactcactagctgcatgaccttggaaaagttatgtttctctctgcctcagtttcctcatcagtgaaatggggctactttcctcacaaggatgttatgagtgttgatgagttcatgtgtcttgttataaagcacttagaaagttcctggccataaataagcagtataacaatgcttatttacatgctactacttaaaaaaaattaagaagtaaatacttaaacacatacttattcaataaatataatcattaaacggcaatgtccatacagtgggataaatgttacccccgcctccatagggcactaagggaacaaggtttaattcaatctgtgctggaaaggaaagggttcagggagacttaaagaaggagaaaaaagttgtgttgaaggactctgataataaaaaagagcacaaccctatattgctcttaaagaaaaactaatgcacaaaagttggacttgttaatctctttttaaatgggtagcttcacttaaatggaaacacattttagaaaataactttatctgatggaaaagtctcattatagaaataaaaaataataaaagcataaaaagagctcaaagatctacaaattagagacactaacaattaacattttsttgtaatgtcatccatttaaagtattttcagtgcttttcatttttaattggcaattaattgaatatattgttcttttcaaataaacacacatgtacatttacatggctaaaagaaaactttccttttcaccaatcttccaatcctagagaatccccagggaaaaccaactttaactgtgtatatcattacagatactttgctatcattttatgtattgatggcatatatatacctagagaatttaggttttttaaaaccacaaaagagattgtgtcaacctgttgctctgtacctcattttctcactcagtatatcttggagcgttttctatatcagtacctgcatcttctttttaatggctgcttggtatggtcatatcatgttgttttggtgttttgtttacaactatttggattgtttcccatttttactatagcacgttatgccattttgaaggttgcacatacattttgtacaaatgttactgtagaatagacatctagaaatagcattgggcaaagtgaattcacattttaaatttgcatagatattgcctaattacccttctaaaaggctgcagtattttacactacagccatagtagatgagagtatccatctcttcataccctcattggcactggtggttaatcatttgttttaatatttgccgatatggtaggagaattatggtatttcattggtatttcatggttaatttggtttttatgtctctgattgttagtggagttgagcattttttcatatatttattgaacgttatgtttctctacctgcttatatctggaacatgtcaggtgaaataaagatcgtcagggagagacacacatgtgcctcttaaatctatggatacagtttgtatatagtaggataaagagatcttactgacactttttttcttacatagataaccagctgtcaaaacaccacgtattgatcagatctatttttacctattgattttaagggccatctttattatttactaagatttaatacacatctagctccttccatatatttgtccattactgtgctaatgtcagttttaagtgtagctttgtttcagttagctataatcacactaatgctacattaaaaagaaccagaaaatcttagtggcatacaacaataagcacttactcagggatctggggcttggctgggattgggctcatccagactgggcttgactagccagctctgcttccggtgggaacagctggagaggatccgtctctccctgagagctccggagaccctctgctctggtgcctctcatccttctttgaccagtgggcttgctgggtcatattttcctcagggtaacagcagatttgtatgatcacatgctcagctgcgcagtcatattttagacccctacttgcttctgctaacattgcttctgctaacaccccattagccaaaataagcctaaagttaagagaggatattccacatttagagggaagaactgctagttacatggcaaagggcatagatgcaggaaactataaattggggtccaaagtttaatttacctttgggcaagtccttcaatctttcttctttttcaacatattagtttttggctattttctctctctctctctctytttttttttttttttttttttgggacagattctagctctgttgcccagcctggagtgcagtagtgctatctcrgcctcctgggctcaagcgattctcctgcctcagcctcccgagtagctaggattacaggcacacaccaccatgcctggcttatatttttatttttagtagagatggggtttcactgtattggccaggctggtctcaaacttctgacctcaagtgatccacctgcctcagcctcccaaagtgctgggattacaagcatgagccaccacgccctgcctggctgttttctttcacattgttttttccagataagcttttgaatgagcatgcaaagttccaaaacttctgagtagaagtttggttgggttcmcattggtcatatagactaatttgggtagaatttatatctttacattastgaatgttcacatccaattggaaacattttgtatgtgttcattttgtatttcagttttatatcttttgacaaagttaatttttcttataaatattttcagatraactcaaaagcagaaagagtagcacaatgaatatctacttatatgactctcagagttaatggttatcaagattttgccacatttgctttatctatcccttttttccttattttttgccttagcattttcaagtaaattctagtaatcatattattttacctgtacatattttagcgtgtagctttttaaaaatagacatatatrcagtatacatagatacatatgtacatatgtgtgtatgtatgtgtttawgtgtgtttgtgtataattattgcagctaatacaaatcaacaagagctccttggtattatctaatgaaccatctttaatctaattttcccaatgtcyaaaaattatctttttagttagtttatttggattaaggtctgtagattaaatttggttggtatgtcacttaaatcttttcctctagagtaatyctcttcatctgtttcttcatgccacaaacttatggctgaaactgagtcattttttatgtagaactttccatattctgaattttgctgattccatcccccggtgtcatgaaatatttttctctaaccactgtgggatttttttttaaccactgtggcattttctgttaagcagctggttagatctacagactctgtcagattcagctccaagtggcattttttttttggaggaaggggcaaaaatatttcataagtcacrccattgcttcctaggacattcatcctggcagaagatacatatatttaggtttgtcaatagyatctggttcacgttttatcagtctcatccacccgttacgaagttctcttcttaacgaattatttctgcctcaattcgttacttcattagggattgcaagatcgtgacattctaattctaccattccttttgcatttattataatcaattatttcgttaccttgaggtagaattcgtgtaaaaacgcttagatgcctgtcccaaacacacacattttcctgagtgcgatttacacttgtagggtcctgtctgtgttaaagatgctttgctgctctcccaccaggcctgggaataagtaccagactgatgatagacggggaggatgatcctcctgaaattctagccacagggaagaaaagtccttgcaatgaaagacactrgccagggaagctggttggacacacacacatacttgcacattcacaagtatctttcattaaaaggagatgacctactgsttccctcctgccagtgatgggccacaaaacagacatgacacgtgggccttctcacgtgtcccagatttgttttaaaartcattttcaattcatctagttttctrttaatgttaaaaggttggaaattatattttaattagtgttagagaygtacatcagcatcatagaattctgaaactactgatgcaacagaatcataaaatgtttaatgagacatatcaatttaattctgctgcttggaacttaaaragccagagttcgtcagcattttgctaacaaatgtcatcatttacagactgaatttggtgctgattatgttcaccattactaaaaatattgggaaatgagctatgcttggtgaaacaaagggcattttttwaaaatttggctgattaaatgtagtttagaaacaaaataaacttgcataaacttgcaagtgtttggaaacagtctggtttggtaatagtcactatgtttaaaccctgatgcagatgatgctgtgtatctggacaatgagaaagaaagagaagagtwtgtcctgaatgacatcggggtaattttttatggagaggtcaatgacatcaagaccagaagctggagctatggtcaggtgagccacttaaaatttgttattgtcaaggacatttttacttcatattttttgtcacatgtatccctrcaggatcycatatatcgatattagacaagcayaatttcctgctttttaggatctgagactccwaggcagwgagcataggagtagggactcataaagacaactgcgtaatttatcagctgaaaccacatatctctggktattacagtgttacagaaatgagagattccatgaataatgtggcattctattgagaaatgctttggccacttagaacagtgaaatctcattagttcaacctggcttataaagaaaggtattttcaaagtgatgcaaagaatactgcaaggggtgtgcccaattcaaagaaatagcttctttttktttttttttaagtgttagcstagggtactgctaattagaaaagagtgttatcatttcatcaaaggaagggccactgagcttttacatagraagattttatcagctgcaagttgattgtctagacacaaagtagcaaatggcatttctttaagrtgttcagtcattcaaactatttcagtttggtatctttaacaatggagcaaatgaatgatattttaccaattttccataaatgaatgcatgtcctgtgatttcaaaatgatttttaattagcgacacaagcgggggcgaatgtcatttctcaggagttttggctgggatggctggaactgtgcatcattgcgctgggcatccagcagggagttttcayrgaatctggtggtcacagggtactttcttggctccrgatgccttgctttgacttccatatgggatctccctgtgttcctyacccactgctccagtaccygtgttatcctgcctacctggctttgtgaacagcttccctgactccggagaattacatgcccagtgctcaggctycccygcctgcatttctaatgtcctgccaagctacaagctagttggcaccccctgttcttggattcctgcctgactccctggtttcaagccatcccctcctcagtgacatgcaacctttgactatactgcctactgcctgatgcccttgtcttgggtccccaatttctagcctttagcctggtgattctatttatggyccaaatatgacaatctatagatagctaamaaggggaaaagtcatcaaggtgggcagcaaggaggtctggaaaagtgtcccaagcccagtcaggkcactcttcgccagcttgcctttgggtaggcaccctggagcacagtcacttgattgtatcttctgccactcaaagaggctattggtgtgtatcctttggccagaataaccagccaagcrtgtttacagtgatgcagggaatcaatccgttctatgactatttccttaactctccarttagttgctatcctgcccagcaaayacagctgagagaagctgcttaataagaaccaaaatactgagctatttgcatacctgaagaactagtgcaattacccattactgcatccatcctgtcagtttgggatacacccagagtgggtattctaactggactgaataaagaattgtgtggtaattagccattatgattgtggtttctgtcacaagcacttgggtggatagcacacaaggtttctctattcaggaaaatctcttactacagtgaggtacagtataggtaaaatcttcctgtcttgctatttgatctttattcctttttaagaaaattctggtattgcytgtggctagcagttctttctaagragactgaactggtaccagactcctcccttgatagygtaatctactttctgcagccttctgccctctccttgatcctggggtccaccttgtctcagaagaggggaaaccttagagggacagtcactatatgaggtctcctactattttgggtgcaaactaagtagtgtgaagcaccttcctgtgatacacctgagagctctttattttckaaatgcacgaggattcacattactttcgaggtcctaagactctggcctgactttggtaaatgattcattccttcttcttgggtacaggagccaatatgttgaaaagaccttctaaattgaatcattttctgaagaacttcaagtcagcttatgatccctgagtatatcaactctctagtatttctgtttatgtttctggcttgcttttatattcttattcactttaatgaaaaacaaaagaagatgtctcattccttctactttaatatttcatactaaagattatgggagatcactatacaggaaacacacatttctaaacattaggttgtggtttcatgttatttttcatcagagaatattttgcttgcagagtgaacactagtttctctttgtttttctttctccaaatagtttgaagatggcatcctggacacttgcctgtatgtgatggacagagcacaaatggacctctctggaakagggaatcccatcaaagtcagccgtgtggggtctgcaatggtaagcagcaattactgatacctaaaatctgttacacctgtcatttgcctcagtatatatgccagttcattaagagctgctgaaatgatgacttacacttaataaactttcatttgtaagattctagcttctgacacccagttatagctcctggaattttctgagcttatcatgtgctataaaacaaaattatcgtctcaatactgtatgtttctttggctttagaaaacaatgatagatataatgatactgtagaccagttattcttaagaaccccttgcctagagactgaggagtgatcatgacaaaaatgtcaatgmctataatcaaacagttgatcaaccaaacatcaaggtgcacagaagatgtgcaaggcacagcttttctcaattttcacactgatagtaagagtgaagaaatgaatggctacatctcatcctaactcctgtcacaaggatgtgtcactgtagggctttctcacttacgaagtgggtattgattctttgcaggatcctgtgtggtaagtagggcagccattactcatgsacttttacaagttaggacacagggtaaggacagctttcagtgacaaagccacagctagaactccggtctgctgacttcaaatctagacattttctacttttcatgccgctctctgcaggatatcctaaaacaactttgagaatgcagagatcttgcagtggaacaactttctgagaaaggagatagaactcccatgagtgggaagggtgggccaggcataggacgtggattaaatgggatgtccaggacccatgcagtcctggattatatcaatgtacccaacatggagagccagatgttggtacagagaagtagacccartctggctgaagagtagattatttctgaagaaatgttaaactgggtggtatttcaaacaatcaaagactgaaaaaaagaaatacttatattaccaatttccctaagttttctaagaaatcctctttttgaaagaatgttatgtttgagtttggtttgtatattcttttgagctaaatgaaatcaatattgttaatataaaaatattagactgtgaatgatatgaaatataatttctggttagcttttaagaatggtggcttttattttattaataactaagctacatgtgaatttaagaaacagcagagcataaaaagtaaaaatagaaaccaacatgtaaaggcagttttgtttcctatgcatttacattccataatgggaagccaatgaattccaaagatttgggggaatgttgaatttgggaaatgtttaccaaagtgtcatgaccgtttataacaaatatattagacttgcatctgatcactatttttactgtttcgcccacaagatttctctttttcttctttgaagttaccataacaattttgcagtaagaaaggaagcaacagctagcagtggttaaatttaaattaattccttcttaagcattctaaaatggcacactcatcagcataagcttactcacacactgtgtgtacttttacgcacccagaagtcagaaatcactgcctarcagaagccagtgcaaaagagaagcagacaggaagcagttaacctaatgtgtctgtggtggcagctggctaagcggaagctgttaattattgaataagcacacatactcctaatgcaaattgccctgagattttattaatcatgtaaagcctatgaagttctaagtttgaaaatttatatcccaattaaaagatttaaaactagacagagaaaatccatttggaaaacggtttggttttatttttggagggggagaatttgggtgttaaggggtagaggtcctgacctgagacattttgagcaatatttccatttccgtcatacccttgtttatatacacaaaatrttcaatggttttcaaaaacactttcacctctattagctcctttaaaccttagaatacctctgtgaatctttccaaaatctgttccgttttaataattttaaaagctaaaatactgagcctccaaaaatcaatttaaaaaatgacacagaggaaagatcaagtgttctttggtcattcaggcagatactctcccgttcacaaatcctggaaatctatcatgaaatttctgaatgcagttaaacaaagaacaaagacaaaaaaaatctttaaatttctcaatgaatgatttgactttattagtatgaaaagatgtgcctagagagcccacaagaaaatgttctgaagttgtggactcttagccagaaccctgttgcaggkcgacagagctgtgtgtgttttctcaggggctgggcccaggcctcacaggtaaaacagaggctggtgcagagttgttctgaattcctctcaaacacctcccagcctggtcatagaggctagaaatcccattcgcaggttgcaaatgccagagcagcggtataggtggcatgtggactctccagaagaaatagcacatagatctcagttcatccccaggtgagagtgaaggaaggcagaactttcctgagggcacttgctgctgggaaacagtgaggatgagcagaccagtctttgctgggtatctggagagagtggagctgggtggggacaagatgcagagcacacgactggggccccaaagacaaatttgcttactgtggtccaggacaagtctagcactgaaggttggcaaggagttttcaggcaacaggtgggtgcatgttgaaaaaagcaccgataacccaaattgtgcaaactttcaatcataataagaatctgaatttgggccaggaacggtggctcacgcctgtaatcccagcactttgggaggccgaggcgggcagatcacctgaggtcaggagttcaagaccagcctgaccaacatggagaaaccctatctctactgaaaatacaaaaaattagccaggcatggtgatgcatgcctgtaattccagttactcaggaggctgaggcaggagaattgcttgaacccgggaggcagaggttgtggtgagctgtgatcacaccattgcactcaagagtaaaactccatctcaaaaggattttaagtgcacaatccccagataaaaatatttattgttcagtatatttatatttattgtatgtgaccttgggtaattgtttgttgtagaaggttgtcctgtgtagaatgtttaacgacatccctatcttctacctgggggatgcaagttgtcataactgttcccttaccagttgtgacaactcaaactgattccacatattaccaaatgtctactgggggtaaaaatcacccttagtgaggatgacagcactaaacccctctgtgactcagtttctccacctatggaatgtaagtaacactctcttctcacctgcatagcgaatctgtcttcctaactcactcaaaacctgctggttttcatccttgactgaaaagaaagtgaaggcagcatcatatgggaagcgactcagctcgtgtcgagggattggaccttgattctggttgtgctattaacttactatgtgacccagggtaaataactcacctctgctggcctcgcatctttgtctttaaagtgaaattttgtctctgtactcaaaccacattggcagcaagaatactcttttattcttcaaaatagtgctctcccttcttctattttttcctttatacattcagtaacttcccttgttcttatattgagttgctgttatttcactttgatgtaaaagtaggaaaagttatgacaatctggacagcctggggctattggagtttcccaggagaaagcaagtccaaaatcctgtattctcatcatctagagattaggcctgagatattataaccttacataagctaacttttgcttaggctcctttaaatactgagtggtgcattttaccaagctatactgcagattgatttaagagagaaaagaaaaaaaagagaagcaattagaaaaaatgaagaaacttgcccacagttatacttctccctttaaattgcattgcttgattgctgctttctttycaatgcatttctgatgtgacagttcccaccaggaaaattgccagagaaagctaaggagaatgcttaactttgtgccatccgaacacttacttccctcacatggcattaataaagcattctattgctagccccaagtttctgtgaataagccagacatggactctgagccctgagtcagactatcaaagaaggtgggccgtgacatattgtgacaagggcagcatggttctggggaaaagggaaggctgtgcaaccacctggcattactgcggcgtggttacctgtctatgcctgttcctgcctcccgactgataggatctggcagcaactatgggcagagaatttcccccaaggagatgcagctgcttctgcaaaggctgccgytactgcagataaaggctcgttattcactgtgacacacctacatgtaccacctccatccatatttgctccagtgggtcaaggcattaccagtggaggatctgtgtcgaaacacatgctgaaccagcgtgtgcaatggggaggactctccaagagtcttctgggtgaggaagcagaagcccttggaagtggtgtccctcactcaaagtcacacagcaaataagtggctgagctgaaaccagatatggtccttactctcagatcatattaccttagagggccactatcaacacgttattgccaataacacaataattatgtaagattgarttgccatttcctagaaaagaagagagccccaagggaatggagcccagatgaggcaaattattgaaaatggggaataagtgaagaaaggtatcaatcagaggattctaaatagccataggcactggggccctggagaatgagcttccaaagacgatcaggtaccaaatatgatatgataatggtggtggtgtttggtggtggtggtgatagagttagtgatgatggtggtggtgacggtggtggtgatagtgattgtgataataatggtggtgatggtagggtgattatggtggtgatagtgatgatgatggtgatggtggtggtggagatggtgacggtgatggtggtggtgatggtaggagtgatggtggtgggagtgatggtggtagtggtggtgatggcgtaatgtggtggtggtggtgatttatgatggtggtgatagtggtagtggtggtggtgatggtggtaaaacactcagtatttactcatttgtttgacaaatgtttatggcaatctaccagtctgaacactggagtacaattgtgaacaaaattaagtttctgccttcacaaagcttacagtctaacagagaacacagactagtaaatagaaaattttagctcagcatggcaaattctgtgatggaaataagcatagggttgtatgggaaagcaaatctctcaaatgtagctcaaaggtttcccaggactaaacattggatcaaaagatagaagaatgtctgaggtcccacagtaattaaccatgctattatttgaagaaaccctttctccatggtggaaattatatacaaacagctagtcaccaaaagcactgaagaaaaatgtagtagrgggttatttgctcttctgggggcttgtttgttttgcaattcagaaaactaaggttgacacaactgaagtttattccataggatctcaacatttacagttacttgatccatggtattctgattcagttgtagtaagaaaaaaggtaatattaatgagaaaattaggaaagtaggaggagagaaaaaaacgtcaatatagttacatatttttaaatttcagtgtttgtactgctgccatcctggactatccagcttcccttgagatgtatgcatttatttttaaccctggccttttgctaatatcgaaccacaatgccatcattaatccccattaatactttgctctgactatgmcttttgggaactaactcatgactaaacttttttaaccaatcgatgttcgatgtactctttagcattgtaaaaaaatcttgaacttcagctagtaaatcaaactgaccacaattcggagtaggtcctggatttttctaggacacagtacaagatgaatgactgtagacctttgagatgaaatggactttagtgcttctgatcctcatgcatctgtgatcctacagataaacagaaaataaagttattttccctttgtccatcttttcctccccctctttttgtcccagtatttagaaagatttttttctttccaygcatgaaaaagacagtaatgacataactacttttatatcttgccaagcagctcctcaaggggttaactataaaaccatgttttgttcattttctttcaattgtttacttggtcatcttataggaagcttcacgttgagcaaacctcttcatgcaacaaaccttaattataaatattcagattacatttaaaagttcactttgattagaaatttcacacctgagtcatcccaaatgaactgtaaagacagaaataaatatataaagtttgtatttatttctaaagtttattccttgatcatacagaccagtcacaaggtactttcgtaacagttttattaagaaaaattttaattacaaagcaatatctaacccatcctttggtttataaagcagcttaaacctctttttttggagtgaacggtcrtagatacatctgaggacccaggtgctcaatgggcattgtccttggcatttctaaatcaccaaggaactttttyrcatttacccatatggattttaatttttgaaaaagttcatctatcaaaacaaatcatgattatgtaataataccttgttaccccattcttgtgtcagatttatataactgccaatgggaacttctaatgatggtggcggtggtggtaatcatctctaccagataatgagtatgaccacactgaatatgattcggtgtcactttgtgggggtaaagatacaacttccatctggtcttttataaaagcgacaacagcctacctgcattactaacccacagatgcctagaggtcaaaattccccaggtggtgaccactgccagatgtaggttccatcatggacttgagtctccatccagagcttctgggtctccaaccctatcagcttttatttaaaagtgttattgtctctttctatgattcatatcaggaatgaaatttctcagtttggaacagcakaaaaaggcagaagcctccggtgttccttgcaacctttccaattrtaacgcatatcaattagtargagctctcggggtgacaactttgggagaatccactgatttatattaatgaagagtgttactgtagtccaacagagtaaagtactaaattaccaactctaaaaagattttttagaaaaccattaaagttaaagtcaaggtatttctaagaatgaaagtcatttctatgattctaaaatgacccagggaattcaatgatgaatgagaggtacagactcaaagcaattctctaatgtattcaaagtaaacaatacyataaggtcaccttattcaccagggattttcatttctgttcattgaagatttttwaaaaattgacagatatattggaagccagtgggaaaatagaatttatctaacagaaagtatcttcatagccacttttgagaaattgcataaatccattccataaataaccaaagtgcaggtggagagactgaggcatcaggaagttaagtaactttatccaaggttgctggtagcactgggggtgggtcatgagttgcctggccccactaattcacacacaatgttctatttcccctggatttgtcctctgtctgtcctctctccmggtcacatgagctccttggatacagatataatgccttttacatgtcctgtctgattcaatccttctctttcaggtgggggcagtggggggacgatgaactgctcagacattatcttttttctcttatggtaaaagccagcagtgtaatgaagtttccatttgtggtcaaacagcttggtttctcaattattaagcttacatttcttatgcctcttcaccccatatttttggagaaaaacagacatttattacaaggcatctctcgaatgtgataatcatgggcaatctaaatgtctgctttccctgaattgcttcctggaatgaggtttcaatgctgcagctattctgtaatcacacaggctatttctgaagcacagggatgctttacagcactccctccaagctgagcggttggtgctgctctggtctcctggggccagcatccccaggatagatggatagcaaaggagcaaagcaaagccagctcagccctttaggatatgcacagcttcatgcaccttgggttcccttcataccctctttctttcccctgtctcctcctgttacatccttccctttttcctcytcctgctctgcatttttccctctctcatacgtccattcctttaattcagatatttttgaggcctgttctataccagctctacaccatgcagcagtggtatggcaatgaaaacagcaggccacacttggagaccttgaaatctcagttttctctctcagtccacatttgcttatttctctcattattgtcaattagtaaaatatgttttggccaaatgagcatcctcagatactgagagagacaaggttaataatttcctgtggtcatagttatcatgaaaaatgagtctaattacccacccctatcagagcttgggtcatatatataccaaaggacattcatatatcggtagttatatgcttcatactattcattacagttagttacaggattttttttaattgaagtaaaatttacatacagtaaaaaatcatggatattaaatgcacaattcaatgacttttgattggggtaatcaccaccccaatcaaaatatagacatttccacaagctcagaagtttccctcgtgcttcttccggtcaatccccacctcattaggtagctactattctgatttcttgcaatgggttacatttgtctattcttcaactttacataaatggattcacacagtagaaatagggctggcttctcttactccatcaactgttacatgtgttttcaatgctttccttaccattactaagaagtattttattgcattgtatatcacaatttgtctatccattcacctattgatgcatgtttaagatgtttccaatgtgaagctattatgaatacagttactataaacattcttgtacaagtgtttttgtgtatgtgttttcatatatctggagtaaatagctaaagagagcatgcctagatcagaaagtatgtatatatttaactttataagaattggctagttttccaaagcagctctactgttttacattcctgccagcaacatatgagagttccagtttctccacagcttcacctattcttgatgtcttgaacctttttaattttaaccaatcaaatgggtatatagtggcatttcattgtagttttaattttcatttccctgatggctaatgattttgagcatcttttaatacatttattggctatatatatatatatatatgcagcatgttttcaagtctactgattttcttattcagtcatttgtacttttattattaagttatagttgctctgtgtatatacctctcatttgtcagatatgtatagaacatattttccccaaactatggcttgtagttatattttataaatggcatattttaagtaacaaaagtttttaaattttataaaatcaaattttttcattgttctttaatagtcatccccagtaaatgttctttccacatgaagactttcacatgaatcactatttgcccatgtttgccactatttctcctatgttttatttttgaagctttataatttgaacttttacattgtggtctatgatccrtcttgagttaccttttggtgttgtgtgaggtagggatcaaatcttattttttccaaatttatccatttgttccaccagcatttgttgaaaagactgttggaaaggctttcattcgttgcaaagagtttctttgttgaaaagactgtcattttcttcattgaattgctttggtgactttgtcagaaatcaaatgtctacatgagtatggatctatttctagactctcttttctgtttcattagtttatatgtatgtccttatgacaataccacactgccttttttactgctttcctctagtaaaccttcaaatcaggtagtcattcatttttgttcttctttttcaatattatgtttaattattctagatcctttgtattgctatgtaaattttggaaacaactttccagctttaatgaagtgcctattggcattctaactgtcccgttgtcttgatctattaaagaagtattaaaatgtagcctatagccatcttccagtgatagcacatccattcattcaacagaacttattgagttcccactctgtgctagccctgggaatataaagtcaaaacagcatagtgccttccttccttctgtgaacataaagtctgggaaaagaacaaggacagtctaaccaatgacacaatacaatgtgataaatggatagtactatgcaaagagtactatgtgatcaaagagtaaggacatccaaatcaaggtgataagtaaagattcccagggtgaaaccagctgagttttaaaggatcaatagggcaccaggtaaagaagaggtttgagtgtggatggacattccagggagcgagaataacatttccagcaacaacaaggcagaaaacagcttgttattaagcaaaccactatgaaaaaccaaagacatggtagatgattttcctttcctttcgaccaagtatgtgaccctggctgttgtaagtgccataaaagcccagaagaaaatcaaggatgaagagccaggcaagggaagaaatagaattgctgctaccctatttcttttttcttgtgcattttctgggatgcctgcccatggaataacctgagtacttgaccttcagctcatctcccttcctatccttacaacataacttggcaaatggcggagcaggcacaaaaacagatctctacattcccagaactgtgaccttttaaattttattttttagaacaattttttcaaacagcaattgaatccaaatacataaaagagaaaaagcagagcagctattattaaagaaaggtggtgactgcagccttgactatcaacattcaattctcacctgccccaccccacaacaccgtaactactgagtttcttttgcaaaaccctagcatgtcatgaagcacaatytgacatccaccacaccacttccacctgtgattaagtctggtcaccaccacactgtagctggggatttgtggttcacaaaacctggaaacgattttctacaggaaataattcttctccttgccaaacttaacgctaggcctttgatgttagttcgtgttacccaacatcaaaattcatttccaatggtctttgagaaaccattgtggacaaaattaggtataagactattttctaaaagagttatggaaatcctagcctttatgaggacataacttttaacaatgaaatttaacggaatatgataggtttataacagagaaaagtcatttcatcatagccatataaaatgcacacagaggagaaaagtacccttgcatatttttttaaaaagcagaaagaaatagtaactatacaaaatgtaaaggtctgcgctacaggaaattgaagaatcaagaaatgtcacatttctttatttttcagtatcaagttagaatctgctcatattccaatgaccaaaattaaacagaagtccagtacgggtcatgttttagggctatttctattctttgaattatacaggagaaataattttaaaatcatagataatattatactatagatgctggtttaatttaaaagtcttcattgattttcacagctttattgagatatagttgacaataaaatgtgcatacttaatgtacaattggataatgttgacatgtatatgtacccatgaaacgaacactaaaatcaaaataatgaatatatccattgcccccagaagtttccttattgtaatttcttccttaaaccactccctgctttgtgtaccatcccccatcactgctcagccttctgtcattatacattgatttgtgttttctagacttttacacaaatataatcatgcagtatgtactccttgtgaggcttcttttatgcttccttactgtattctgagcttcatccatgctgttttttgtttcagtagttcatwcctctttattgctgagtagtagtgtttcattgtatggatgaatcactatttgcccatgtatttacttgtggatggacatttaggccattttccgtttttgcctcttacaaataaagccagaaactttagcttggaagactttagtaaaagtctttgtatagacgtaagcttttatttctcttaggtaaatacctaggagtgaggtggctgggtcataagctaaacataggtttaatttttaagaaactaccaaactgtttcctaaattggatgggcattttacattcccaccagcagcatatgagagtctaaagtgttgcatatcctcccggacacttcatatgatcagtctttttaatcttagacttttaaatagatgtccaatgttaccttgctgtggttttgatttgcatttccttaatggctgatgatactgagcatcttttgttgtgattggccacccacgtattttctttgatggaatatctgttccaatatttttctcttgttttaaggttgtgtttgttttcttactattgagtttcaagggttctttacatattctggatacaagttttttctttttaatcagataaaggatttacaaatatcttcttccactctagttttattttttcattctcttcacagggcctttcaaagagcaaaggttcttaatttttatgaagtctgatttacaaatttttttatggatcatgcttttcatattttatctaaggaaactgcctaacctaagatcacacaattttctcctttgcttccttttagaagttttataaccctaggttttatatttaggtctaaggttcattttgagttcatttttacatatggtgcaaggtatgaatcaaagctcgtatttttgcatatgaatatccaattgatgccacctcattttttgaaatgattatcctttatccataaaatttcctttgcaactttatcacaaattagttaactgtatttgtgtgagtctatttctgtgttctctattgtgtcacattgatctgtttgtatttataccaaatggtgtcatgctacttaatttgaaagtattacatgtaattgtacccaaattctatttaattttaagttttattgaattttactttaataggaaagaaattaaattgcaacagaagaaattattaaacttcaaataaatatttcttcactacaagagatatcatttcttaacaggttttcctaaggttattaaaaattataaaaaccattaaaagaataaagtaattatgtacttttaaattatactttaatgttagatggtatcaattaactgagagacccacacactaaaacattaccattttcactgttcctctcctctttctcctatcttttttcttaggatgattattgtttttatattatcaagtcttaaaattcatctgtaactgtaaatcccaaagatgcttaacttatatagagttttctcacccctgaatctgttatcacagagtctctgttcctgggttctttgtttgactyagcccctaattattttgatatcactttcaagtattaatagtttggttatgataggtaccatattccctgaagtacttcatgttcgacaatgtgtgtaaaagggggctgaatgcttgatttgatgctccacttggtcactgttgatgtagagaagagctaatgatttgtgtacattaatcttgtatccagaaactttgctgaattcttttatcagtcctaggagctttctggaggagtccttggggttttcaaggtaaacaatcatatcrtcagcaaacagtgacagtttgacttcctctttacctatttggatgtcctttatttctttctcttawcttattgctctggctaggacttccagtactatgttgaagaggagtggtgacagtgggactccttgtcttattccagttctcagaggaaatggctttcaacatttcctcattcagtattatgttggctgtgggtttgtcatagatggcttttattacattaaggtatgtcccttgtatgctgattttgctgagagttttaatgataaagcaatgttggattttgttgaatgctttttctgaatctattgagatgatcatgtgatttttgtttttaattctgtttatatggtgcatcacatttattgacttgtgtatgttaaaccatgtccacattcctgttatgaaacccacttgatcatggcggattatctttttgatatgttgttggattcagttagctagtattttgtgaaagattttagcatctgtgttcatcaaggatattggtctgtagtttccttttttggttatatcctttcctggtttttgtattagggtgatgctggcttcatagaatgaatttgggagggttccttctttctctatcttgtggaatagtgtcaaaaggattggtagcaattcttccttgaatgtctggtagaattctcctgtgaatccgtctgttcctggacatttttttgttgataagtttttaattaccatttcaatctcactgcttgttattggtctgttcaggatatctaattcttcctgacttaagctaggagggttgtatttttccaggaatttatctgtcttttctagattttatagtttatgtgcattaaggtgttcatagtagccttgaatgatcttttgtatttcagtggtgtcagttgtaatatctcctgtttcatttcttagtgaggttatttggattttctctctttttggttaattttgctaatgatctatcaattttatttatctttttaaataaccagctttttgtttcatttatcttttrtatttttgtttgtttcaattttgtttagttctgctctgatcttggttatttcttttctcctgctgggttagggttttgtttgttcttgtttctccagttccttgaggtgtaaccttagaatgtcagtttgcgctcctttggtcttttttctgtaggcctttaggtctatgaactttcctcctagcactgcctttgctgtatcccagaggctttgataagttgtgtcattattgtcattcagttcaaagaattttttaattttcatcttgattttgtttttgacccaatgctcattcaggagcaggttacttaatttccatgtatttgcatggttttgaaggtttcttttagagttgctttccagttttatttctgtgtggtctgagagatggcttgatataattccaattttcttacatttattgaagcacattttatggcttatcatatggtctatcttggagaaagttttatgcactgttgattagaatgtgtgttctgtggttgttggataaaatgttctgtatatatctgttaagtccatttgttccaaggtatagtttaaatctattgtttctttgttgactttctgtcttgatgacctgtctagtgctgtcagtggagtactgaagtcctccactactattgtcttactgtctatctcatttcttaggtctatttgttattgttttataaatttgggaacttgagtgttcagtgcacatttgtttaggattgtgatattttcctgttggacaaggccttttaccattatataatgtccctctttgtctcttttaactgctgttgctttaaagtttgttttgtctgatataagaatagctacccctgctcgcttttggtgtccatttgcatgaaatacctttttccacacctttactttaagtttatgtgagtccttatgtgttaggtgagtttcctgaaggcagcagacagttggttggtgagttcttatccattcttcagttctgtatcttttaaatatagcatttaggccatttacattcaatgttagtgttgaaatgtgaggtaccattacattcatcatgctctttgttgccygtgtactttggtttttttgttttttgtttttgctttttaacttgtatttttgttycataggtcctgtgtgatttatgctttaaagaagttctgttttgatgtgtttccaggatttgcttcaagatttagagctccttttagcagttcttgtagtggtggcttggtaatggtgaattatctcagcatttgtttgtctgaaaaaggctgtatctttctttcatatatgatgcttagtttygctggatacaaaattcttggcygataattgttttgtttgaagaggctgaagatagggttccaatcccttctagattgtagggtttctgctgagaaatttgctgttcatctgataggttttcttttataggttacctgatscttctgtctcacagctcttaagattcttttctttgtcttaactttggataacctaatgacaatgtgcctaggcaaagatctttctgcaatgaatttcctgggtgttgtttgtgcttcttgtatttggatgtctaggtctctagcaaggccggggaagtattcctcaattattaccccaaatacattttccaagctttcagaattctcttcttcctcaggaacaccgattattcttagctttggtcatttaacataatcccagacttcttggtggctttgttcatattttcttattccttttcctttgtctttttggactgggttaattcaaagaacttgtctttgagctctgaatttttttcttctacatgttcaattctattgctgagactttccagagcatttcgcattcgtaaaagtgtgtgcaaagtttcctgaatttttgcttgttttttctttaagctatctatttccttgaatatttctcccttcacttcttgtattattctttggatttccttgcattgggcttcacttttctctggtccctccctgtttggcttaataactaacctccttaattctttttcaggtaaatcagggatttcttctttgtttggatccattgctggtgaactagtgtgatttttggggggtgttgaagagccttgttttgtcatattacagttccttctcatctgggtaggctctgtcagagggaaggtctagggctgaaggctgttgttcagattattttgtcccatgggatgttcccttgatgtagtactctcccccttttcctatggatgtggcttcctgtgagccaaattgcagtgattgtctctcttctgggtctacccacccagcaagtctacccagctctggagtgacactgggcattgtctgcacagaatcctgtgatgtgagccatctctgggtccctctcagccaccggaayagcgcctattcyggtggaggtggcagggggtacaatggacactgttagggttcttagctttggtgtttaatgctctatttttgtgctggttggctccctgccaggaggtggtgctttccagagagcagtagctgtggtagtatggggaggaaccagtggtgggcagggccccagaactcccaagattatatgccctttgtcttccactagcagggtaggtaggaaaggaccatcaactgggggctgggctaggcgtgtctgaggtcagactctccttgggcaggtcttgctgcagctgctgtgggggatgggggtgagatttctaggtcactggagctgtgtacctaagaggattatggctgcctctgctgagtcatgcaggttgtcagggaagtkgggggaagctggcagtcacaggagtcacccagctgccatgcaaaccaaagggccagtctcactcccaccgtgcccccctcaacagccctaagtccatttccaggcagagggcaagatggccttgaaaacctgacccggtctacccacctcccagctgcaaaagaaaagggtttggttcttccacacctgtggagtctgcacaccggatttgcaccctcccccaagttttggccaggaggcttctcaccccattcaaattgctacaaagttsagctagagatttccttctccatgtggagttttatcctctgctcctctgtccacctttctgatggatctctgtggtgccaggcagggatggcctgctaggggacctagcaagctcccagggcctttctgctgcttcctctacccctgtatttccctcagctctccaagttgacccagcaccaggtgaagtcggaaacttctcccacaaacagaccttcagcttctccagtggaggtttgtgttcgggagaggagggtctccctttcccacttgcatagttgggacactcacagtatttgggggggtctctcgggtcctgcagaagcagtctgcttccttcagagagtctgtggtcctctcaggattgctggtttgttcttgcagtcgacctggatctaaaatttacagcacgagcctccacatgctgctctgtccagagctgcaatccagtcctgcctcccatccaccatgatgatccaaatccttgggttctctattttaaggacactaatcatccttatgttgtatcatctttgttttccataactatggtactattagaatctctctaaataattcatcactttggttttttattagtattttctttgatatctcaagttttcttctatgtcattaatttttatttttaataatatgtattctgtttcttgcagtttataatttattattagctctgtaatggtatgatttggtcctcaatttgttgccttggtctgtgatctcctaaaaggttgtgagaaaaatgacttatgctccttaatttcgttttcttctatgtatattttttcatgatctctccctctctctctttctgtctcttcctctgcatgcagtttcttttccctatatttatgctcaaacttgcatcattcttgtctctagacgttctatttgctgtaataaatgaaattcttctcmatctaaggttagtttgatctcacttctgaactacaatttgaggccaatgtaccacattctatctactcttcagtactctgcaagagattggagtgaggactacagtattagaagatgaacaatctttggtakcatgcttagggtctgctctttcccttaagattctcctacatctgtcactccagaacccacccccacaactggaggcatatctcagttccattgggggatacgctcagcttgtattatttcccaattgtgttccagaatctctacctcttttaaggtgcagatactttttcactcgtttctccacagcaggtgtttccaccattctgttcagaacaataaaaagakcagcttttttttttttttttttttttgagacaggatctcactctgttgcccaggctggagtgcagtggtacaatcagctcactgcaacctctgcctccccggttcaagcgattctcctgcctcagcctccagagtagcggggactacaggcatgtgccactatgcccagctagtttttgtatttttagtagagatggggtttcaccatgttggccaggctggtcttgaattcctgacctcaagcaatcyatctgcctcatcctctcaaagggctgggattacatgcctggccaaaaagatcagcattttgattatatttattactttctagawtttaaaatataaattagaaatctcaggtttttgttgactagctggtaagatggttaaggttaggagctgakccatgttgcctctctgctttactccatagtcctcatgttttgttgggaccatgttttgaagtttattgcattatgctgataatgacttttaggggtttttgaaatttttttctaattttgtaggtattatgggagggcaatttagtgtagccttaatgaagttgaataatgcctcctgtaygtagtcctggacttgtattgtctacttgaccaccagtgactcaagaccaagacactttattctgccactggtcaaaccctgagatcatgagagggtgttaaaacagccaactgtggcatgaaaaatgacaaacatgtcctccaaacatatcttgttgcttatgaggggagatattattttaaccctttacatctgtcactaaaaacttacctctttcatggcctgagctccctagaaatcaatgttctaattagaaaacagtagctaatctgcccaaatgctaataaatgagggttgtgatttatctagcaacaggggaacagctcagcattaacaattaaaaggtctgtagaggacagagctttttttccttactcttcyccttagctgattgagttcagccctatgctataaatagcccttgtaattaatggctatctgtttgaaaatcagttatcaggaccacagtttaggagcctttacctctgaaattcatagagcctattttatgtctcagtgataagggaatgataatgtgagttcaaagctaaacctacctacccacaaagaccaaaccacatcatagcctaccaaggcattcttcaatcttcacgataatggatacagatttttaaataatcaatccaactgcaaggagaagtactgatctttaatatagccataatgtttggctaaagcctgctgcactccagtcatttcatgactctataagctaaagtcaaaatttatatcaaaggcatgagtttgcaattagctgagcaaggtcttttagagacccccaaagagttcattttttcctacattgaacaaattaactgtgtggttcataaagttcttcttcactttaacctgactggacacagagttaaagggggaagatagcatgtctaaaccaaattgaatagtgatcttctagacaacactccccagaagggaccctccttgggaaataccactcagtgctagagtaaatctcaaatttcagtgaaggctttgtcattcacagtaaaagatgcttgcacatcttgcatgttttcttctagtattttttttatttcgttcggtattgcctacttacataatacccatgcagagctcctagaaggtcccagagcctgccatattgtttcatgacactacacatttattaaaactgtttccactatgtagatggccttttctggccagtttgcctgtcatctccctctattaggccccccagcatcaccaccaccaccctccaatctaactgataactcccttcctcaggttcccactctacctctacatttttctgtcttaataccagtaatctttacatccacttgattggtttcttgaccatctctctccaggcataaggtcttattcttactcaaatatacatttcctatatgtttgttgactatataagtgattattgaacaactacakagcatccagtctttgctaacacttggtaraactcagaaagacggagattttttttctttgttcccaatgaattgataaaccagcggggaagacagacttctctacaactagacacagcaagtcaaaaagaggggtctaggcaggtgatgaggctgagttgttagttggtgaggcagcaaacacataaaagctcaccatgttttaatgtctcttctgtgattttcataatcaaaacacacatgcttcaatcatatgtttcacattgcttactaatgtctttgcattataactcagacctgtgcttctaaacgaatgtgcacacaaatcacccagtgatcttgttaaaatgcaaattcttattcaagagttctgggaggggcctsagattctgaattcctamcaagctcccagggaatgccaatattgctgatccatgaatgcctcaagtagcaaggctccacaccattgtaatgtcaatgtaaacattgttgaaatggcaccagtttttggaaaagctcctggactccccacctaaactcttctgactgtaattaaacatgatcaacrttacaccaagagaggtagattcagcagtgcccagaaaaaaactggcaagatgccttgaaactgttacctcttggcctttgttttactatgtaaacacaaaaggtctttgctcctgcactttaggtctgctgctacaagatgaatgtagtctgaaggtgtggcaagttttatccagatattcaagattgcctttctctgctaaagtctcttccatatttaaaccataacatcccaggttctttatggaaacagaaataccttctaagaaaactctaaaactttaatctgtttaaacaatcataagaaagaatacttaagtgaattttacaaagggaaaaagaagctctgggccaggcatggtgacttatgcctgtaattccaactctttggaaggctgaggcaggagaatcacttgagcccaggagktcaagactagcctgggcaacatagggagaccctggctctacaaaaaaaataaatttaattagccgagcatacacctgtagtcctagctactcgggagcctgaagtgggaggatcacttgagcctaagagttcgaggctacagtgaaccatgatcgtgccactgcattccagcctgtgtgacagatcgagaccttatcttagaaagaaagagagagagagagagaaaagaaaagaaaaaagaaacaaaaacaaaaaacctctgtaagcatcccatgggaatctattttcttaactcttaatgattccaagacaacatctgttaactttttcaattcattagagtctaccactcaaaatgacaacatctgttaactttttcaagtcggtagagtctaccactcaaaatgaaagtcaaaatccattagaccactaatttctcatttgtgagttttgagttatctttccaccaagacaagttccctacttgagattttatcttttgtaggtcttcttcctctcttccccacatcattcttgagcactaacctagcccaaaccaagtgtcctatgtatgtcttcttccaatccggtaggtgtcacactcctcctatctgccgttcaactttgccttgctataatatgcgatttaacaggcaatcttggttacttggtctcctcttgcgtatttagtttttgcatcttttttttctaacaatgtaatggtaaaccgaacagaagtggaactcttttcactgggcacaacatatagaaggcaatggcagccatagcttgcgccatgcatagcctggagtagacaaacctaaatgaactttcttccttctcacttctcayggactcatttaggtgaatgccaaagatgacgaaggtgtcctcgttggatcctgggacaatatctrtgcctatggcgtccccccatcggcctggactggaagsgttgacattctattggaataccggagctctgagaatccagtccggtatggccaatgctgggtttttgctggtgtctttaacacatgtaagtatccaactgagtaatttctttttaatataaaggaaacttcactctaagacattttttctataacctaacaaagagacatagcagcccctgttgacactatagaatttatgggtgagccattctgggatgtagtcaatgcataattaaattgtagtgggccaaatatgctcatagtttctctttgactgcagaatctttatagaaagaatgatagactatatcctgtgtaatccatcacttaacacccraagaaatagagggttacagtaaaaatayagagaaaaaagccattttctttycagccaccacattttaaaaaaackaaaacagttaaaactaaaataataaataacaaaagatatatattgcttatttatcattgagaagttgtataaatatgcrtatttatttattattgagaattttataaatatatmcacttaatttttatcccagttatggaaggtattatagcaggtggtctcatattcrtttttccacatttctcaatgcccctgagcaattagagatcagaacataatgaacaatctttccctctccagtttcccctctggtttttaatccacccaacatccaatctgtagaggaaagcatatgagaacagaattattctcttcagtgtcaygcatcatttttcagaggcatttgcctctctagacccagacgatattacaattaattcagtgaatatttttaaaaatacatttatttcagtatgtcttcatcactggtaatgattttcattcacaagtcatttctacagccttggagaaacattaagctcaagttggggtgtcctttctgcctgctcattaataaagaatttttacctagctaacattttttaaatcaaaaacaaagggaggggttggaggctggagggaggtcatttaaaaaaatgattacaaawcctatttgttttagctcaaagtctcaacagtctaagacttggtgatctaaatttaaaamaaaaaagtcatgagttttgttttgttttattttcccatagtatcaaacaggataagattattttyttagccatttaaatataacccagggaagaaggaatacatatttcttgggagcaatgaaaatcaaaagtatagtcccctagaagcactggtctctgaagttccagatagaagccggaacttcatggtaggttaaaggttggaggtcatcccatccctcgaggctcccaaaccaagacaaggtaaaagatgcccaacagaggcaaccactcttgtgaaatgattttagaagacagaaaggacccaagttctccccatgcctacaatttcactatcccagtgtaattccttccggctcacaacaagataaaatagtgaacaccttacatcygttcgtgtctttggcataaaaaggttatccaatctatgcctgaaaacaggctttggcggtaaatcaagaaaaggcagaaacacacagtggggaagtcacaacgagagtaaacctgaagatggaaattgggggaaggaggaacaggtgccctaaagtcaagcctcactttcttgaaattatgagtaaggcagagtcttgaccaagtcgtgtctgggataatgtgaattagtgttcakccagaaacagaatgagagtggcaatcgttttattgataagaccctgggtgaacagggctgaaaatcaagaaaggaaratgggaacgggaggcccgtgrcagctgccactgttgtttggggcattaagatcargtcctttaaggaggrggacccttgaatctctaccagactccagtttggacttccaaggttgttctgttgaaggaggtgggtagtctttggttaaaaatgctaaactattctgaaggagaaaataaaaaggcaagccaagtcattaatcttaaaattgtcagctgaattattttcaatgagccctgatgtctggtgtcctgggaggcakggagggcatttggattaagtttaatcagtaggtacatatggcaagaaaggtattcagataatttgttatctattaaaaygaactaaaatgaatctgtggtgtcacccaccaatgcatgtcacaggagcaaattctggccaagacagcaaattccaccaaggacctactctgtaaattcctaacttcctattagtgggtttttaaaattgtattttcrggaacatagtcccattcatgggactaaaataatactacgttgatgatcaaacgcttagaaacgaaacaattagaaccctgttgggattctactctagttggcttcacctgacaccagctgcaattctgaaggatcacacagcaagatttctctctaccgcccccatggggttgaatgaccacccttttccagcatggaacatttgagaataacatgtccaaagggcttttcatgttgggtcaggaagaaagtcccctacaagaagggttttttcactctgtgtttattaaatgctggtgatgtgtttagctgtggtctgtcctttcctgtagttttacratgccttggaataccmgcaagaattgttaccaattatttctctgcccatgataatgatgccaatttgcaaatggacatcttccyggaagaagatgggaacgtgaattccaaactcaccaaggattcagtgtggtgagtttgattgacartggcattggctgatgtcacattatagtaatgttacacatttaccacaagatagactcaatctgatgtttctgttctattttgaggaccattcaacagcacaggcagaaaactctgattgtcaaagaatgttctagcaaatgattagwaatgttactgaagagacagtttgggttcctagtgataaaaatcaatcattccttataatagcaaccaccaaaaaaaggtcatagttttagctgctgcatatgcctatactagttcctctctacyttgatatattaatattacagttaatagcagaagtattggagccaagcrttctctgggtcagtgccctgggactaatagagctaacatttatttagtatttactatgcatcggtcttggtgtatgcatgatcttatccagttctttttagttgtatcaggtggatgttattaatatcgccatttacaaatgaggaaactgaggcccaaaaaggcttgctcacggtcatacatctgttgagctgggaataaacccaaatgcttctgaccattaaccacaaccttttaaatgacttcagcagtataggttttcttttcgaatgtaaagatgagattctccttgattatattgtcacctttcattgagatatagaaatgggagtaaagctgaaattgttccccaaaaccagctgtggggttctctcactgccctgaacagctttgttacaagctggctagagggaacttaagatcccagggaaattccatttttccttgagaccccctaagtccaaatcaatacactaagaagaaacgraaaaaatcctaagagtttaagtaggaagaatttttatcaaggtctgtgtgggaggaaattggggcataagttcctctgtggtcaggcattgagctaggtagaacttctaagccaaaaatgagtctcatgcacaaataataaagctaaaacactttctgttatacaagcatccaaatggggatggtaggaagttacaagttcattttaagcaaaactaaaagttagaagtgcctgaacttcatgttacaggaatggatcacagttgtagcagcagtattaactcaccagtaggggcacacattcattggagaatgttgaaatgaaattgctgaatgagtagcaaagtgctaccatgaattaaaaatagttcggttcattggaagggaatgagctgagccatagtaagctggagggcacgtgtaagacaaaaccttgtctctgtaaattgaacagaaatttaaagaacactttaagcctgcagaattataatatagcagccctgcatgtatatgggatgacaaaacagaccaaaatagtcaccccaaaaactcattgcaattgttaaaaatgacaaaaagatagttatttggcattctccatatctcttccttaaaaacacacagacacacacacacacacacmgacagacacacagacacacacacacagcctttgtagctaagtgcagttcaaagttatctttcccagctccttgattcaggtacctcccatcatcaaataagtccctatgaggcactcctacaaataaccccacaggccctaaacagagttaatacaaaatagcgaaggtagatcttgcccttggtaaccctgtcctcwttcaggtccctgctccaaattacttccccttttcctgacaccatttgttcctttggtgccttactcaaatatcccatcaccctgagactgttcttcctggcctgggaccctcacccaccctccactgcagaccactgcccgagactcctcttcccttcctttgcctggcttgtagtaggttttcaacgcatgatgcctgatcagatgctctgactgactgcggggctgagaccagcacaactcaggacgtgcccagaccatgaagcacagggattaaagggctcagtgggatctgaggccaagacttggctctgctactgcccaagctgtgtgactttgggcaaggcacaacctctctgtgcctcttttctcctctaaagtggagagaacaatattccctgcttcactcatcacagagccgagcataacaggtgcctaatgaacgttagctgctattattgccttcattattagtcacacagctggaatttcttagaggcaatatgtttccatcaacccaagtacatcaaagcggtcagaaaaagagggatgcccagtgtcctaagatgactgygctatttctgttactttggggtatttttaaagaaaaagcagacacttggcctcaccagtgcaaacacccatgcaccttagaagttataggtggtccaggaaaacaagagtatggctaagactctcctggattgaggaggttagtgcgggctgtccccagacagatcagccagtgcatgatcaccacagccacactcctatgtcaagctctggcttgggcagctacttgctgtgtggctttgagaaaatgacttcacctctctgagcttcattttcttcatcagtagaatgaaagtaatcttagtagttaccatttcccgatggagtgrctataatgattaaatcaggtcatccaggtagagtgcttaccatagaggtaggcctgatgctgatttaattattattggtcactggtaagaagcaggggctgcctgagcatagggctggtgaggaagggtgagggtgagggtgarggtggaggctaaacaggggctgaggtgggggtgggaatgatttgctgggcatcagctgacctctgtgaggtcagtgcggtgtagactggcgacacatggcctgatggatttcctagcaaggatctcaggagctattggcctcatacttacctccctccacaggctctggtcaaacacacccacctcaacctgtcttccccgctcctggttggtttgtggctggggcccctctcctctccaagtaaaggagacctgagaacaatctctcatcctccaccatctatttcttcttcaacactcaggtcccaatggtccacagtttgtgatgaatcagtttgtccagttaggtctcagtgactcagggtgtcctcttctccatgactcagccaaatcccagcctgccgaaaccagaaatcagccagcagggaggctcagaggaaaagtacaagagggtgtgagaggtgtattctgctcgccacactccagagccaggagtgacaagtttggctctgtctcttgctgtgacccttctcgccttactactgcagaccatcaaggacagactgcttcctggtttgccaccgtaggtcccctgcatgaaggatgtttccttccaagagggagcctcacctcaggggggctacagttttgcacagagcggccccactgttgacgccaacagaggccatggtctgagctccttagctgttcaggagagggmtggggactcaggaacctcagaagggcagagcagggcagagtaattagatcccagggtagcaaatgaaaccccaagtgggcaaatgcaaagtagcagatcccagaaggagcaatttcggccgcctgtccccagygtgctgatgagttctgaattatgtgtaacctctggggggaaggcagctatgaatcactggacagtttaatgaagacgcttgctcaatgtttagctgcagtccaaacagcaaatagaatacgagggctcagtgaggagggagtsagggctactcagaggggcagggggacagcaatggtttggcctcaccttggaagagctcagcttgatcacctcattatacaaaggtcacagtcaaaatggaaacaattttaaaagacagagacgttggcacttactaggatcaagaaagatttttcaatgaaaggcttcgctccttctaaatgaagaagcctccctgtgttcttttgctggagagagtgtggtctgataggatgattctgggtgagggttggtgtcctcctctcagcttttccccaccggaatgcacccacccacagggggagcagtgtctgatctattttatttttgttgttttgtcagcatgtaacagtrtgcagggcatagagcaagcactgaataaacagaattgcttggaaaaaatttttaatgcataaaaactccatgctgcaatgggtggtcttaatctataaacaaasctttttcaaagcacattttagagcagaaattaaccagctttcacacctgggacactgccctaatcagtgtataatcctaattctcattatgtcctcagtactcatatggtgtttyacacattgtaggtgcatttttgaaattgagattgttcttctatacattattttatttttatttttatttatttttattattatactttaagttttagggtacatgtgcacaacgtgcaggttagtaacatatgtatacatgtgccatgctggtgcgctgcacccactaactcgtcatccagcattaggtatatctcccagtgctatccctcccccctccccccaccccacaacaggccgcagagtgttatgttccccttcctgtgtccatatgttctcattgttcaattcccacctatgagtgagaatatgcggtgtttggttttttgttcttgtgatagtwtactgagaatgatgatttccaatttcatccatgtccctacaaaggacatgaactcatcattttttatggctgcatagtattccatggtgtatatgtgccacatattcttaatccagtctatcatttgtggacatttgggttggttccaagtctttgctattgtgaatagtgccgcaataaacatatgtgtgcatgtgtctttatagcagcatgatttatagtcctttgggtatataccaagtaatgggatggctgggtcaaatggtatttctggttctagatccctgaggaatcgccacactgacttccacaatggttgaactagtttacagtgccaccaatagtgtaaaagtgttcctatttctccacatcctctccagcacctgttgtttcctgactttttaatgattgccattctaactggtgtgagatggtatctcattgtggttttgttttgcatttctctgatggccagtgatggtgagcattttttcatgtgttttttggctgcataaatgtcttcttttgagaagtgcctgttcatgtcctttgcccacttttcgatggggttgtttgtttttttcttgtaaatttgtttgagttcattgtagattctggatattagccctttgtcagatgagtaggttgcgaaaattttctcccattttgtaggttgcctgttcactctgatggtagtttcttttgctgtgcagaagctcttgagtttcattagatcccatttgtcaattttggcttttgttgccattgcttttggtgttttagacatgaagtccttccccatgcctatgtcctgaatggtattgcctaggttttcttctagggtttttatggttttaggtctaatgtttaagtctttaatccatcttgaattgatttttgtataagctgtaaggaagggatccagtttcagctttctacatatggctagccagttttcccagcaccatttattaaatagggaatcctttccccattgcttgtttttctcaggtttgtcaaagatcagatagttgtagatatgcggcgttatttctgagagctctgttttgttccattgatctatatctctgttttggtaccagtaccatgctgttttggttactgtagccttgtagtatagtttgaagtcaggtagtgtgatgcctccagctttgttcttttggcttaggattgacttggcgatgcaggctctcttttggttccatatgaactttaaagtagttttttccaattctgtgaagaaagtcactggtagcttgatggggatggcattgaatctgtaaattaccttgggcagtatggccattttcacgatattgattcttgctacccatgcgcatggaatgttcttccatttgtttgtatcctcttttatttccttgagcagtggtttgtagttctccctgaagaggtccttcacatcccttgtaagttggattcctaggtattttattctctttttagcaattgtgaataggagttcactcatgatttggctctctgtctgttgttggtgtataagaatgtttgtgatttttgtacattgattttgtatcctgagactttgctgaagttgcttatcagcttaaggagcttttgggctgagacagtggggttttctagatatacaatcatgtcgtctgcaaacagggacaatttgacttcctcttttcctaattgaataccctttatttccttctcctgcctaattgccctggccagaacttccaacactatgttgaataggagtggtgagagagggcatccctgtctgtgccagttttcaaagggaatgcttccagttttggcccattcagtatgatattggctgtgggtttgtcatagatagctcttattattttgagatacgtcccatcaatacctaatttattgagagtttttagcatgaagggttgttgaattttgtcaaaggccttttctgcatctattgagataatcatgtggtttttgtctttggctctgtttatatgctggattacatttattgatttccgtatattgaaccagccttgcatcccagggatgaagcccacttgatcatggtggataagctttttgatgtgctgctggatttggtttgccagtattttattgaggatttttgcatcaatgttcatcaaggatattggtctaaaattctctttttttgttgtgtctctacccggctttggtatcaggatgatgctggcctcataaaatgagttagggaggattccctctttttctattgattggaatagtttcagaaagaatggtaccagttcctccttgtacctctggtagaattcggctgtgaatccatctggtcctggactctttttggttggtaagctattgattattgccacaatttcagatcctgttattggtctattcagagattcaacttcttcctggtttagtcttgggagagtgtatgtgtcgaggaatttatccatttcttctagattttctagtttatttgcatagaggtgtttgtagtattctctgatggtagtttgtatttctgtgggatcggtggtgatatcccctttatcattttttattgcgtctatttgattcttctctctttttttctttattagtcttgctagcggtctatcaattttgttgatcctttcaaaaaaccagctcctggattcattaattttttgaagggttttttgtgtctctatttccttcagttctgctctgattttagttatttattgccttctgctagcttttgaatgtgtttgctcttgcttttctagttcttttaattgtgatgttagggtgtcaattttggatctttcctgctttctcttgtgggcatttagtgctataaatttccctctacacactgctttgaatgcgtccctgagattctggtatgttgtgtctttgttcttgttggtttcaaagaacatctttatttctgccttcatttcgttatgtacccagtagtcattcaggagcaggttgttcagtttccacgtagttgagcggttttgagtgagattcttaatcctgagttctagtttgattgcactgtggtctgagacatagtttgttataatttctgttcttttacatttgctgaggagggcttttcttccaagtatgtggtcaattttggaataggtgtggtgtggtgctgaaaaaaatgtatattctgttgatttggggtggagagttctgtagatgtctattaggtccgcttggtgcagagctgagttcaattcctgggtatccttgttgactttctgtctcgttgatctgtctaatgttgacagtggggtgttaaagtctcccattattaatgtgtgggagtctaagtctctttgtaggtcactcaggacttgctttatgaatctgggtgctcctgtattgggtgcatatatatttaggatagttagctcttcttgttgaattgatccctttaccattatgtaatggccttctttgtctcttttgatctttgttggtttaaagtctgttttatcagagactaggattgcaacccctgcctttttttgttttccatttgcttggtagatcttcctccatccttttrttttgagcctatgtgtgtctctgcacgtgagatgggtttcctgaatacagcacactgaagggtcttgactctttatccaatttgccagtctgtgtcttttaattggagcatttagtccatttacctttaaagttaatattgtcatgtgtgaatttgatcctgtcattatgatgttagctggttattttgctcgttagttgatgcagtttcttcctagtctcgatggtctttacattttggcatgattttgcagcggctggtaccggttgttcctttccatgtttagcgcttccttcaggagctcttttagggcaggcctggtggtgacaaaatctctcagcatttgcttgtctgtaaagtattttatttctccttcacttatgaagcttagtttggctggatatgaaattcggggttgaaaattctttctttaagaatgttgaatattggcccccactctcttctggcttgtagagtttctgccgagagatccgctgttagtctgatgggcttccctttgagggtaacccgacctttctctctggctgcccttaacattttttccttcatttcaactttggtgaatctgacaattatgtgtcttggagttgctcgtctcgaggagtatctttgtggtgttctctgtatttcctgaatctgaacgttggcctgccttgctagattggggaaattctcctggatagtatcctgcagagtgttttccaacttggttccattctccccgtcactttcaggtacaccaatcagacgtagatttggtcttttcacatagtcccatatttcttggaggcttttctggtttctttttattcttttttctctaaacttcccttctcacttcatttcattcatttcatcttccatcgctgataccctttcttccagttgatcgcatcggctcctgaggcttctgcattcttcacttagttctcgagccttgcttttcagctccatcagctcctttaagcacttctctgtattggttattctagttatacattcttctaaatttttttcaaagttttcaacttctttgcctttggtttgaatgtcctcccgtagctcggagcaatttgattgtctgaagccttcttctctcagctcgtcaaagttattctccatccagctttgttcctttgctggtgaggaactgcattcctttggaggaggagaggcgctctgctttttagagtttccagtttttctgctctgttttttccccatctttgtggttttatctacttttggtctttgatgatggtgatgtacagatgggtttttggtgtggatgtcctttctgtttgtcagttttccttctaacagacaggaccctcagctgcagatctgttggagtacccggccgtgtgaggtgtcagtgtgcccctgctggggggtgcctcccagttaggctgcttgggggtcaggggtcagggacccacttgaggaggcagtctgccccttctcagatctccagctgtgtgctgggagaaccactgctctcttcaaagctgtcagacagggacatttaagtctgcagaggttactgctgtctttttgtttgtctgtgccctgcccccagaggtggagcctacagaggcaggcaggcctccttgagctgtggtgggctccacccagttcgagcttcctggccgctttgtttacctaagcaaacctgggcaatggcgggcgcccctccgccagccttgctgctgctttgctgtttgatctcagactgctgtgctagcaatcagcgagactccgtgggcataggaccctccgagccaggtgcgggatataatctcctggtgtgccgttttttaagcccgtcagaaaagcgcagtatttgggtgggagtgacccgattttccaggtgctgtctgtcacccctttctttgactcgggaagggaactccctgaccccttgcgcttcccgagtgaggcaatgcctcaccctgctttggctcgcgcatggtgcgcgcacccactaacctgcgcccactgtctggcactccctagtgagatgaacccggtacctcagatggaaatgcagaaatcacccgtcttctgtgtcactcacgctgggagctgtagactggagctgttcctattcggccatcttggctcctccccctaattattgtcacttctatacattattttagatgctgtgtatgactcatctagttggacttttatattgtaaaattatcttcaattttaatcactgtctgcaaagcagaatgatctaaaaacgaattccaagtaaaatagtagagaagaaaaattcagaatgtagaccaaattgcttaaagatgcttaagggtttgtaaaaatatcccatgatgcattgcagttgccaattctggacagttatcagagatkcttattttcaaacattttcttgttaaccatatttctggccaagttggttttaggaaaatcacctggagttagaccatgagccttagcattagaggactgagaatatacactgaaggyacacaatagtgttggaaaaaacattatttgccaccttcaaagaataagagtagctcatgttcacaaaaatacttttttttgcaatgccctgatttaagtgctgacatgtaytaatttacttctacctcttaacagcatgttaaggtaattactgttagtggcacggtaacttaaccaaggtyccagccaataagtggcagaacctgaattacaaacccaagggggctgaccccagagcccactctttttaaaatgacatccttattgactgggcgtggtggctcacacctataatcccwgcactttgggaggccgatgcaggagkatcacttgagatcaggagtttgagaacagcctgaccaacacggtgataacctgtctctactaaaaatasaaaaaaattagctgggcgtggtggtgcatgcctgtaatcccygctacttgggaggctgaggcaggagaatcacttgaacctgggagacagaggttgcagtaagccaagatcatgccactgtattcctctagcctgggtgacagagtgagacttggtctcaaaaataaataaataaaaataattaacatccttattaaaatatgcttcacggcctggygaggtggctcacacctgtaatcccagcaatttaggaggctgaggcaggtggatcacaaggtcaggagatcaagaccatcctggctaacacagtaaaaatcccgtctctactaaaaatacagaaaaattagccaggcattgcaggctaactgtggcaggtgcctgtagtcccacattgcaggctaactgtggcaggtgcctgtagtcccagctactctggaggctgaggcaggagaatggcatgaacctgggaggtggagctttcagtgagccgagatcgtgccactgcacttcagcctgggcgacagagcaagactgcctctaaaaaaaaaaaagaaatatatatatatatatatatatatcacatgctacaaaatttacaaaattcactcctttaaagtaaagtacacaattcaataatttttagtatatttttatttatgtattattattattattttgagacaggttgtctctcacccaagctggattgcaatggcaagatcatgactcactgcagccttgacctcccaggctcaagcaatcttcccatctcagcttccctagtagctgggactacaggcacacccaccacacctggctaatttttaattttttttttttgtagagacaagatctcactatgttgcccaggctgctcttgaactcctggcctcaagagattctcctgcctcagcctcccagagtgctgggattacaggcatgagccacggcactaggccatttttagtatatttgtggtcttgtataaccatcattatcatcagattccagaacattttctctcccctctgccatacctattagcagtcactccccatttctccaactctggcaacctcgaatctactttctctctctatggatttgccagttctgatcatttcctataagtggagtcatgtaatatgtgaccttttgtgtctggcttccttcacttagcgtaacgtgttcaaggttcgtccgtgttgtagcatgtatcagtacctcattccctttcattgatgaatgatatttcattgtgtggataaaccaggttttatttatccattcatcagttgtacatttgggttgtttccatttttggctttcatgaataatgttgtwatgaacattcaggtaaaagtttttatgtgaacatatgttttttatttctcatgggcatatatttagagtggaatttctgggttgtatggtaactctatgtttaatttcttttgatgaagtgccaaactgttttccaaagcagctactccattctgtattcccactagcaatacacaaaagttccaacttcatattcttgcaaataacttttattttctgttttttttttttttttaattattattgtagccatcctaatgggtgtgaagtggtatttcatggtgggattaattttcatttctctaatgaccaatgacgttgaacatctttttgtgtttttcttggccctgtgtatatcttctttggcaaaatggttattcatatttttgtcccattttaaaattgacctacttttgtattgttgaattgtaactattctttatatgttctgcatataagctctctatcatatatgtgatttgtaaatattttctaccatccatgggctctcttttcactttcttaatggtgttctttgaagcactaaagaaattaatttttataaaatccaactttttaattatttctttggatgcttatacatttggtgtcatatctaagaaaccataacttgatccaaggtcacaaagatttgctcctctgttttgttctaagtgttttacaatcatagatcttacatctaggtctgggattcattttgagttaactttttatgtatgtatgaagtataaatagaaatggagaagagagaaaaataagagagcgaataagagagaaaactaaaatcatcttattgattatctcttgtacatggtaaattatttttttaatgttgtcttaaagattctttgtttcactcaggtctgagatttgaaaaagaaaaaaagtaaaaaagagattctctatttgtcttcagcttttgacagtttgaatatgatgtgtctaagtgtagatatcttaagtttatcctacttggagtttttgaactttttcaatgtacataataatatctttcattgaatttgggaaatttttggctatcgtttcttcaaatattctttctgctacttgctctctttcctcttcttctgggactcccattaggaaaatgttaatatacttcatcaactgcataagtaacatctcacctgtttctggggctttgattttgttttagttttttgcttctgttattcaaattggataatttcaattggcctaccttcaagttcattgattcttctttctgcctgcttaactctactgttgaaactagtgaatttttcattttggttattgtacttttcagttccagaatttctatttggttccttttcataatttctatcttttcattcgtattctctatttgatgagatataattctcatggtttcccttcagttctttgaacatatttataatggctaatttaagatctttgtcttgtaagtccaatgtcttagctttcttaataccaatttctcttggctgcttcctgtgtatgggctatacttttctgatcctttctgtgtcttataatttttgttgaaaactgaacatttaaaataatataatgtggcaattcttaaaatcagatttcctgttctctagcacctattgttgatgtttgctgttgttgttgtttttgctgctgctgctcgtttatttagtgaccttcttggactaattctatgaagtctgtttttcttgtcatgtatggccactgaagtgagctgagttagcttagtggtcatataacaattggacagagatttccttaaataccttgggccaaaagctccccagctttagccaagtagcgttgtgtgtgtgttggggaaagtctttaattaacccgcaggcagtttaaaattcttcattagccttcacttcctgtgtggacagagcctcaagatcaaccagagatgagagatgaggaccttcctggggcttttcttttgggcatgctcacagccctgcacatgtttgtggctatctatgtcagagtttttcaaagcctcctatggacatcttattccctgttttttctttcaaagtgttttggatagcccttttttagtctcaagtggtattgccccttcaggcattatgatgttaaacatttgcttctattttatttttatacattatatgaatagggctgattcagaatgagctgtgaatcagatcaaataaaaacaagccctgagaatggagcttttcagagagctgccaggcaagttaagcagtggcaatttggagagaaagagctttcggagtgttcaaaactcattttctctccttcattggtttctaggctgcaagtttgcaaagctactgaggctactggtttttaagactactgtggaggtggggtgagaataaggcaaattaaaactccacaaagtcactcttcttactgagatttatgtttgtttgtttttttccttgaataaatgcccctcagattgttgtttgcttcacttccagagttctggaaaggtcagctgtgatcatatttgcaagtgttctcattgctctatggaggagcagatttccagtagtccttactctgccactctggaggtgtttcccagagcccactcttaaccactacacaagtgcttcctaccacactgctaaggtgctttacattttgtaagaatatttttggcatctagtagagtcttcctgacatatatctgctgaaacacatattattgtatgtatatccttttatttctccatttctcccatacattacggggcatgatattgatcttttagaaaattatgtatgtagaaagccatctatggatttagtttcagcctaatgaaggaatgtaaaaaatatttgcttaaaaacaagaagggggcattgctctttgaaggttggaaatcactgccctacactctcctcccgttcctctcaggtacccatccattcctgctgctggaatgtctccaaagagcgcctgaagccctcattccactcaagtctcacttgagagtaaaccaaggggagtttgggggtaaaatgtcagaggtcattgtaataacttcttgggaaattaggcagaaagggaaaaaaagtgggaatcatttaataaaccacatagaaaacactccatatggcaatggaatcatgttctggttaatcataatttttgcctacaagagtcatcatatataccgttagaaggttactagttttaaagtaattagaaactaataaagtatgcaccgcctaggctatactgaatgtaatgtaattccttttggtaattaataatacctctaggaacacgttacaaaaataagagccatcagctgtagaatatcatattcataaatagtttataatgcaaaacagtaactttggtacctactgggtctattggttggaattcttttaacccttttcaataattatggagacacttgtccagaatttattatataaacttttttatacattagacttttacaaacaaatgctctcaaaattcaatattttcttcatgttcagtcaggatattaattcctagcttgctatgccagagtggtaaaagggggtagggcttcattttcaaaatgaacccagcaragggaacccagaagtgctcagaaagggctttctgctaactaatgatggcaaacgtggtctgtgtgatggggtggcatctactttctgaaaatttttaattttaatttttgttgttttcgttttgttttgttttataacttgtgttttatttttgccaaatttggtttcattccctgcctgttccatttggaggtactacactaaaaaaaaaataataaaacacgtaatcacaccatggggaaaaatgaaaggagaagaaaaaaagaaagctggataatcagcccctaattttctaaaaattgctattaacaaagctgctktacaattctcttgataaatatccaagaaatctgttcttggaagcttaagaagagagtggaaaggctgtactctcaggactaaggaaggactcactccctaaagactttgtggatggaaatttgttcagtactcctgtagtgtgtatgtgagtgaggacatctggactggtatctagccaggatgccctggtagaactgcatttagcgttgatgtcctttccgatgggttgcaacatccatttggttcatgcctgtgtctgagcacttattaatggttttgactatcactcctactacacatacacctcatagtttaatggtggaagctacagcacctgtccaagtgcacccygccatctgcaaccccctccattgaggtctcttgtgctatatcagactgtatttacacgtgacttctcagtgagacttgcaaaaccccttgccttcacaggacaagtaagaataaacacattcatttcttcttttttcttggcggtcagttgattcctacaacagcatcctttactgagctgggatgcccatggcgccctccatttatctcccatatagcattgctatgcaaatgaggccattcatgactggctacccagggcttccccaggtggctcccagccagagggatctgaagcagctgagcctcagagaggacaggggccctggcctagtctccacctgactggactgctggcctttgacatgacgccagttaacatccaaatgccccttgctggtttcagcactccaacaggctcaaacaatgaatagctgtattctgaaatagtgtcatgctcgcagctccatcaaagattcctgcagcatgcctctttcctctgaataattcctttctgtcatcttccttcattatatttcctaacaagtttttttctaagtccaggctttcatttccactttgaaatgtcttgttagacaagcctcagagtccaccaaattgttcccacttctttccaacaactcccaccccatcctatccccactgcccctgaaatggccagagcttaataatccaggatgtcctgtcattattgtcaacaatattgttgtctgtattcggaatgtattagcagaaccagagaggtagggctacacccatctgctacaaatacacaaatgatttgcaagatagacagtgcctttctttcaccccctgccagttttgctatgaaagaattcaaacccttggtttacagttgaagttggtccaagacatctcctccagggctttctcttgatcttatttgtgctctcccctgagccctaataaagctgcacaaacaaaattacaagcccatatctctttcttcccttttaagaactccttttctctgaaacatttctggacagatagattgtaaatgagatgaccctgtggactgtttaagcagttagttagccaagttaaggtcagtaaaggactccttgtttaaattaaccactttattttcttcaaacacatagcaccctgaagcccatgttggtctcagctgtgttctctgtccagctcttcaccaccccataggctcctatacctctggatatgaccttagccagaaccaagacagattttgaactactgtgctctactgggttttggtaaaataaatacataaataaataaatagtcctcagtgtttcggagggaacctaatacatgtttattatgcagtattttaaatgttgcagaaaaaataccaaagtaagaagtatcyattttctaactactcagaacatctgtaacatttccttaacccttctgtaatatgtctctttgtgtgtcgtatgcatgtttttaatgctgcataccaaagtaccaaagtaccacaacgtaacagcttaaaaaaacacaacttatcatcagacaattcctgtgggtcaggagtttggtcactggttgactgggtctctctgctcagggtctcagataactgcaatcgatcagtgttggctgggactgttgtcccatctaatgctcagagtcctcttccaaattcattgaggttcttgaaagaattcagttccttgcagctgtagaactcatagatgcttctatcttctttgaagccagcaggagaatgtctctgctgctttgaatccctgacttgctctgtctctgatctctagacccagacttaaaaggctcatctgatgaggccagacccacctgataatctaccttttaattaactcaaagtcaacagattagtaaacttaattacttctgcaaaatcctccttgacacataaagcaacatagtcacaggagtactagcctgttctgtttatagatttcacctacactcaggggagaaaattatacaaaattatgcaaaaggtagtgggagtcatttaaaattctgctctgcatgtgattttgaaacactaatatgccatggatgtctttcytgcctagtcaatatagatctgcatttttatggctgaatagcattctattctgtttcaaaatacttgatcacatgttggacagttaggctgcttccatgcttccactttccctttcttacaccatgatgaacattcttacataacacacttgtctttgcatttgtatgattatttcccgtgtacaaattcaaagcacatggatttactgaatcacaacataaactatgacgtcccatgtagggtcccccagcaggggatggtgctgctgttctagtgaagtactgcctttggtgaaggttctctgagtcctttgtaccaatactgctgaattattagcatccttgaaaggagttctaaaaattactagctgtcactgcacggaacacacaggaagaaacataaagcagagatgtgttcttcacttgtcatctccatcgttatcctcccaaaggttgttctcatcttgattaaacaagtctcaatgaaatgaggcctttattttgatttctatactgcttctatagaaagaggcaacaaggagatttagaatttttttactttaaagggacacggtaccttttgactgtatagtgagaacttaagtttcaaatgaaggctccgagaacataaaaaaccatgaatcttaaagagaaacaaacaagcaaargtttaataagaacttccttgctagatgtcctcatgatttatttagccaacacttactgagcacctcctaatgactgggccctgctctagtgctggagatgtgtagaagaataagaccaacagagctcccaaagkagatttatgcactctacaaatgcatgatggaattgcaagatgaaaacagaaaaactcttatggatctagataaagaagctttagaataaaaagtagcatttcaggaatcagttggtattttccaacctggagaatcagtagatgaaattaggaaaagtctgtacggaaggaataagtgtttgagatcaaatatacaacatgttgkctatagttaattatactatactatatatttcaaaattgccaggagagtaaatttcaaatgtttgcaccacaaaaataaatatgggaggtaakcgatatgttattaacttaattatcctgcaatgtgatttgattttatatatatatgtaaaatcatcactttgtaccctataatatatacaattatacaattattatgtgtctatttaaaaaattaaagatatgctaaaggaagttttccaacacaaagggaaatgacactactgtatattgaaaattagatcctctgacacgtatgaattgcagcaaaaatgctaaatatctgagaaaaatgctcacgcctgtaatcccagcactttaaaagactggggcaggaggatggcttgaggccaggagttcaataccagcctgggcaacatgagaccctgtctcaagaaaacaaaacaaaacaaaacaaaaaacaggaaaataaatgtctgtaaacattagcctctttcatggaggaacttgggatataaaaaactgagcatgcttaaatagaattgtgtaatgtcagccaaatggaaactcttgaggcacgggtggcttaggacacaattcccctagtcattcctgagtagagaggattgcatggtgaaagagatccccatggctgtggaggtagcaccctctcgttctcttcatgggctgtctgggagctgagccattagctttccacccattgatggaggcccagccctactgggagcatttgcttcctccccacctcacccactgcctgcaagttcctgaccctgttatgaaactcccaccctaaatacacagataacgtctcagccatgagtgaaactagaagagatcatgtgtaactaattagatgkcagagtgagagaaaagaaacttttccccgggtcctggtcatttgaaaagaaatattatcctcaaagaaaagtctttacttgagatctgaagtgcaaagcatatttatcttgttccaggctaaccttgccaaggatatttgaatttaaataaggctattctggagcctattaatctagggtgatggtgtagcagtgaaagccagggggtcactaaacacttcgggtcgtataggaagcaggacggcgtccattcagggttgcaaatgttttattgctgtttttccctgggtccttctgcctgatggggcaaccttcactgctctggagagaggctagcagagtcattgtctaacatacacagtgacctcccttccagcttccaagcaaagatggaggctctcaggtgggaactgacctcatgttcctgctcagagacctccacaccttcaccctaatccacatctgtacccttctctccctgcagaccctgccttgcttcccacatctgtccagggtgttgctctcagcctcatcctcttgcaaccttggtatttcagctcccttttatattcccactgtctctaccttcctccattcctccatgaacatgcctcagtctcttttaatttgaaaataaccgaaacagacttccctgcattgcattacatgctagcccctgccctatcttttcttctgtcttacaacctagatcacttttttttttttttttttagacagggtytcactctgtcttccaggatggagtgcagtggtgcaatcatggctcactgcagccttgatctcccgggctcaagtgatcctcccactcagcccctcaagtagctgagactacaggtcagctaacttctttaactttaatagagacagggtttcgccatgttgcccaggatggcctcaaactcctgggctcaagcagttctcctgcctcggcctcctaaaatgctgggattactggtgtgagccactgtagccagcctctaagtcactcttaaggaagaagctacctctttcttccctcctcattcatttgtcagctggctttgcccagccctcctccaccacccaccaatactcccgcaacctcctcctccgcttcatccaatccagagcatcacaagtgtagacaaaaatgcctcttaggcctcacctcctgggtttcccacaggcactcaagctcatcctgcccagaattgggctggtcatccacccatcaccaccagtcccaacacagactttcttctcttccttttttattcacagtcttggtaaacaaaaccatcatactacttggacaggcaaaagtcttccccaactcatccgagtccctcacatctccctaaacctgtgggttgtatccccaatggcttctctccctctccatggtgctggccacctgaatgcctttctggtccactattgcagttcttcaggggtgggggacagccggggaggactcagctcaatctccagccttgcctctccatccatcttccacgaacagagatttgcaaatttagatcttcttcttaaattattccaatggctttttatagcctaagaataaagcatgaatgtttartttgatatcaaaggatttcacaatcttatcctyacctatatcataggtcagtgttgaagagtgtggatttcagagctctatcactaactagctgtgacctcagcaaggttcttaaccttcctgggtttcagcttcctcccctgtaaactgggggtaattataatagtactgttctttttttttttttctgagatggagtctcgctctgtcgaccaggctggagtgcggtggggtgatctcagctcactactgcaagctccgcctcccgggttcacgccattctcctgcctcagcctcccgagtagctgggactacaggtgcccgccaccacgcccagctaatttttttgtatttttagtagagacggggtttcaccgtgttaaccaggatggtctcgatctcctgacctcgtgatctgcccgcctcggcctcccaaagtgctgggattacaggcgtgagccactgcgcccgaccaatagtactgttcttatagggtgctagggacatcagatgtgttaacatccatgagggttttagaacaccacttcgcactaaggaagtgttatatgtatttgttagtttcgtgcattgcctgccatcaccgttctcctatgaacctgaatgttcaaacacgctatgctccagccacaacacacagcagacagttccacaaacaaaccatgatggctatttcatgccgctgtaactttgttcttcctccttttcttgacctcctaaattcccatttatctttcgagcctcagctcaaacatcacttcccaaatacctggagactttgctccactgagactccatggcaccccaaatcaacacccgttttaccagggatcatttaaattaattatttttcaaagcctgagagttaccatttttgagcacttaacacatgccagtctgtgttcgaaatacatgtattagcttatttaagtctcacagcaaacctatgacagttttgataattggtttacaggtttgtcatttctcctagaagattaccctttatgggtaagaatctatgttttgatcatctctgagtctccagcacctaccaaggtgcctggtgtgtagtgggtacatagtgaaattaatatctcttgaaccaatcaaaaatgggctgcactcagagaaagatgggagcatgggcaaacagctgacatygaagggcgtctaggcacggaacccgtggtagttgaacctgaaattcatcagtgtcataaacaaagactgctgtaactacctcaccacattattaaayctttctttattactatatgaacattttctatagtgctgaggggttaatgtgctctcatttgattctgtactgtcatataatttcaggtcttttcaaggacataataatacaattcatgatggcattttattccatgctcttgcttccagggtcatattcaaatttctgagaagttttccatgacccttagcacttttaataaagggtaaagagagattcaccctgacaacgtattcttcttgttggacacgagatggaaattgtagagaattatagtcaggcataattgttgtagtttctacagtaatagtctaagaccacaaacacaagtattttttgcttaattgctacaaaggaatatgctttttctaaataggaactatattaaaaagttcaaaataaatatttcagttttggttaacttttcttccccaccctgtcggyacctagtaagttctgtttcgttagtsagcagaaaatggttaagattaaaactgttcaatgcactgattcmaatatctttgggtggccttgaagctgctcttagcagagggaaagagacatccagccatktgagtgtcctgagggatgccaatgagaatsaatctgcccagaaaacccaagtctagagccccaggatatctccaggagccctcagatttggcttaatccattctaataatctgtagatagcatatgcacaggatttggggtcacttttttttttttttgagatggagtctccctctgtcaccaggctgaagtgcagtggcacaatctcagctcactgtaacctccatatcccagattcaagcgattctcctgcctcagcctcccaagtagctggractacaggcacccgccaccacacccagctaatttttgtatttttagtagagacagggtttcatcatgttggcaaggctggtcttgatgtcttgaccttgtgactcacctgccttggcctcccaaattgctgggattacaggcatgagccactgtgcctggccgtcacttcttgatctcttggagcattgggtgtgatgggaagtttaacctttctgggcttgtgttttctaaggaactaccactgctggaatgaagcatggatgacaaggcctgaccttcctgttggatttggaggctggcaagctgtggacagcacccccyaggaaaatagcgatggtaaaactgtgtcctccctctgggaacttgcttcattgctgatytttgttttgcttttatgcttgcatttgatgtgtgggaaccacgcccattgggaggcaacatctgaagtgtgcttcctgggcacatgtacagtattagctaccttccaatcaggtttaatttcatttccattgtcagctttaccctgattattttacagattttagagaaagaatataaaacaacgtataattcatccattcttgctttgctaagcagttttgaagacaggagagaaaatatctgtaagcatttttactaggctataaaatatacttcagccctttgtggtatgcactggtaagatataaggcaggagagaaaatagagaactcgaaaaataattatagatcatcctttaaattgtttttccagaacctrgcctccttttatgtcatgtgatttcctccaaagcttcagtatgtgggtatttgtcttctaacttgccaactatgctaagcagctgcagctctgacctcccccagatttttataaaatcacatcataagcctccatctctctttaatatgataatataaagaatcagtagactgtggatattatgtttatttcctcaggtgttgatatatcgatgggcacacacaggaacatgcataaacattcaatggatattcatactgaaaccatattataatcctaggctttaaggaagaaagtttagcactttctggtgttctggtatatatatcatggggacattttacaggtgactaatagcagctaatctcttattaactatatagataggtggttaaaatttaaagcattttagaagagtaacataggccytctgacttcctaaatgcatggtgggcatggccaaaatgcacaggcaatgtccaaattctccagttaaacttgacatatgttcataatgtccaaaaacaaaagacaaaaagcaaaacaaacagcaacagcagcacaaccacagagcacacatcaacatttccaacatttcagataccacctgaacaagagataaatgctgtgtaagccacctgcttggcatcaacacatctgggtatgtgtctgtaggtggcagagtagatgcaggaatagtgttgccttgtatttatttccatggcttcaatttttggcttgagggggcatagccaatggaattctcttcagccttggaaagcatctgggctaaatcagcaatgaagttgggaacactggtctttacagagtcaccctcagtgccatgaatcttgcagtatctggacagaattggagatgacaaactcacayygcccttcctctgtgcaatgcaggcatgtatcrgtgtggccccgcctcggttcaagccatcaagcacrgccatgtctgcttccaatttgatgcaccttttgtttttgcagaggtaagcaggaagctggaggaaagtgctgtttttytccccaacctcttaacacatgaaagagtaagctaaaagttgttgtttctaagttttccaggtacatagcrtatgcttcgtgttgacaaaggtaactaggcattattccaacttccaggctattaatgctaaatgcagttcttgtttaacrtttttctttccttgatgttttgggattccctactcccaaaagtaaatgctttactaacattagcttagttctctgcacccattaagtatcaactgctccagagaaattatatgactaatggatctctcaactaacctcattggaagagatgggtcatgaattgaaatttcaggacatgccacttccctctgggactagtccagcaatccaggtaagacaaaatccacatacacacacccaaccatggtcttaccctggcctttgcaatctatgtcctgccatcccacaccatcacctgtggccagggagggagggttgagttgccaaaggaggaaggggagcctggaggctactctaagagaggaatacagcccacctacagggttgatgggaatgcctgggcaaaggctctgccatttcagaagaactaggcagggactggaagcagaacaggctgttaaaggatactcaaggagagctctgaaaatcaaattaaatgtaagagatgttgggtaaacgagaaggctgggctgccggcctaggaagacttgaaagactgagaggcaggacttccccagggtatatttgcaccagtaaatacactgaaataatgtctttcactttgcctaccattggatgctcttagcaaccttctaaaattgataattcttcccattttacagaaaataaaatcgaggcaaagagtgattaagtgactttctcacaaccatctagctaataaatagcagtgctaagatttgaagccaggcagatacctgaatgcayactggtaaccattgcactctagtactccaggaggaacaaatagttattattaatgtacaccaggcattgtactggggggaattctaaggttcragtctttaagaaacgtatttctagatgccaggtgacagggcacaaacacactgaacatgaaataacaacaatacttgtcaggtgggccatgtagagagcacagatctgcattcatatgatgcatgagttgggaagtagaggccaagaactgaagcaggatggcaaagaccacaagacaccatctaggaaggaagggcgacctgggaacagacagtgaggatgcctgtggaagtgtccccaggtagtaagagcagagaactgtgggaccacatgggaaggagggatgattaggcaaaatgattagaaagaagccagaggaagggaggagtgcaaagcagggggatgagttgagcatctgaaagctttgtgggggcagttgaaagctgtgcagactcactagaacgccaaggatgcatcaggggtgttggaaggtggaggctgaaggaacgcagtgcagaggacctccctgagagacttgctccttgtccctcctgtaagtgagggagagttttcactgggtgggaacttgggcaaggtgctgacagccttgtggaacacggattggaggggttgttatgaagttgtggggaacatctagagggctggtcatccctccaagccagagatggaaagggcatgagctagacaaatggcaataatgaggaaaagaggaggcaggactgagaaatgttaatatttagaaagcaaaacgaacatcaaaattcagacagcaagatcaggaatttgaaacacacaaaagaccagtgttcatctcatcgtacctgcygtggcagtttacagaagcctttggagaccaagcttactggacttggaattttatcccctcgttttcactttgggatttgaagatttccacaaacctcccagctgtcatttgatagtttatgatgctacgagagcccctaatsaggagatcactctgaaatccacaaagccttgttttcagctttttattacactttattgctgcaaagaaggagaagraggacctccctccacaagcaagctgcctaatagctgtaaatgcaaacactttttgctattattaaatatagatcggggtgttatgaatgtcatcaggatttgcagattataattactcctttctcacccactgcagaggcgtgtctgacagagggtacaatttgttgctttggcatgggctgcgctccaggggctgagccattttkaagagatgtttgagttgatgaaaagtgtatgaggaatcttttctcaagggtgcctgcagtgggaccccatggggagtgtcatatgagtcgatatgactcaggttcgagtctgtggctctctctgctctccctcgtccttgctgcatcagctcgccttctcttccctcccagcatgctgactttcttggtcattccttactcatttccaggcttgatcaagcatcatgttcattgactgttttttagtgttcccagggccttagtctccatgagtgaaagcagagcctaaaaagaagaggggtatgcctggaaaatgtcttaccttctgttccttttttctctcctcctccactttggaagttcaccctccacatttctgggtttctgccagggcttgaagcttatttctcttacccctcccttcccatgtcctccctgctgcagtgggttcctgtggatctgaagccccatctgcctatctccccagcttatggtggcctagggcttccaaataggtgagaggagatgagagctgttctaagcgtctggagtcgtattccaagattccatgttcacgaagccctcaggggttcttagtgaagaactctctccttcttgccaaagataactctcttctgtcctaacttctcattaactctgctgccctctttcacaccactccaccccaaactcactcacatacacacacacatgcatgcacacactcctgcctgccctcactggcgctgagatgattttgacaggagcaataactggctccctgggaccacagcaaccatctcatcactcaagaagctaagccctcctctgctgtgggccagcagttctcttatacaacgtgtggagatgttttcctgtagattattcattctcaattcaaacttatttattttgctactatcttatcagatgcagcctatttttttggcatctcctacttggctataaaataatccagtcatttattcaaatagcatacaaaactytggaattattttagctttccttcttaacctcccttatgcatcttgccaaaaataccttcccaaaattatcataaatccagccacttctacaatctctatcgttaccctctgagctctgtacaacactgagctccataaagttacctcctaactcctcctaactcatctccctgatccccctcttgctccttttctgtctattccccacagagcaagagaattattctttaaatgtaaatacaaacatcacactcctgccccaacccttctggtggagttccaccacccttacaataaaactgaacataaattcctacaagattccatggcttcccttccacttcatcccttgtttatttccctccagccatactgagatttttctcttcrgaaagcatccacacatcctcttgtgtcagcacttttagacatactgctccttttgctaggaaagctcccctcactatctttcactctgtgtaggaagaatgctttgcatgctttgttccctctctgcattcaagtctctgctctggtcacctcttcaaagaggccttcgctcacccaactscacctaaaatatcaccatctgccctgttgttttcatcctccaaccttagtgtgtactccatttctcccttctagaatatgagctccatgaaggtagaagctcttgtaaccgcattgctgagagcaggatctagggtccagtgccaggaaggcattcactgcctccatatgccctctgagaagcagcattttctctgcagagcctgcagacaaggttatctccacttggaaacaaataaacaaaccaaagcaaactctgtccagggtcctgaaagcaagagcacgtctctagcctcagtggtgaagagcatatcttctgccacctgtggacaaatgttcacattctatgggcccaggtggacatttgcagagagcagcccccaagcctgctttccaccccacctttactgagaagctagggccctgaccaatggtagaggctactatgtaggaagtgcctgtacttaagasgcaagggtgtggtgttgtgaaaaaaatatccaatttcatgcaccaatgcccagattttgtgtgatgataacccttcaagtgtagggatagaaaaaggggatcactaacattacattcaaaagaaggaagaaaaattagccgtaaatgtagggctttcacaagtagtaccaatctatccaccagcccgacaaggaaggtaggctcagagagattcagtaactcggagggaggagccaagatggctgaataggaacagctccagtctacagctcccagcatgagtgacgcagaagactggtgatttctgcatttccatctgaggtaccgggttcatctcactagggagtgccagacagtgggcacaggtcagtgggtgcrcgcaccgtgcgcgagccaaagcagggtgaggcattgcctcactcgggaagcacaaggggtcagggagttccctttcctagtcaaagaaaggggtgacggatggcacctggaaaatcgggtcactcacacccraatactgcgcttttccgacgggcttaaaaaacggcgcaccacgagattatatcccgcacctggctcggagggtcctacgcccacggagtctcgctgattgctagcacagcagtctgagatcaaactgcaaggcggcagcgaggctgggggaggggcgcccaccattgcccaggcttgcttaggtaaacaaagcagccaggaagctcgaactgggtggagcccaccacagctcaaggaggcctgcctgcctctgtaggctccacctctgggggcagggcacagacaaacaaaaagacagcagtaacctctgcagacttaaatgtccctgtctgacagctttgaagagagcactggttctcccagcatgcagctggagatctgagaaggggcagactgcctcctcaagtgggtccctgacccctgacccccgagcagcctaactgggaggcaccccccagcaggggmacactgacacctyacacrgcagggtatwccaacagacctgcagctgagggtcctgtctgttagaaggaaaactaacaaacagaaaggacatccacaccaaaaacccatctgtacatcaccatcatcaaagaccaaaagtagataaaaccacaaggatggggaaaaaacagagcagaaaaactggaaactctagaaagaagagcgcctctcctcctccaaaggaacgcagttcctcaccagcaaaggaacaaagctggayggagaacgactttgacgagctgagagamgaaggcttcagacgatcaaattactctgagctacgggaggacattcaaaccaaaggcaaagaagttgaaaactttgaaaaaaatttagaagaatgtataactagaataaccaatacagagaagtgcttaaaggagctgatggagctgaaaagcaaggctcaagacctacgtgaagaatgcagaagcctcaggagccgatgcgatcaactggaagaaagggtatcagcgatggaaaatgaaatgaawgmaatgaagcaagatgggaagtttagagaaaaaagaataaaaagaaaccagaaaagcctccaagaaatatgggactatgtgaaaagaccaaatctacgtctcactggtgtacctgaaagtgatggggagaatggaaccaagttggaaaacactctgcaggatattatccaggagaacttccccaatctagcaaggcaggccaacattcagattcaggaaatacagagaacgccacaaagatactcctcgagaagagcaactccaagacacataattgtcagattcaccaaagttgaaatgaaggaaaaaatgttaagggcagccagagagaaaggtcgggttaccctgaaagggaagcccatcagactaacagcggatctctcggcagaaactctacaagccagaagagagtgggggccaatattcaacattcttaaagaaaagaattttcaacccagaatttcatatycagccaaactaagcttcataagtgaaggagaaataaaatactttayagacaagcaaatgctgagagattttgtcaccaccaggcctgccctaaaagagctcctgaaggaagcgctaaacatggaaaggaacaaccggtaccagccgctgcaaaatcatgccaaaatgtaaagaccatcgagactaggaagaaactgcatcaactaacgagcaaaataaccagctaacatcataatgacaggatcaaattcacacatgacaatattaactttaaaggtaaatggactaaatgctccaattaaaagacacagactggcaaattggataaagagtcaagacccttcagtgtgctgtattcaggaaacccatctcacatgcagagacacacataggctcaaaataaaaggatggaggaagatctaccaagcaaatggaaaacaaaaaaaggcaggggttgcaatcctagtctctgataaaacagactttaaaccaacaaagatcaaaagagacaaagaaggccattacataatggtaaagggatcaattcaacaagaagagctaactatcctaaatatatatgcacccaatacaggagcacccagattcataaagcaagttcttagagacctacaaagagacttagattcccacacattaataatgggagactttaacaccccactgtcaacattagacagatcaacgagacagaaagtcaacaaggatacccaggaattgaactcagctctgcaccaagcggacctaatagacatctacagaactctccaccccaaatcaacagaatatacatttttttcagcaccacaccacacctattccaaaattgaccacatacttggaagtaaagctctcctcagcaaatgtaaaagaacacaaattataacaaactatctctcagaccacagtgcaatcaaactagaactcaggattaagaatctcactcaaaaccgctcaactacgtggaaactgaacaacctgctcctgaatgactactgggtacataacgaaatgaaggcagaaataaagatgttctttgaaaccaacgagaacaaagacacaacataccagaatctctgggacacattcaaagcagtgtgtagagggaaatttatagcactaaatgcccacaagagaaagcaggaaagatccaaaattgacaccctaacatcacaattaaaagaactagaaaagcaagagcaaacacattcaaaagctagcagaaggcaagaaataactaaaatcagagcagaactgaaggaatacagacacaaaaaacccttcaaaaaattagtgaatccaggagctggttttttgaaagaatcaacaaaactgatagaccgcaagcaagaccaataaagaaaaaaagagagaagaatcaaatagacacaataaaaaatgataaaggggatatcaccaccgatcccacagaaatacaaagtaccatcagagagtactacaaacacctctatgcaaataaactagaaaatatagaagaaatggataaattcctcgacacatacactctcccaagactaaaccaggaagaagttgaatctctgaatagaccaataacaggatctgaaattgtggcaataatcaatagcttaccaaccaaaaagagtccaggaccagatggattcacagccgaattctaccagaggtacaaggaggaactggtaccattccttctgaaactattccaatcaatagaaaaagagggaatcctccctaactcattttatgaggccagcatcattctgataccaaagccaggcagagacacaacaaaaaaaagagaattttagaccaatatccttgatgaacattgatgcaaaaatcctcaataaaatactggcaaaccaaatccagcagcacatcaaaaagcttattcaccatgatcaagtgggcttcatccctgggatgcaaggctggttcaatatacgcaaatcaataaatgtaatccagcatataaacagagccaaagacaaaaaccacatgattatctcaatagatgcagaaaaagcctttgacaaaattcaacaacccttcatgctaaaaactctcaataaattaggtattgatgggacgtatttcaaaataataagagctatctatgacaaacccacagccaatatcatactgaatgggcaaaaactggaagcattccctttgaaaactggcacaagacagggatgccctctctcaccactcctattcaacatagtgttggaaattctggccagggcaattaggcagaaggaaataaagggtattcaattaggaaaagaggaagtgaaattgtccctgtttgcagatgacatgattgtatatctagaaaaccccattgtctcagcccaaaagctccttaagctgataagcaacttcagcaaagtctcaggatacaaaatcaatgtacaaaaatcacaagcattcttatacaccaacaacagacaaacagagagccaaatcatgagtgaactcccattcacaattgcttcaaagagaataaaatacctaggaatccaacttacaagggatgtgaaggacctcttcaaggagaactacaaaccactgctcaaggaaataaaagaggatacaaacaaatggaagaatattccatgctcatgggtaggaagaatcaatatcgtgaaaatggccatactgcccaaggtaatttacagattcaatgccatccccatcaagctaccagtgactttcttcacagaattggaaaaaactactttaaagttcatatggaagcaaaaaaagagcctgcatcaccaagtcaatcctaagccaaaagaacaaagctggaggcatcacactacctgacttcaaactatactacaaggctacggtcaccaaaacagcatggtactggtaccaaaatagagatatagatcaatggaacagaacagagtcctcagaaataatgccgcatatctacaactatctgatctttgacaaacctgacaaaaacaagcaatggggaaaggattccctatttaataaatggtgctgggaaaactggctagccataggtggaaagctgaaactggatcccttccttacaccttatacaaaaatcaattcaagatggattaaagacttaaacgttagaccttataccataaaaaccctagaagaaaacctaggcattaccattcaggacataggcatgggcaaggacttcatgtctaaaacaccaaaagcaatggcaacaaaagccaaaattgacaaatgggatctaatgaaactcaagagcttctgcacagcaaaagaaactaccatcagagtgaacaggcaacctacagaatgggagaaaatttttgcaacctactcatctgacaaagggctaatatccagaatctacaatgaactcaaacaaatttacaagaaaaaaacaaacaaccccatcaaaaagtgggtgaaggacatgaacagacacttctcaaaagaagacatttatgcagccaaaaaacacatgaaaaaatgctcaccatcactggccatcagagaaatgcaaatcaaaaccacaatgagataccatctcacaccagttagaatggcaatcattaaaaagtcaggaaacaacaggtgctggagaggatgtggagaaataggaacacttttacactgttgatgagactgtaaactagttcaaccattgtggaagtcagtgtggtgattcctcagggatctagaactggaaataccatttgaaccagccatcccattactgggtatatacccaaaggactataaatcatgctgctataaagacacatgcacacatatgtttattgcggcattattcacaatagcaaagacttggaaccaacccaaatgtccaacaatgatagactggattaagaaaatgtggcacatatacaccatggaatactacgcagccataaaaaatgatgagttcatgtcctttgtagggacatggatgaaattggaaatcatcattctcagtaaactatctcaagaaccaaaaaccaaacaccgcatattctcactcataggtgggaattgaacaatgagatcacatcatcattctcagtaaactatctcaagaaccaaaaaccaaacaccgcatattctcactcataggtgggaattgaacaatgagatcacatggacacaggaaggggaatatcatcacactttggggactgttgtggggtggggggaggggggagggatagcatagggagatatacctaatgctagatgacgagttagtgggtgcagcgcaccagcatggcacatgtatacatatgtaactaacctgcacaatgtgcacatgtaccctagaacttaaagtataataaaaaaaaaaaaagagagagattcagtaactcatccagagccacacagcctaagtccaataatccttgccatacactctgaacttatctattgttctaccatagagcgtcaattgattttgggtggggccaatcattccatgcttttttaagctcctagatgattccctagtacaaccagaatagagaaccattccactacaggccgaaaccaaaaagaaagcttgctaatgtcgcttggaaagaataatttccctccacatcccaccccaacacacatatacaaaagccaccccatacaggtgtttctcgtctcctctctccgcaaaggacagtgctgttggtctgtcctgagatttyagcctacaggaatttctgaagccatattcaaggtgggggggcaggaatcagccactttcatattttgcttgtttccctggaaaaccacaagctgttataaggattgttattaagaagttatttatcattattgttgctacgatttgaaagtagagggggtcgctgtttgtacttacatggcttcctccagagggaatkcccgaattctcagacagctcatttaaagcttccaaaatgacaaatattccacaggtatctgctgcgtcctctcctgtcctgattcctgacttcacatttcagcctttcacaacatgtggctagcacccctgagttctggctgctctgctgaggggcagggccaccgtttatcaccctcagaaatctgagccgcaagtgtggaaccatctcaccactcaagctggggctcatgctcccgcagggtggtgtgggaaaggcggtgtgccgtgaaggccaagggccaggttatgggctgtcccagggcttgagctgcttctccagcagctcctagccatgaaaccacaaacactttgcctcccccttctgagtcttggtgccctcatccataatacggttacaatatatacctcacaggcttgttgttgtgaggttcaaactaaatcctttataaaatgtccctgaaacaytgtaggtatgcaacaaatgttggctatctcccccttagtagaaatccgacttcatgtgcactcagaacattctgtgagaaagtaaaattgctctctttaacctcaactttaaaacctagggatatatcttcaagtttccccattacctaatgatgactattatatttttactcaattttgaaatttacaagtcatgttcacatagatcttatctcactctggcctaaaatgctcccataaaattggcagaacaaatttaatcatttttattttatagaatcaggaactgaagttcatagagattaacatgcactttctacaaggacacacccactatcggaacccaggtttcttgcagcaaatctagtattcctctcaaatgccatctaggtttcaccttggctgttactttctagccaacccttgactccactgccccatgtgctcccaaagtatcttgtacttattctttcatggtacttatcgcactgtattgcagggcttctcaagcctgactatctaacagaattatgtgagactttttgtaaaatataatggatttagggcctcacgtgatttaggtcccacctccttaatcaggcgtctatttttgtttaaagttctccaggtgactctgatgcacagaatcatgcttactaaagcataaactctctaatggcagcaaccaaatctattttgttcatcattaggattctgaatccttaaacaatatctggcaatactattcaatattattatcaataacatttactgagcatttactctatgccagacactatgataagtaatgtgtgtgcatttgtttctgttaattctgccaatcgtcctatgaagaaggagttattatcaccctatttaaagagtgggtaactgaggcttggagaggagcttgggaaacatttagtaaatacatcaatgactattagcagtacaattcatgcttcctacctgcttccatgataataactggaaccttcaagaaagtgattataaaatatgtaataaaggactctggtacagtcagctttcaggcacacattagtcattgtctctagaaagtagaatagtaaagcagagccttgggagagcttgggggcagacagcatggccccaagacactatttctgagtcccacaaatagcacattttagttgctgaaccaatagaaaatagcctgaattcctcctagatcatctaatattattgttcaatttaaatacttttggcttcaagtagcagaactaatgtggctgaaacagatggggactgattttctcatataagaaatcctgaaataggtggtcctgatgcgggcttagccatttaacagcatcattaaggcccccaaatccccaaacgcctctcagctttctactctgccaccttctcattgtcagcagtgtttctgttcactgtctcaygatggccacagcagcttcaagcatcccttcacctgaaaacacctgaaaacagctgaaagcagaaggggaaggacaaactcatccatgtacctctctcctttttcaaaggggaaaaatgtttcccagaagccacctagcagacttcctcttcctcctggcagtaggtcacatagccacagttagcccaaaagaagtccagggaagcaagcgatgggcatggtggcatggcattgtcttctctcctrtgagaggtaggacttatcacaaggacagaggagggagaaaaatggttgcttcttagacartttattatctcagcctcaaataatctttatttaaagtactactaaatcaactagattcgcctttagaatattttcaaaacctgtttggccctatgatacgaatccartgttgttgaagaaaggggcatgtcagctccagagatctctagacgactgctctatggacagttaaagactttggcaacagcagacatgtgatgatggctaatgctctcctctcctgtttccaggtcaacagcgacctcatttacattacagctaagaaagatggcactcatgtggtggaaaatgtggatgccacccacattgggaaattaattgtgaccaaacaaattggaggagayggcatgatggatattactgatacttacaaattccaagaaggtaatttactaccactgaatgaagatttatttgcccaagtccattgagtacttattcattgtcactcagagatgagttccagagaatgcactggcatttgcagcatttggtagcaacagcagaagtataaactttcacrtgtgaaagacacgtcacatatgcaatttttcattgtagttttctttgctagcttgctttgggcagaattctcattcacstggcttgtaaaatgatttggtttaaagtcatacctaatttaacagaatatagaatatgttcttgctcacaagaaccttaattttaaataatcctattagaaaacactgtataactaatgtaattttagtccaataatagaaattaaaataactacttcacatttgtttagtactttaccaattatttccacatacattgttctattacattatcatggaagactacaacgtagayaatacaatattaataggacaatgcaatctctctaactcaggacaattaggtcgaaggccagtttcaattccaaaataatgtcatggtgggtttttgttaacttttattgcatagaatgtttcaaatggcactactgagtttaattctatctcaatcaatgcttagtgtccgstcyatgcctgcaattggtttggtgctggcgattccagcagtgagcagractcagttcctgtcctggtccragtgacaggattattgtgcagaggggtctttggaaacaataagtaggggcatttagtccaactgattcagaaaaagacttgagaagagaagtcgtggacctcggttaaagaagctggacaggggtttccagacagtgtgaacatgaccaaagttacagggcgtgcagcagcccggtatgtttagggggatcctgcaggctcagaatgcccagtgactgaagacaaagctgcccgaggccagcagtggccagaactggaggaccgtgagtgtcctgatggggaacatgcaacatattttgcaaatgattcactgccagaggttcttaggagtatttatttttagtaaatggataaaaatgacaagtaattagcatatacctaaatattcattggaatccatgaagtgctaaggagtgcagaatttattttaaatagtttagacagtctccctgctcttatttacaaaagtaatttgcactacaaagaagaarcttgctgaattgagaacacttgtgcatagtctcagaaagtcagaatttttgttatctgaactagtgaattttcactgtattttttaaatgcttcattttcctcttctgttggttatcatccattgcacaacacagatacaaaggtggtatttttttgtcatttggatttttccttaaaggaaaatttaaaacaatataagtgcaaataaaacaaaacaaacaagcaatgccctcttactgtagagttataagcaaaaaaaggtttggagaaacaaaaaagcaagttcatagaaaagttagctgcaacatccactcattcatacatacatccacacgacagctggctcttaccatctgccatcttccagtgctgtgtagagctggatacatgtacagccctgccttcccatgcagctggggagaaaagcagaaggcagccctcactgtgctgggtgagaattgctctggcacagggtggacgggtgctgccgggcacagagaaaggctctcagccaagaatcggcagttggggaagacctcgtggaggaagttagtgatgggctcactaagcccaaaggacacacaagaattggcagatgaagctggggaaagaggtccccaagaaaaggcagtaaggcaaggactgtggtgagaactctcgtatttggaagaagtcctgaccagacagagtagtgaagaaaagttgcacctacaggcagctaggggcagcaggaagcgagctgtccacatgacagatgtctcttggaaaccatggagccgagcacagytgccattagctgtcagcatggaggtgacagtgaaggccaactcaggaatgggacagaatcagatgccacgagaggaaagactaaaacccagtccacgaaacaggagtcaggggcttggctgggggtggataacaaattaaaacaaaatgtgtccgcactgcatgaggaagacatctgaggtccaggcctctagagtttagcaaggaggcaaggctgagggagagggacagtgtggaggtctggtccaactagaagaatccctaaatccacatagatggttgtaagcgacgactcatcctgcttcggggctggagtttgaccccaagtggatagtttcttaatcaagggtggcatacacatttcaractggaactttggaagtgaccaagtagaatgttgttttgagaagaacaccaagactgcatctgaatgtggcgggtagaaggattgatggccgccattggccactggcatgcagtgaggactcgtcatatccgtggctcagtacttaccaccctgattctcaccgttgaatctcttataatttctctgatccacaaatgctgagtgtagataccaaaatatggaaatgagtagaatcacaggaaacaaattattactagatttaggacttaactattttaatgaattaaatcatggaaagatcaggttcacttcaacttactaaagcttattattaactttataacttttttcaagatatataattaagaaacgataagactttgaaaatcagaatttctgaagacttctcctgtggcaatatatcttctttgataacagtgtcttgattccattccctctttgctccttcagttacttccagggtcactgttatttccacctctccctctctattttctccttccaatcagcatttaagcaggctcaaatatctgctgtgttaaaaacaaaaattacaaaaatctttttcaccactgtctcttcctcctcgcctccttgccgtcctggagygctgcctggacttgcgtcctgctgtgttccttctccactccttccgcgcacactctgtcctgatttctgctaccagcacttccttgaagttgttctcaaggttgccaagaccacccaattgtcacagggaagaaacattttgcagacttcagcttacttgaccttcctatacttcctggtgctgttgttcactccctttgcttgcaattctgtcttttctttgtttctacaatgttactttctcctggttccaccccctcctgcctgaccctcttttcctacctctttttgactataagcttttcccctttcttcacccttttcaaattccatttcattctaggcatctatccttgggctccattcccacccacctgatgttcttcccacatagctggtgttaatgttcacatatgtaccatcaccccatgtctgtgtctccaccgggactttacctaaatgtcctacagaaacctgacacggaacttcccaaatgacacctctcactctctccctcacctcaggtccgtttctcccactccccctactctggtgaagagaaccaccatccactcaaatttagctacttaagaatgagttaagcaacaaatcctctaaatgtcccctctgaaattgttctcgaatgcatcccctcccctccagctctgtagcctaaaaattaaatattatctggtgtgtacaactcttaatatagtgcctgacacataataagtgtccaataaaagtttcccctattactagtaattctgttattcctgccatactactgctattagtttgggctatgawtagttttctcctggaaaaatacttgctctagcttcccaattccacctcacctcctcaggccctccttccctcagtctagcccctgccttgctgccaaagtaatatctgaaatgtaaacctgagcctctcccagcactgcttaaaagccccacccccccccccctctccctgtggcctccagggcatccagtcctaactcacaaagcctcttgctaagtggcttttcggcacctggtcactgcacctcctgagcatgcccccacaggtattgtatgcagaggccagggacctgccagcagttcctccaacaagccaagccccccacctgcatccctggtcttgccctcgctccaaaaactccgagaggcctcccatgccccttcctttccccatgcactgcaggccaacctccgtcccagcatctgtggtgagcacctgtgtgctgccattgctcttcacgtgttccttctgcaccagtgagggaaagactgtttctcctctgtgcctagtgcctagcacggtgtttggaacattatggggtttccaacagcatgagatgatttgaatgaatggttactggggaggcactttcacagctaggcttagttgaacataaaatgtcctaaactggactattatgaagaggaaagttttgtctctggctgaaagcaaaatgcttctccaaacctcaatccttcagatcctctgtgccaggctgggtttcagggcctggggatgcagaggtggacaacatgtctctgttctcatggagcttgcattccagcaaggaagataatgtcacacagtaactagtactgtgacaaggaagaggaaataaaaccaggtatgtgttagggagagccgagaacactagggtttgaggacacattacacaaggtaagagggggaggacaggggaggtgacagtggagctaaagccagaagaatgagaggcttcgtccaacataaaagggctctcttattacatcctagttaatggaaagatatttttgactttgcacccagaggctgcagaagaatctcagaaaatataatctggctttggatatgtctctcactgcactaaaatgttgcctgtggccctgaattatgtaagatgccagagcacgcagcataactgtagagaaacaggaattactctgccaggctctgggaaagccgtgcagttgttttctcctctctgggcstgcgcttcctggaacagccccagcctgcttctgtttggcggtctccgctcacagaggacagtgcttccccagaaggaagctccaggttcctgcacccatggcaggctgtgaagttgcttgtggctggcttcaaggcttcttctcccattcacctcaccttggccagctcagctcctctctgatgtgttmctgatgctcgaatttscctcctgcattttgcctcaatgcatctctggcccgcatccaaagtgatcatcattaatgttctcttctcatggatctattggccagatgatttctgctaaaagatttcactgcacttcccttgtcctcactcctccttccctttttcttacctccctccgagtgctctagctgatgcttgtcctagaccaactgttcctggcacattcttgcagtcttgacaatcagggaaatcgttaatacacacacacactacacattcacattcgtatgcaatgccttctggcattttttctgtctttgcagagtagcttccatttattatatatctacttcctctaattcacctaataaacctaggatgtagacacccttattttacaaacaaggaaagtgatggtaataatagtgtctgtcttatagtgttgttatgaggattaaatgacacaatgcatcataagcacttatgccagtgcttggcacagagctagccctcagtgagggttctgatgattcattgacctctcagtcaccattgcattttattattaactagataaagtagaagacaatacctttaaactagcataattataaaagctaggattcttattttaaagtgatttttttttcactagccattctcaagcctagtttttacaagccaaggaatttgccttcatcttctcatctctatccttagggatacacaaagataaacccaaaggtatttaggatggaaaagaggatgatgaccatccctcacatctgcatgagccctgtttccaagscraagccttttgtccaaggctctgtaaggaccgttctcccaccttcccagtgtctgaggcataagctccttctgaggcctgacttgtatctgtattttctgcctcatcacttagacaaagctatgtttttcttcttctggaggttaccctcctctttttcctcccttcatctccaccacaaccactttgcaaaccctgcacaaaacattttcctaaaagcagcacacacacctcgaactgcattagaacttaggtgcaccacygcctgtcaacagatgtccctcaaaaaactgccctccgtgtcagatgagtttgggaaaccttgtgtaaagaaaggcaaagaggtgtccttgctgctgggcttcacttagaacctctaatttgctaattaaggtggagaacatctccaggaggcgctggacaactagggcatctccaagggatctgaccggagcaccttgggcagggtcgcctttttaatgtcttgccagagcccagcatccttggggactgggggatgcaagttttggtagaaccttctgccatggcatgggtgttggggrcaatggcaattgagtgagatagggaagaacggggcaggagccctcaagggtcagctcagcaaacagcaagtgggacaggcccargtggaaggagagatgaggaagacaggtcttattggggggcaggtattcacaaatcagagagaaaagttacattgcaggaggtggaatggcaagaggcaattatttccaattattagaggtccccaaattctagccacatggctgggactaagaaaagcaagcaaactgacaccacagtttaagaaaagatagacattgccaattttacctcccaccccctgaaatagtggccccggagaaacccctttctggatagatcccaacactgtcacctcctaacttgcagcctaggctggtcactgactgtctggcaatctgactttgcagaatttataacataggaataatgacggcaccctcctcctggggaggtctgaagcttgtattatagaaacaccccaacaagtgcagtacacrgtgcatccattaatgtgactttctctctggtggattgtatttttgcctgtcattatctctggatctcccccaggtcaagaagaagagagattggccctagaaactgccctgatgtacrgagctaaaaagcccctcaacacagaaggtgtcatgaaatcaaggtccaacgttgacatggactttgaagtggaaaatgctgtgctgggaaaagacttcaagctctccatcaccttccggaavaacagccacaaccgttacaccatcayagcttatctctcagccaacatcaccttctacaccrgggtccygaaggcagarttcaagaaggagacgttcgacrtgacgctggagcccttgtcctgtaagctaacaatggtgtggttctttstgagactcgctgtctggcccctgtcttgctaggtgttaatgcccgttatagctttatatcaaagttaaagttccctccaagatctcagaagtgtgagcctcacagggagaacccactcattctgcaaaagcctccactttctttttttttatttttattttttgagatggaatctcgctctgacacccaggctggagtgcaatgmgaygatcttggttcactgcaacctttgcctcctgggttcaagcaatcctcctgcctcagcctcccgagtagctgggattacaggcacrtgccaccacrccaggcaaatttttgtatttttagtagagacgggrtttcactatgttggccaggctgatctcaaactcctgacctcaggtgatccacccacctcggcctgccaaagtgctggaattataggcgtcagccaccgcactcggcccaaaagcctccactttcatcctcacgtctcatgcacagaagtgaacattgaaaatttcaaagcctagagccccatgagttgtgagaattaaatgtaacttcttgctactcaaagtgtggtccatgagccagctgcatcagcattccccaggagtttgwaaaaaatgtagaatctcatgtcccaccccacaccctctgaatcaaaatccatgttttgacaagatcccaagcagactggagtgtacaggagagtttgtggagcatggatctaaatgatccatctcagaaacaggccctctgctggtgcctctcgcccaagttaggaaagtcttttgggggctgtccagaatgaatrgtgtgctttgctttcccattcaaaaagatacacgcgctgacataggccgcttcttaaaacgctgtctcctgtaatctcagcactttgggaggctgaggttagcggatcacctgaggttaggagttcgagaccagcctgactaacatggtgaaaacccatctctactaaaaatacaaaaattagcccggcgtggtggcaggcacctgtagtctcagctactcaggaggctgaggcaggagaattgctcgaacccgggaggcggaggttgcagtgagctgagatcgtgccactgccctccagcctgggtgactgagcgatactccgtctcaaaaaaaaaaaaaaaagaaaagaatggaggctggaaacaaagctgtgtcatctaggaggggcctaggaagaggttttctgcctctgccatctcttgtggggcctctttctcgtccttgcatgcacatccttccaagcattttcatcactgtaaaaactcagaatattttaagcagatcagggtccacgtgctacagcttgccttggggattacaatctcaaaaaatcacatttcctaggatgttcgtatttggtgggcacaacagttgaccacacgatgggcaacacaagtccattggaagaaactggtctctaggcagagaatgagttagagcaggttgcaaaggacctcgatactttggggcaccaatttctgttggcctgacatggggcactgaagagaaaagtgtacaaataataattttgacaaagcaaaggcaagcaaaactaatacgctcccctgggatggtcaagccacaagtctgaattgctctcaagctctctggattttgtggctgtcacagatcatggtccccttactgaggttttggaaaatattcccagaaaaatgagaaactattttttaaaatcctaattccaaggaacttactcaaatttgaaggaagcaaatctccccagcttcagtaatggagctaacaattaagaaatcactatagtggggccaggcatggtggctcatgcctgtaatcccagcagtttgggaggctgaggcgggtggatcaactgaggtcaggagctcgagaccagcctggccaacatggtgaaagctcatctctactaaaaatacaaaaaattagccaggcgttgtggcaggtgcctgtaatcccagctacttgggaggctaagacaggagaatcacctgaactcaggaggtggaggttgcagtgagccaagatcgtgccactgcactccagcctgggggacagagcaagacttcatctcaaaaaaaaaaaacactrtagtgttttctttggaaactaaaagctttggcacttttcctattcctagggtagtaaaggtaattttcatggaaaagaatagtcagtgtaaaggactgaagaggacaacagtcatggggattgtttaaaacaggcagccacatttgatttcagagagttttgcaaatagacaattctggatgtaagcgatgactgtgtcacctaccagctgtgtttcctgagcaaggtacttaagcactctgagctgtctctcctcatcygcaaaggggaaaaacagcacacacaccccggggttcttgattcattcccctaacctttatttagtgcttgcaagtccaggttctgttttatgctggagacacagcaatgcctattctkactgaatttctgatctcatgggggaaccaaacaaacaagtgaatctatagtatagttatatgggtaatagaaaaatacaaagcaggttaaggaaaacggggagtacctgtggagatggtcagaaaaaaaaccctctctaatggggtgacatttaacagagacctgagtgaaggtcagaagtgagcattccagccagaagaaactgtatgtgcaaaggccctggggccagagcatgtctgatgtgttcaatgagcaggaaggagccagaatcaggaacaaaggtggcaagggggcagtgctgggtgcagaccatataaagaattgtaggcctttataaggcctttggtttttattttgagtgagctgaggagcctttagagagttttgagcagaaatgtggcataatctaasttaggttttgaaaagaccactggctgctgtgttgagaagagactaaagaggaagtagggcggaaggttagagactggtaggatgcttctgcaatcactccactgaaaggggttgatagcagtgatggaagcagcgagaaccagtccgatctgggcatgtgctgaaggtggagcccgcctgattggctgagagactggatatgtggtgtgagagaaggarggtatggaggaagccaaatgagtgatgaatgtgaaatgtktgccacatggtagaatcttagtaaatggtaacttccaacatgtttacatttggggaaactgaagctcgagagatgagtcgatgtgttcaagcccccacacagcaatgagaggcaaagcagataatagagtagacagataatagcagtgacagtgagccagttcagggtaaacttggccccaagtgggccaggtcccttccttgtgctcccattacctggagtctagcacagatccttagacaaagaaccaaatgccagcccttttcccacctcacaagtgtcctgtctcataatctccttccccttccctctttaatccaattaaagaatgagcttgtatgggtgagtagaatgatatcattctctcagtcatcgacctagggacagctgaccaaacctatgcctgagtccataggaacacatctcccattcgcttggccagccccaggttgtcctgaataacttgaagggaactggagactctttgttcctttgccctgcaggcaggtggtattaactgtgaccaataaattgtatattgaaatataaattaaattgcagtgtattgcaaaaagccacataacttcaggccttgatcaagcattcttagatgcctctgctgcaaagaaagctttccaagtagaatgggaggcatactttccagattgatgattaaagggaatgtgtgtgctggaatcagcttgggagatctgaataacttaaacctctccgtaccttcaaaggtgctatcatttccacttggctatatttagttttctttgctttttggaaaagagatgaggcagctccagtctgtgtctcccttggctttccccagacaccgtaaatgatattggcagcatcccagccctaccrctcatagagcgaaaacctattcctccttctcctgccacgtttaataaactttatctagaacaatttcttgtgcagtggcaaaacacagcacttacataacatactatttcagaagcactgttctcttgggctctgaagcacagcctggtttctttagtgctatgatttagggagtgttctacctcagagaagaaaggggtcctgatactgagattataaaggtagcaagagcctctgtaaagaaatcatatcccattagccaaaagaaatccagtggtcaaacatagtcctctagaaatagtcagargaagtcattttattattgttattactggaaacagctagaggcaaaaggcatcttcttcgaggccttccaccttgccacttcatccattctatctagagacacgataaactgaccatttgtgctcatctgaggctgtaaccaatagagggccagaacctcactcatctaaacaattawttgcaaggggagccatggaggaagcagggtccaggcttaggtccaaagacagcaatacgagagcgggtcattccaaaaggcaggacctgggggccaaggtcaaggcaaggtcatagctttaaagagtcagctctaaatggaatagctctgccccaggaatcaagccaacaaagctagctctttagcgcttgcccaaaataggccaatacattctaataatccacctgccctatgcggggtttcttggtttcagcaccattgacattatgggctggatactttgttgtgggactatcctgtgcattgtaggatgtttaactgcatttttggcccctatccaccagattccagtagtaacccaccctccaccccagttgtgacmatcaaaaagttctccagacattgccaaatgtcccctggggataacattgcctcctattgacaactactagtctaggatgaccaacctttctagttttccagggattgatggggttctcaggatgcaggcctttcaatttaaaacccaggtagttctcagtccaccctaactctgccctaacttaccccttctgctgttagaacctcctgtctctcagagtatctcacacttcartaggcattgtctggggtcttattcaaatgcagatcctgacttcactggtgcagtaagaagtcagagaatctgcatctgtaacaagctcccaggtgatgatggtgctgctggtgtgcagaccgcaggaggaacagcaaagacctggactggaaagccatcccttccactggaacccaggctgtctgcagggctgattctacagggatgcccctggttgttggagtggcccttctcaaccctggctgcacatcagagtcagctgcagagctgttaaaaatacagatgtctaggtcctccaaggctctgatttaattggcctggaatgagagccagcttggtaggtctttaagggtccccaggtgattgtgatatagagccatgactgagaactcttcaatcagaagtcctggaagcaaggcacagcacttacgcatctgyaaagagacttccaaatagaagtgctgcccaagacagaggctttcccagcctcttggtcttcaaggtccagagcaagctgctgcagatccatcgcaggtgtgagagttcctccacagatgatgggcatggctcaatgcacccacaccttcgagccagtggggagtcaggggccctgccctctgctctggtgcatgcccatccacaggcaccccaccctgctgcaaaactgctgttcagtacagcaggctaaaatgaattaccctctgtgctcaaactgttggccatgaagctgtttccttcaataacttccacaggaaggggaagtctttggcaaaagccagaaactgagaaggaaagcagtaaagacattcagttctgtgaaggttcatagagtctgttctctgtggctggggatggaggaatgagtcacccattcacctgcggagtctgccagctgtcggcacatacaggcatctggctccaaccaggtagcagtgggtgcacacctgggctcagcctacagaaaaactgcccattgctctctagaatcctggacagtgggaaatgggagttagagagaaagtgagccagagccacaagatagaactcaccatcctcagcccagatggtaattggaggggagccaggaccactctccatcttccaaatgccattctcattggcttgtccccaggacctagaaatctgacatcagtgactggtttccattgagaaaacaattgtttggcacagaggtcttctaaatcacaaacagaggttcggagatagttgaatgcctttggtagaaactggtttcaacagcttccttctcttaaatagaaaaatcatatcagattggagagaaaatgtggaatgctacagagaaaatgtgtaggtagttgacaatttagtctgagtgtggcccatggcctaggtgagacacttcttatttgacaagggatcctatgtggaatgggggccttggacttcagcaccccacatgttccattttgggatgatcccrgcccaaatcaaagccaccattaaaacccattggtccttctttgccatgaaaatcacatcttttccatggcatttcttttacaacagcaaaagaactgtttggaaggtttgacacattttctccagtgagacttcaatgaatattaaatttccagcacattctttacctaagaagcaggacagcttatccccaattgactctttgttccacttgccccttacctttgctgtgttcctggtggcttccaggctaatgtgggaggggtagggaaacttggagaaaagtaaagcagaccctgtctcaagtcttgatgccaggcctgtgtgtgttttctcctactagtcaagaaagaggcggtgcwgatccaagccggcgagtacatgggtcagctgctggaacaagcgtccctgcacttctttgtcacagctcgcatcaatgagaccagggatgttctggccaagcaaaagtccaccgtgctaaccatccctgagatcatcatcaaggtcagtcttagcgtctcatcctggaacagagacaaaggcacgcagacttagtgttcatgtgtgcatatgygtgcttgtatgtgtgtgtgtgtgtgaatgaatgtcctgctcaaaaaaaaaaaaaaaaaaaataccagtgctaggatcctcttgttctttgaaagaagtaaactgccctatatatagacacatacatataacactttcctctcctctccagatttaaatatatagatgtggctgcagatataaatataacctgtgggtataaacacacttgtggaggaagataaagatgtgtaatggctacagatacttagaactttcagtgtctccagaataaagtgggtcaggcatgctataagaggtagataaactgcctgcaacattttggacagtaatattgtttatggaggtataattgtggatagtagattgcacagatcaaaatatacagcttgatgatgattttgtatgtgcgtgtgccttgcaaccacaagccagatgaagaaatggaggatttccaacacccctagaaggttccctsttgccttttacagccaataaccccctagactatcaccaagatagtaacttttctgacttttatcaccataggtttgttttgcccatttgaccagtagttttcatgatgcctctccagtgatcaccagaaatctctgcccaaatggctcaagagacttggcagaggaaggccgagggttgatgakagtggaagataaatgtgggagcctctgtgctcctacttctcaggcccacagctgtagcttctgggggcatctgtggttgcatccatgagacrccttyctgccctggaagcaggaacccaggcttctggcagtgaccctgaggagtgacatctcatgcagcccttatccaggtcttagagcccttccctagtctctggagaacaatcttcttgaagtgattaagagcaattagcacagatcctgctaaactacattgctctaaagtggtagataaatcaaagctttataaagttgatcacattttaatggtcctagaggtgggcagggtgagggtaggtagtccttgcttctcgtgaatcctttgctgtgagtcatttggaaagccaatgactgctgtgcagcattcagaatggcagtgtttcttggrtaactactgggctccagacgctgttcttaaagcactttacatggttgcattttcaaccaccaacaaccccacaaggtaaagagtactggcatyactttacagatgagaaaactgaagcacagagaggttctataactcctccaaggccatacagccagcaaatggcggagctgggcttccaaccccagcaggctggctgcaaaagcagggctgggaaccagctccttcaactgaacgttcttatggtctggtcctgtgtaattgacacagtgagccaccccaaggcaagtcccacccaaactcacgggcatgtaatgcccatcagggagcagaacaccaggcccttcttttctacaaaggcctacattgtcatgtctctttgtttccttcgcctctgtcatggcccacaggcccaccatggcgttgtgtgcacaggacgcctgaaaagaatgaaaacgaggctgtgcagggttggcaggcaaagggagaaacaaatgcaaaatggagaggtggggattagggttgctgcagaggtaccatcatccatgagaacgtgaagttaatagcttaaggtgcaggatgccctaaccccgaagctgttcttcacagctggctcttcctatagacatgtgggaccccctgctgcaggcctgtcccagctgcttggtggaagcagcttttgctacccttctgggctrttgcgcaggtttcatttatgagctcaaccctgaaccttccctgacagcagcraggcctgtgtgcgtacctaattatgaagtgacggcctgtccctgtgaaggtctcaggagagaggcttcccaagctgtgaagtgctcaaaccacagcagaaaatagaatttaattgcaccactgataataaaccggatgkatgaaggaaactgataactttcatcttttaggcactattaatttgcaggattatttgttagttatcttctgggtttacttaaagagcagtttaattccccagggcacaatcagaataccttatcccacaagttagcagacctgggcatgtagagagtactttaaatggagagttrtattgttttgtgtttccttccacaaagsaaccagagatgctgttcctggaggaaacttatttagaggtagggacatttgatagggaagagagcatgagagagatggagattctggcttctgtccatgccaagtttgttcaaaaaggtggaatggggcatcatcccataaactgtcctttaaccattagcccaactaactccaaggataacctaaatccaaatggagtagaagtgctcctgggtaaagcactcacaccctaaggaccacccaggagtcacggagctgtgagaggccctgagtgcagaagctccggcctgtggactggggacctgcctagcctcctggagaggtgaaatgcagagtcatagcaggggagggaaggagggaggggaagggagggagaggagagaagaacagaggggagaggagagaacagaggagaaaaggatggagggaggggaggggaggggaagatggagaggagaaaaagaggaaagaaaagaggaaggcacaggaggggagaggagagaacagaagagaagaggaagggacaagagggaaaaaggagcgagaatgggggggagaagagaaaaacggggagaggagagtaataagaaaacttcaagttgaaatattccaaaggaggcctagggagaggggtcagataaattgtataaaacacaactcaattaagagttattttttctccttccttccttccttcctttcctgtctttctatttttattttagatttgagggtacatatgaaggtttgttatgtagataaacacgtgtcacaggggtttgctgtacatattgttacatcacccaggtactaagcccggtacccagtagttatcttttctgctcctctccctcctcccatcctccccactccagtagaccccagtgtctgtttgtttccttctgtgtgttcgtaagttctcctcatttagctcccacctataagtgagaacatgcggtattacgttttctgttcctgcattagtttcttaagaattatagcctccatgggctttttttttcatatgcttgttggccatatctatgttcatgtcccttgcccactttttaatggggttgtttggtttttttcctgtaaacatgttcaagttccttatagatgctggttattggcaacatcaccaatcatcagagaaatgcaaatcaaagccaccatgagataccatctcataccagtcagaatagctataattaaaaagtcaaaaaataactggtactcgtggggttgtggagaaaaaggaacacttatatacggttggtgggagtgtaaactagttcaatcattgtggaaaacagtgtggccattcctgaaagagctaaacacagaactaccatttgacccagcaatcccattactgcgtagatacccaaaggaatataaatcattctatcataaagatacatgcacatatatgtttattgcagcactattcacaatagcacacacatggaatcaacctaaatgcccatcaatggtagactggacacaatgcagccatagctgtaaaaaaggatgaggtcatgtccttcgcaggaacacgaatggagccagagaccattatcttagcaaactaacacaggaagagaaaaccgaatactgcacgttctcacttataagtgggagctaaaagatgggaacatgtggatatatagagggaaacaacacacacagggtcctattggagggtgcagggtgcggcgtgggaggagggagaggatcaggaaaaataactaatggctactaggtttaatatctttgtgacaaaataatctgtacaaccctcatgacatgagtttacctatataacaaacctgcacatgtacccctgaacttaaaataaaaggttttttaaaaatgaggacttggaaagggagctaaatgcagtaaaagtacgaaaccacaatggctcagaggtccagaattacataggatatgtttctctaaattctaagaaaacgctcacaccctttttcaacctctttgagcctggatggacacacaactgactgagcctcaaggttgctgtgggcaaatgtgccaggcacagggtgaaattatgtgagagacagagaggagaccacagcccttcctgctcagctcagtcaagataagggttgggaccagcccctggtgattatgatgacagcagctatgatttattaagcactacattattaaacgcctctcttctatgatcttatttaaccctctataccatcctacaaggaggacgttactataaccctattttactgattagaaaactgagaggaccagagaaggcagtgccttgtagcacagtggtcagaacatgggctctggaaccaaatyatctgagtttaaagcttgttttctgaacatcataactgtgtaaacctggacagatcatttcacctctgttggcttctgcattctcatctgtaagtcaaaagcaatggtaactctcctcctggggtccttgtgagttttttatgagtcattggatgcccgagtcacagtgcacacctacatatgttggttgctgctattattgccattattgctgtttattagtaactggcccgtgatcacgtgcctgttgagggaaggagagacacttctggcccaggtcttcctgacttggaagcctgtgctggcagccgctgggctacaatggaactatcacaaaaagcagaggtggtcattgactttgcagagagttttgtattcaagggaggagagatcacacacacttgagtggtgtgggacatcaagaattaagactgtagaaagatgaatggtctccaatgaacagataacgttcaaccagtagagatggatggagagaccccttcagatactaggaagaaaatgttagcaagggctagagggraggtggacggcagtatgtagagcagtgagaagcgtgycttggctggggtggaggctgggagcagggatgagtaagggtaacctgaaaaagatagcttgaggctatgtggaggggagtctacaattttggatgagagctttatcatcgactctctgaacaaagaggcttcaagggagtttctagagtgggaatgtaacatgattgtcaactctgctctcccacaagtcggagccgctttttcttcctcccttctcttcaaagcctttgcccaaagcattgtcttctccaggaagtacccaactcagccttggaactggagtttcctaaaagctagtttccagctgttcttacctgattcccctttagatcaaatctaggccaatctggaacaatactgggctcacatgtctgaatccaagtcaccgtcaaccaaagcaggccagtggcttcctgtttgtgcatcccagtggacccagtcgtggatttyactggtccctgtggtgataaagatggggcctgggctcaatagtgctcccagtcaaccattcccagcacccaccatgtgtgagtcagagtgtgtgatcctcacatggaaacaggcagagagagacagtcattaaactttaatgagcacacgtctctttccccatgctatcaaaatattttgatgagaaaagaaaatttcattacaatcagacatagaatttttctctgccttcccatgtgttgcttgttctctctctctctctctctctctctctcacacacacacacacacacacacacacatcctctctctgaacttcagtatcccctttgcaaagtgaatacactatgattatactgctccttctattaagtacagtcacatataaaacactgcactggggggattgacatctgtagcaatgtttgtgagaatgcatggcccacgtccagacctagtagctgttggtaaatgttctttctcctctgtagtcccatcaatgcatgggggttgcttagggcagcatgtgggccactggcctgaagtgggccagtggcctgagtgtggccctcacctagtggcatggaatctcttgaatctctggtcaccaggtgttgagtgtatgcagcattccctgtggaatggggccttcctcatgcagggaggcccgccttggagatcctggagtaaggcctaggggagagaggagacactcacatgttcctccaatgatctctactcagtacctgccattctaaagcagctcaggagccagcacttgtgtggtattatcatgtggaaaaagtcctgcagcctttgcaggatgtcaggaagcaccaatagaactaattttctcatgtgaactaggaacaattttgctaggagaaaacataaccattttttatgtgtgtgatttttaaagttacaagcataagcaaacagatgtctccaaatttttcaaaaaaaaaaaaagcttttaaaatgaggacaattgactgtttccaagagtttttaaaagtaagcgtttgctctgtatttattttgtccattagctgaaagactttctagtttttatttatctctttatttagtcactcttgcattcatccattcttcatatagttatttggtgcccactctgtaaataaattgtagcaaatgcctagagctttcaaaaccattatcagagaggccgggtgcagtggctcacacctgtaatcccagcactttggaaggccaaggtggstggatcacttgaggtcaggagtttgggatgaacctgaccaacatggtgaaaccctgtttctactaaaaataaaaaattagccaggctgtagtggtgcgtgcctgtaaccccagctactcaggaagttgaggcaggagaatcacttgaatccaggaagcagaagctgcagtgagccgagatcccgccactgcactccagcctgggtgacagagcaagactcaaaaaacaaaacaaaacaaaagcaaaacattatcagagaaaaattcaacagtgagaacattttctttctttccttttttttttttagatggagtctcactctgtcccccaggctagagtgcagtggtgtgatctcggctcactgcaaccttcgtctcctgggttcaagcaattatcctacctcagtctcccaagtagctgggattacaggcgcccaccaccacgcccagataatttttgcatttttagtagagacagggtttcaccacgttggccaggctggtctcgaactcctgacctcaggtgatccacccaccttggcctcccaaagtgctgggattacaggcgtgagccactgcgcccggccaacagtgagaacatttttgttgcatttttctgaaatggggaaaggttgcgccactttctttcagcactggcccacctggaacagctccaggagtgcagttgctctgttttaacctgagctaaccagcacttacacagagcctggggtgctcctcttgcaaagacagtgtacatggggcctgtgaaagakgcttaacccacagaaatcgacttcaacaagcagaatatctgcatgaccagcactgattggtggggaattgtatagataacacaagatccatgggaagtatcactgttgacccyggagaggaggcagggaccttcctctgggcggcttccctccaggccagcactcacccctgtgcagattgtgcccatctgcaggtgggaaggagacagtgaggggacccagtccagcccactcgccaaccatcaagccctgcagcctggcatggagccacatccccccaaaaaagggggttcccttttccactttgcacagttgcatcctggctccagccccatgtccagatctcttccaacttgggacactagcttgttttttcttaacaaccatcctaatgttgtgttctaactggagcttttcatgagatgcccacaatttttaccgaggttaacagtagaatcctcttcagtctccctacggctcacaccctggaaacccaccgggatggaccaaggaagggtgggtggctgtggtggctgctgatctcactcctcccacatcccattcatacaactttatcccagaggacacattaaaattggggaaaccactgggcacggtggctcaagcctgtaatcccagcactttgggaggccgaggtgggtggatcacgaggtcaggagatcgagaccatcctggctaacacggtgaaaccccatctctactaaaagtacaaaaaattaggcaggcatagtggcgggcacctgtagtccctgctactcgggaggctgaggcaggagaatggcgtgaacctgggaggcagagcttgcagtgagctgagatcacaccactgcactccagcctgggcaacagagcaagactccgtctcgaaaaaaaaaaaaagaaagaaaaaaaggggaaaccacttgagatataatgagtgccccaaacaaagtacatgacagtgactggctacactgtgagacttaactgtagtttcatttagtgctgtaaatatcacaaacttcattaaggtggaaaatgggaacagactatgtgttctaattattgctgaaccctgaccattttcccctccatgtccacaaccgagcacgttctctctccagcctcctgyrctctctgtggctccatcgcactctcgtcaccaagattcacccctgcccacacccacacccttcatggggaggccggggatgggaaccaggaggtgggcttcttcacctctcccctttgtggctctcttctctaacccctgagaaaccgaatccacgtcattctccatagaagaccctataggtgaggaggttctcagggtcaccctggcaacatgttctccctttaaacctcatatttcattaatgctagtatgtgtcagatgctctgttgtatgatattacattgagtcaccccactaactgcataagaagctgaggcccagagaagtcaagcgacttgtctaaaaactcaaagtggcagccccggtcttcagcccctgcatccagcttgctctcccttcagcttggcctggaatagcaccactgtgtgcatcccagtcacctcagttatgtccgtgacactgtttcaggttatttgtggagtaaatcagaggtatctacctatgagtcctgagggactctgagcaaggaaagcctgcttaccccaggggaccctaggaggggacaccttcagccctgctcccatagctgactctcsatcccctcgtggctactttcacagaggattgtggccgtgggaccaaaccgtgggtgcccttagccaggatagatgatcgtaaactatgtctatgagtgagccctcctcatcgaaggtgttcatttccatctctstcttcaggacagctacagaacagtrcacattttagaatgaaaatgaggagtcactggtaactgcggtacctaaaacataatttgctctgtgcatttcatgtttgctatttttttgaatcttaaaaagagacacacatgagaataacsaatctcacattccagtcctgtaatcccagtatgtttgggctactgattctctttttaaaagtggcatctytcatttttaaaagagaaaatcctagatagtgactcctattatcatcaagtaatatatatcaaggccccaaggctamcttgtcacattttactctggcatagaaatctaattccttctctataaagtcaaaaagagagaggtgagttatagatgttttctaatttagttyagggtcaacttataatcctcgtcctcaactgatggtttagcgataacttaaaaggtgatgctgcaaatgattctttgctggatttcagaaaataaagaagctattccagcaaaaaaaaaagtttctatttttacctstattctgtcagggatcacagtatakgtagttttgaagatgaawgttttagagtcagaaagacctggatttatatccaacttccgccagattcctaactctgtaggctttttatttatcttctaaatttcaatttcacgtaaacagaatgggattaataatcatgtctacccccaagaccatagggctgtagagaagattaaataaggtagtgtaagtaaaytgatgaacagaatgcctgcattactaagtaaacactaactaaataaatgtaagttacttgttattattgttgtcattaaccagagtcaggatcacgtgttgctgagcaacggctatggccccagactgtctacatttgaatctctcctaccctacttactaatggtgtgaacttgagcaagttacttaactcctctgtgcctcagtttcctcatctataaaatgaagactcctaatatttacctcttagtgttgggaggattaagtgagttgatagaactttctagggtaatgggaacattttaaatctgctccatccaatgcagtagccacgagccatatgaggcttttgagtccttgaaagatggctcgtgcaactgaggaactgaattttttacatttcacttaattttaattaatttaattataaatagccctaggtggctagtggctactatattggaaaaatatagactgagaacatttcctaaccaccctagaaccattagcattggtcagtaagtgttcatctaagtgtcagctaaaagcaggggcagtgcctgtggtgatgagcagagtttgcaaacaagaaattgcccattatcaaaaatgatcacaggccaagggggagggaaaaatacagtttccagaaatacgtgcaatacatgattgaaagtacttgaaataagagctgttaggtgtgctaataaatcatgtatttcaaattgccaacctcacttattgttactctttctcaaactttttccttcatttcagtttcaattttgaatacagttatgtatttttaaagcatatgcttagtggaagatatcttgtgatttctaaaaaagtaatttctttccaaaaagtttatataagagaaagagagtatgtgtgtgttagtaactttcytgtttaccaaagaatcagagtagcagctcattatcatgaattagtataaaggacaggaatgtcaatatcagtaagtgatatgtaacttgaaaaagcataytacgggttgatttttttaaaacagagagagatattttcaayagaatattgagaaaaacttaaggccatcaagtatatgcaaaagcatttgacgtcaccaagtaagacatatgctttattcttttctctggcccaagtaatgaatactcttctctaaagcaaatacacataaaagtttcttcttgaactaaccttctctaaattgcctgaaggctccctttatttaaggttttatgagagcaagaaaatgaaaaatatgactgygaaaatgaaatgaaaatatgactatgcagatatggaattatgctttcagcaataaggaaaagggagctttgcagattcctaaaataatgtgatgcaaacagatattttctccccaaatagtcattgttctcagcattttgtaggtaccatarcatggtgcatcactgaaatcaacacataacgtgaaaacactatgtgttggcagcattttcctcaaaagaagcaaggagagggagacacctycagttacatttcccaagcagaacacastgatgtcgagcattgggtaggtttttacatttagtttggtttgagtgtctaaggctcattatcatcagtagtcagggacaggaagtttacattctcggtgcaggagacaagtgtcagaaaagggacactggtctttgttaattgcaaaagaaacacactacaaccagagaagggcttctcctctcacccctccccatccttctccctgctccccactccagcatcagggaaatctgggcagaattgatacacccatgccagcatctaattacagagacaatactggaagcaaactgattaggcatgacatatgaaattacctgagaaggtttaatgtcctgaacatattcagatctgaagcctatctatgatggcccarttgcatgggccagtttctcaaatactaagcattccttctcactgtcatcagtgacctggaagggtgtatttcactttccacagcgtaggaggcttcatgtagagccagtctactggtatggraagggttcttaatctagggttcaygggcccctagaaaaccatgtatggacttcataggtctatagtrcatcccctaaaaatacatgccyatattgtatatatcttgtatttgtcactgtgtatgtctgtgtagaggaaaggtcagtagctactatcagatatacttttgaaggggcttatgcccatccttatatagcataccatggagaagacagatggctccaaaatattttttccagaaagaatawagtgatcatagcaaacacttttgccaataatgtctctgtggcagctccatcttcttcagtttagagagcttttgtaaatgctatctttattttgtattttttaaatccaaagatgtttttgaaatgtttcttaatgcaggaaaaaatatattggacacacttgagaatgaaatcagggacaccatgtaaagtattctgawgtattgctacaccttcaatatctaaattgattgaggcagggcctctgggaagaaagtgaaaaattcagtctgtcttccacatgttttgtctataccagtggtttccaactggagggcaattttgcttactaaggaatatttggcaattgctggagacacttttggttgtgatggctggggtgcggggctgctcctggcatgcagtgggtagacaccagggatgttgcttaacatcgtacmtggcacaggacagctctgcaacaaagatgcatccagcccgatatgtcagtagtgttgatgctgagaagccctgatctagatcatgattastgtttttgccacagccttcaaaccaggcttctctctccacaccccatgtgccagccagcctaaaagtaacttctggttcatgttctagtttgcctgtcattgaaccagtctcctccccattaggccttatccattctcagtcttgtcagtgtggcttcaaatccaatgttgctcccaccggtttgaaaatctcccttactttctgactgccgttttttttttttttttttggacgtcagtacgaaacagttttggttgtcttgttattgctgagttgttggcttttccagctcctctgacctcagagtagcactctatcttagagttcaagatctccagttagacagactttaacttcaatcccaccttggtcatttggcagcttcaaatcctcattcaagttacctattttcctgaaccacagttttctcttttataaaatgaaatgcctggcaccagtgatcctgccctagaaaacctccttcttcttaagggaataactattattatagtctgatcgagctgatacaaatatagcccttgtgttgygaggcttatgtgagaatatatgtgaattatggttgtcagctggggctggttctttgtaatcaacaggggtgcctcaaataaatgaattacaggatccacccattaccagactgaggattgctggttaaagtgctggactccctgcctggcacacgatccatgctgtctaggtgcacctgctgttgttgctaccatgaccatcgtctgccyctctcctagttcccctgaayccagctctccaccactgccctccaggagatgcggatttaaatgtaacaaagtttagggagttggctgaaagtttcgtttttcttatagacttaagaaatcccatagccataaatttagtcacaaagcatggcttgatgagtaaagccataagagtgtattcttcttttaatcgatatataataattgtacatatttatggggtacatgtgatttttcaattcatgcatacagtgtgtaatgatcagatcaggaagattttattcttgactgtagcataagtaagcaagggtcctcttctctgggcaatgtccttcctctttacgtccattcttaaaaacgsctcatttccatatattttctcccatattatatagtggctaaagraacatggaatagtaatggctgtgttgtcatmtggaagatccagacatccagtaaattccatttytgagccattgacttaatttaataaatatttactggacattggtattgaagtactaagtattggagttaaaagtgggctgaaatataaggtgaataagacaaactacccagagcattgctaccctaaaaagcatcaactgtaatgcatygggcctttgccatgtgccttgcaatatgtttgccgttttatgagcatttttcattccaaacctttcttgcaagggaagaactattattcttatcttattcccaagttacttagagcttatacagatccatycatttggtatacatagctcctaaacaaacaaacaagtcttatagccacctggcattttgcggcacattgcgtttatgttggaaaagcatatggttctraagtgtgtggcatacagtaaacacagcttaaggtatagtaataataagagcattctacatagatcgccccataaaagtgtcagcccattttaaagacaagaaaactgagtctcagaaagcctaaatcacctgagtccccactgttaataagtgttgaacctggcactgagctctggctgtctcctgtggtgttcttccaaatacctgatacttctgagagtcataatagatcaactcaccaacaaataaccttttattttcctggactctggtactgtggctgtagaagaaaaatctcctttccttattttagtatccaggttcctcttcatgttcaacagtaaggactccatccttggcatatttcttgcgaatgtgtctaaaactaagaaggcacatgtgccctgaagcattttctacttcttaaactcaggaatcccctttgttccagcaggaaacttgatgcctatccagaagcaaagttcacttggccgccctcaccgtggaaacgtgttgccacaccaaatgaacwtccccctcctgctgtcaaagagcagtcagtggccaccgctattgacctgagctctaattagkctggttttataatgaggaaaagagtgygattctaattagtaaatttccatctctttctcaataggtatcctccagtcaaagcaatcagctatcctcatcacactggttccattgccaaaaaaataactgtatcataaaactctagtaaaagtgatgatggttaagacaacaagagagcagaacgaggttttatttgstgctaatgacctgcattctctctcttaggtccgtggcactcaggtagttggttctgacatgactgtgacarttsagtttaccaatcctttaaaagaaacccygygaaatgtctgggtacaccyggatggtcctggagtaacaagaccaatgaagaagatgttccggtaaaccttgggttggggagaccgggcaggcagtgcagrgctgtgggaagctttctctgtgtgtgtcttttccaaacatagatctgctccccartgaaaatgtcttggaagctgcctcctccttgccgaccatttctgtagggcgtggagtaaaactagggttggtttgaccagcactttcatcatttaatccttaaagacaccctacgatgtagatactgctattrtctcccttctgtagctgaggaatttgaggctttgagaggttgactggttacacaggttcagttacacagtttatgaaaacagagccaagattcagactcaggctggtgaattccagaacccaagtttgaaccactttgctgtactacctactcacgtatggtctcttctcatctttattgagctcctaccacgtgtcagatattatgctgagagatacccccttttcatgggtgctttgtctccagcctcacctcacagattttaccatcccaatcagtgtctacaactgttggattcaggtttttttttagttgagcctaaagagctctagatggttccccattcaggggaccaaagacaaccccaggttctgtaatgatatgaatgaaactcagcctcttccacacacaggccacttcaaattgtgcttgacaggtctcagtttctgtgacttctactaacaaagagtgtgacccaacaagataacccattccatggtcaggtarctctaacagtaaggaaacakgtttttctaccatttgatcctgccaatgatcctaattctgccatctggactgacagaaagtaaggcccatctcttttccatctgatggtttgcaaatgtttgcaaacagctgtctcatcttccttgaatcttttctacctggggacaaatatctgtcctgactttatttycctctcctctaacatggtttcagctctctctctctctctcccacacattccaatttgtcactactcctcttaaagtgtgacacccagaatggatcccaatctttgaggtttattactttcatttctaccacagataagtccttgtcagcatcaatcaatctagcacatttcctgtggagtgaccttctaaggcatagaaagggaggtagaggactttggaaactgcctcatgaccagatatgtcaagaattttcccgacaccctttatggaagcgaccccactctggaatctgtgggataaatgcaaggcctcacttataccctctggggcaactttattgcccataaagggctctccgcatttctttcaaattacaatgctcrtagcttctgcatctcatcatttaagagatgccttattgcagatgcaataaacaacagagaaaataatcttagtgcttttgaaacaacgcaagcacaaaacatagcaaccttcctgtgctaacaggaaagttacaggaaaaaaaaataagtaaattagtaatcaaccccagctacatagagaggtcagcagccatacccctgctttcgtcagaaacgacagtctcactcacccattctcgcaccttcccactcaaatcagatgcaagaatcgttcaggcaaagtgaaacacgtttcctcttccatacagccccctgctgtatccaactttttccttcccagacagtaaacccacaarctttatctgagtgtacyggaaacttctctatctttacaccttggctatccccctagaattccaccttggtcaaggccaacacatgaaaaaagacactgtgtgtcttagacaaaagatgaattattacacagtgaattattacacagtgcaatgacccactatttgggaggcctcaggctcaaaataggttaaatctccagatggtttgtttattgttaatgtctgacattggagtggagcaaagtggagtgaatcgggaraaaggatggataaggccagtcccttcttggacacagatgtcctgcccacacactggcttaaggtactrttagtagttactgcaacacgtaagtctaggcagacaagtagatagacagagagctagctgctcttagtcagtttgagctgctgtaacagaaatgccatagactgggtggcttatacaacaaacatttatatctcacacttctggagtctgggaagtctgaggacaaggtgccgaccaattcggttcctgatgagggctcccttcccagcttgcagatggctgtcttttcactgtgtcctcacatggggcagagagagggagggcaagttctctggcacctcttcttcgaagggcactaatcccatcatgagccccaccctcatgacctattctaatttagttacctccccaaagctccatcgctaaatggtatcacactggagtttgggtttcaacaaatgaatgtgtgaggaccacaaacatttagtccgtaacagtcctcaatctctctttttaagttttttttactgacacattgtaattstacatatttatgtggggcaatttgatgtttcgatacatatatatgttgtataatgatcaaatcggagtatttagtgtatccatcaccccatgcatttatcatttctttgtggtgagaacattcaaaagcctgtcttctagctcttttgtaatatacaatacctactgttaatcatagttaccttatcatgcaatagaacaccagaacttattcctcctatttaattgtcactttgttctcattggccaacctcttcccatcttccccttcatgttctcctcctcagtctctggtaaccactgttctgctctttgcttctatggtataataatttttttttttttagtgtctacatgtgagtgaaatcatgtagtatttgtctttccatgtctggtttatttcacttaccatgatgcccttcctccaagtctaattcatgttgttacaaatggcaggattttattctttttatggctgaatagttacagaaacccagcttcagggtggaatatctcccagacaagagaagctttatttctcagagacagtcaaaacttgggctaaaaatcatgacatagaaaacatttgttatctaagatgggcttacaacttggagcaagtgccactttctctgtttactcctcactccagcacacaccttcacaaccaagacctgagccagtccgtgcccacttccatatggtcagataattagaagcactccactgtgccctatgttgccaagatctgatctaggagcgccagatccatgtaacaacttggacgcctagaaagtgcaattccacaaaaccaaaatcctttgcaagaccgtatttctttctagaatacagctcttaaatagttggggaatcaccacccccactcattcacccacaccctgccagatgtggtgtctagaaggcaggggttattgaacccaaagcagagggcctggaaggtgaggagctggtaaacagggaattggagccaggaacaaagaaggcggtgctgtgtctcacccctcactcgcagtgagccaactctactctgaaatggtttatcttcctgctcttcccccactgcctccggcctgtctcagatgtgcagaggttccacctccacagactcttaactttctgcacttgatgcttccagagcgtcaaataatttatcttccagatttattttgctctttagaaaatgatccagttcaatatgttatttcaagagaaaaactcccccactttgtgatttgggcttaaactttaagtttctcaaataggacagaagctaaggtctagamgcacagaggacaaaccatgggcagttgcagtttattgtaataataatctyatttgcctgcgtgcattcaagatgataaatggccggtatctcctgatggctcagcacgttactgagaatcgtttatcacaacatccatccccagaaaataggattactccaacattgctccacttatcaaaatacttttttctctgttatgaatttatctgtatgtaaaatagcatgcatacgtatcttcatgtatgagtattttcatgtatgagttttttcgtatgtacacatcattatgccggatggttttatgagtaagagaaaatgataagagggggctaaatacttagcttctatttgaggtggttrtctacagtacatggtctcaggtcgggtccttaaccagggccactgtttcacaaagtgcttctgattgatcacttgggggaaccagaggagagagaatgaatggatacaggtaacaatagcacagctgttgagaaataaatatcccaaacttatattggtattgaattgagcactgagaattttctctctgcatacaggcaggagaaactttcctaaattatcttgcaaagagttcaatgaatcctccatgaacacttccaggacactcttattactaagtcaaaaagtatctttcctgcttgagaaataaaacctatgaaaaagtaagcacaatggtcagaaaaagccttttcttcttttctttttttatttctataggtttttggggaacagttggtgtttggttacatgaataagttctttggtggtggtttctgagacatttggtcacccatcacctaagcagtatatactgtaaccattttgtagtcttttatccctcccacctttcccctgagtccccaaagaccattgcgtcattgttcattgttatgcctttgcatcctcatagcttagctccagcttatgagtgagaacataggatgtttggttttccattcctgagttacttcacttagaatactggtctccagtttcatctaggtcactgtgaattccattgtttcattcctttttatggctgagtagtattccatggtatatgcataccacaatttctttattcactcattgatgggcatttgggctggttccatatttttgcaattgcacactgtgctgctataaatatgtgtgtgcaaatatcttagaaaaagccttttcttatagaacatatggtgtacacttttatgaagtgcagtgaagaggagcagaaagagtatgaatatgggactcagaaaaacccgggttcaaatttcatctctgcccatttaccaattatgtgatcttgaaaaagggacttcactggttaccttccatttttcttgatcataaaatctgctgaatagtatctgcctcaaagaactgtcatacatataaaacctgaatataatctcccaaggtttataggggaggctatatgtgaagcaccccagagaacactaaatctcaccaaccctgattagtctcagtctgcactgatgtgggcttgttcgtgacactcaggaagacttcagggcaaaggctgggaggaagaggagaacactagaaccatgaaaggctatgtcattagccgcatacattagggcattggcaacaaatggtagcagaaagttgcataggtggaggggcccaatttggtggttgaaataggaatttgaattacagaacatgaagattctcaaagtcaaatggcagcaggcagggctatattccagatgctgagcctgggmacaaggtctatcccaagggagttggcaaaagctaattcgagtgtcagggcctcagcaaaggcagctgggggattcayataggactgtaattccaggaggaaactagtggcaaaaactgagctgaggctcagaagatcagtcacatagataaggctactatggagggcttggrgacaagctagagttcagytgattaatggttggatgggaatcagcccagctcctgatggccactgggaggctggcggatgcatcccagtggaaggaaccatgacccaataagactgtcagtgacaggttctgcagagctttatgtgggggcctcatttggggcataacttgctgaatcagccagtgagagtcttcagtgtcctaagcaccaactgagagaaagaaagcaagtgacttaggcaagagttttcattgcttcctgatcaaagtggaaagctggatcttccaacctctcctctcttttccatcctttcagtgaaatccggcccaactccaccgtgcagtgggaagaagtgtgccggccctgggtctctgggcatcggaagctgatagccagcatgagcagtgactccctgagacatgtgtatggcgagctggaygtgcagattcaaagacgaccttccatgtgaatgcacaggaagctgagatgaaccctggcatttggcctcttgtagtcttggctaaggaaattctaacgcaaaaatagctcttgctttgrcttaggtgtgaagacccagacakgactgcagagggcyccagagtggagatcccacatatttcaaaaacatrcttttccaaacccaggctattcggcaaggaagttagtttttaatctctccaccttccaaaragtgctaagcattagctttaattaagctctcatagctcataagagtaacagtcatcatttatcatcacaaatggctacatctccaaatatcagtgggctctcttaccagggagatttgctcaatacctggcctcatttaaaacaagacttcagattccccactcagccttttgggaataatagcacatgatttgggctctagaattccagtcccctttctcrgggtcaggttctaccctccatgtgagaatatttttcccaggactagagcacaacataatttttatttttggcaaagccagaaaaagatctttcattttgcacctgcagccaagcaaatgcctgccaaattttagatttaccwtgttagaagaggtggccccatattaacaaattgcatttgtgggaaacttaaccacctacaaggagataagaaagcaggtgcaacactcaagtctattgaataatgtagttttgtgatgcattttatagaatgtgtcacactgtggcctgatcagcagragccaatatcccttactttaaccctttctgggatgcaatactaggaagtaaagtgaagaatttatctctttagttagtgattatatttcacccatctctcaggaatcatctcctttgcagaatgatgcaggttcaggtcccctttcagagatataataagcccaacaagttgaagaagctggcggatctagtgaccagatatatagaaggactgcagccactgattctctcttgtccttcacatcacccatkttgagacctcagcttggcactcaggtgctgaagggtaatatggactcagscttgcaaatagccagtgctagytctgacccaaccacagaggatgctgacatcatttgtattatgttccaaggctactacagagaaggctgcctgctatgtatttgcaaggctgatttatggtcagaatttccctctgatatgtctagggtgtgatttaggtcagtagactgtgattcttagcaaaaaatgaacagtgataagtatacwgggggcaaaatcagaatggaatgctctggtctatataaccacatttctaagcctttgagactgttcctgagccttcagcactaacctatgagggtgagctggtcccctctatatatacatcatacttaactttaytaagtaatctcacagcatttgccaagtctcccaatatccaattttaaaatgaaatgcattttgctagacagttaaactggcttaacttagtatattattattaattacaatgtaatagaagcttaaaataaagttaaactgattatatttgcatctgtgcagaagtgaatgcttttaattttcaatataacacactactaatcacaacttcttgagaaaccatccttcctccgcagtagacaacccaccctggataggaaaacaacaagcatttatcctctaaagaaaatgactctaacaggtgttaatgtcacagttttcttcacctctctctttctacattttattaactatattcactgaaggatcaagttgcatattagttcaaaaaccagcttccagaaactataaaatctctgtagatattttctcataaataatcttatgaaccattatggtgaatcagtggatagccagcatggagacctagcataacgaacacatgttatggtcttatgataatcacgtataggagatcctatattcatggcagacatcactgaacaattgtagctcagataagacctcagaatctttctcatttccaggtagcaactagcaattgattttaaactggcacacaatcaatagcttaccaatgaaaaagagtccaggaccagatggattcacagccgaattctaccagaggtacaaggaggaactggtaccattccttctgaaactattccaatcaatagaaaaagagggaatcctccctaactcattttatgaggccagcatcatcctgataccaaagctgggcagagacacaaccaaaaaagagaattttagaccaatatccttgatgaacattgatgcaaaaatcctcaataaaatactggcaaaccgaatccagcagcacatcaaaaagcttatccaccatgatcaagtgggcttcatccctgggatgcaaggctggttcaatatacacaaatcaataaatgtaatccagcatataaacagagccaaagacaaaaaccacatgattatctcaatagatgcagaaaaggcctttgacaaaattcaacaacccttcatgctaaaaactctcaataaattaggtattgatgggacgtatctcaaaataataagagctatctatgacaaacccacagccaatatcatactgaatgggccaaaactggaagcattccctttgaaaactggcacagacagggatgccctctctcaccactcctattcaacatagggttggaagttctggccagggcaattaggcaggagaaggaaataaagggtattcaattaggaaaagaggaagtcaaattgtccctgtttgcagacgacatgattgtatatctagaaaaccccactgtctcagcccaaaagctccttaagctgataagcaacttcagcaaagtctcaggatacaaaatcaatgtacaaaaatcacaaacattcttatacaccaacaacagacagagagccaaatcatgagtgaactcctattcacaattgctaaaaagagaataaaatacctaggaatccaacttacaagggatgtgaaggacctcttcagggagaactacaaaccactgctcaaggaaataaaagaggatacaaacaaatggaagaacattccatgcgcatgggtagcaagaatcaatatcgtgaaaatggccatactgcccaaggtaatttacagattcaatgccatccccatcaagctaccagtgactttcttcacagaattggaaaaaactactttaaagttcatatggaaccaaaagagagcctgcatcgccaagtcaatcctaagccaaaagaacaaagctggaggcatcacactacctgacttcaaactatactacaaggctacagtaaccaaaacagcatggtactggtaccaaaacagagatatagatcaatggaacaaaacagagctctcagaaataacgccgcatatctacaactatctgatctttgacaaacctgagaaaaacaagcaatggggaaaggattccctatttaataaatggtgctgggaaaactggctagccatatgtagaaagctgaaactggatcccttccttacagcttatacaaaaatcaattcaagatggattaaagacttaaacattagacctaaaaccataaaaaccctagaagaaaacctaggcaataccattcaggacataggcatggggaaggacttcatgtctaaaacaccaaaagcaatggcaacaaaagccaaaattgacaaatgggatctaatgaaactcaagagcttctgcacagcaaaagaaactaccatcagagtgaacaggcaacctacaaaatgggagaaaattttcgcaacctactcatctgacaaagggctaatatccagaatctacaatgaactcaaacaaatttacaagaaaaaaacaaacaaccccatcgaaaagtgggcaaaggacatgaacaggcacttctcaaaagaagacatttatgcagccaaaaaacacatgaaaaaatgctcaccatcactggccatcagagaaatgcaaatcaaaaccacaatgagataccatctcacaccagttagaatggcgatcattaaaaagtcaggaaacaacaggtgctggagaggatgtggagaaataggaacacttttacactattggtgggactgtaaactagttcaaccattgtggaagtcagtgtggcgattcctcagggatctagaaccagaaataccatttgacccagccatcccattacttggtatatacccaaaggactataaatcatgctgctataaagacacatgcacacgtatgtttattgcggcactattcacaatagcaaagacttggaaccaacccaaatgtccaacaatgatagactggattaagaaaatgtggcacatatacaccatggaatactatgcagccataaaaaaggatgagttcatgtcctttgtagggacatggatgaaattggaaatcatcattctcagtaaactatcgcaagaacaaaaaaccaaacactgcatattctcactcataggtgggaattgaacaatgagggcacatggacacaggaaggggaacatcacactccggggactgttgtggggtggggggatgggggagggatagcattgggagatatacctaatgctagatgacgagttagtgggcgcagcgcaccagcatggcacatgtatacatgtgtaactaacctgcacaatgcacacatgtaccctaaaacttataaataataataataaaaactgagaaaaaaaaacattaacaactggtgaatgtaagtgaaggatatgtgagtacttattgcactgctcttgcaaatctatagaactaaaattttaaaaaataaaaatttgcaaaataaaagaaagaaaaaaagaaactggcacgcaagatggaacctgtttgtcatgcttacccttagagccagcccattccctttgatagctaggatttcatacatattaatgctatggctctaagagttatgatttagcaatgataacaagcaatgtgtctcaggtagcagcaggactgtgagttctaactctccctgagtctctacctgtgctagtcctcagtgtttttaaacaaatccttattggtgtttgggacttcaaagacaaaagaggggaaacataagaaacataaatatttctgtttctcctgggggatatctcaaacaacctcaacaacaacacatataagatgatagatagatagatagatagatagatagatagatagatagatagatagatagatatagatagatatagatagattgttttgcaaatatttcacctcatcagccctgtgacagaagtaaatataactatctccataattaagaacctaattgagcctaggaagccatctatcatggcaaatcaatctcggggtggcagtgagcagtgaaacaactctggtttcagagtcaccatttgctgtacactgtttaaatcttttgttgcctccttagagttttaagaatgctggcttaagaccaacttcaggatgctttgaagagctgcagtagaacaacaaataaaaatatgtataaatttgtattagaaatgtcatgggaaattgagtttgtgctagactcattggcaatcaaaagtcacaaaatcccagggggaaagtcactgcctatgaacattcgtccaatgttattacaaagttaatcgtcagcgaacccaaccatcaattaattcaccttttcgacaatccagccatcccctgacatccagacaaccatctagccttccaagccatctatccatcctttttttccaacaatccacccgtgcacacatcaggtatcactttagagaacagggatgcaaagataaaaattccatggttcctgcccagaaagagttcataaagcagaggagtagcaagatatttaaacagataatccacaaccaaataatagagctatgcccagggtgccataggaatgaagacagaaagatgtctaaagaagccttcctcaatgtgcccaggaatcaaggaggaaaggttcagattgaatcttgaaaaaataataggtaagttggagaccatttaacaaagaggagctcgtgtaacaacatagagagaagaccatgaacatggcccccaactggcttgagatggagagatggtaagtgtccagtgagaagaggtggggccgaaaacgcaggaatgggtcagagttggagcacttcccgaaatgagaatttgtttattctcgtctgtattgtagagtagaactaagagaggctgctaggaacaaactagatacaaaactaaaagttatgcgtggctcaaggagtgacagggccaagaaagtagggggtggaatgccctaactcaggccagtgaagaaggtgtcagaatgggggtgtggccacagttggattcaaggaagggaaatgagacatacgaggctcaagtggataaagtgggagagatagcatgtagagacagagagctgtctatgtcagaaactatagaagtgtagacagacaagttccttctagggcagccaagtaaaatcaccatgagcaggtagcgctgaagacccagaatcttgcccctcaggtcatgcttatgtctgtctttgaggcaaaattctctccaacccagtatcgaaaagaaatgaactgcttctagagacattccttcacaccttaaggcaagttcgtccttctgttctcaccaccccaactcattcagactcaagtttgccttcccaagcaccttcctttctacataagaatgaaacaaacaaaaagccttttagtgtgtctgtaagaaattactttgtcgaaacaaacaaataaatgagaaacaaagcgcctcagttgcatcgggaaaagggacagggaaactgtgttcacctcaattgccaggaattatacacagcattttctagctctaaagacaatgaacatttttaaaagatacttggtaaactagctgttgatactactcatgaactcccattcattttcacactaatcattgttctaggacttacataattacctaagtaacgtttcaatagtcccaaaactaacataaggggtcctaatgagcatttcctattagtaaacagcatgtacctataaacgaagaggattctttcctctcttttctgatttgagcaagtttagacagtgggaaggtacaatatgaaaaatatgttaccaccagatttaggatttgttataaaggtggcagattttaaatgaccataaaatgattgtcactctttccattgagaaatggggaccacattccctctcctgcccttgattttaggtgggccgtgactgctttgaaagaatgtgataaaagcaatgctgccagttctcagctccaagccttggaaaactggcagtttccacttattttctcttgaaatcctcttcgtagaagccctgagcttctgcctaaaggctcaactactctgagactcccatgctggagaagccacgggtatacacacttcaaccctgctctgagctcagccttccagcgacctccgccaaggcaccagacctgataatgaggccatcctgggcgctccagatcagccc

SEQ ID NO: 8758 - DNA, 19758 bp, Homo sapiens
atactcagtgttaactattcattaaatcactattccctaaatactgtgaggcaggagtattattttatttaatttatctagcagtgtcagcagtgacaggcccacaatgattgaataaggactcccacatattagaagtaaccgctacatactatcacatttcggattaaattagattaaaaaaaaatctctacaaggatggggccattgtttcattcactactatatccctggcacctagaaatcgctctgacataagggcactaaataaatactttctgaaataattaatttaaattatgttccctaattatcctaacgcctgcaaactttcctttgcaaactcaaccttcattaggcttcaggtctcaagttgtgtggagttgtactgagcattaggaatgaggaaggagggacaggcttctcaggttggcacaggtctgtccagtgcatggctcaagtgctggaagtgccagcaaaactaagtaggctctgcagttaaccctctcgtaaataatggcagggacaacactaaaagtaccaaaatctgtggcgtgcaagacaaacgtacgggaatagacaaaagagaatcaaatagaagaagatacgaaagagaaaacgatgaaagatgacggttcaaaggagacaactgacaggttctagggtttaggacacctggaggtggaccattttgtgtacacctcgggaggcgtcgggtggcgatgggacaggggttgaaggaaagcactgaggggaaacaaggtgtgtcaccgcaaaaggacctcaaggttgtgtggcagcactcaccacctccccctgctccgcggacttgtacactccagacaccatctcgttatggagaagcaaaaacaacgcctcatccgccatttcctgctaattcttccaagcttcgagttttggctcccgtttgagctggtctgggggttccagctcgcgcctcagcgacttcgccggcgccgcggctccgtcaggccgccattctatccctgtggctaagagaccgaggtattcacacgacttcccaaaggctggtactgaaatgagtctggtactggagagagcccacacttcggggctaccaaatcctagggccgaacgaaagtctgacgggagctctaaccaaagccaaccagctgagatgcgatccggccgctgggcgggggcgaaaaaaacaacttccggtcccctctaccccggcattcggccagctctatgatcactgagttcctctctyccaagcccggagaggccagcgcccagatatgaggaaggttcccctctcaccacgatgtcgggggcagagcaagataaaataagacctaaagctcccgcctggcccgggcgcggtggctcacgcctgtaatcccagcactttgggtggcggaggcgggtggatcacatgaggtcggaagttcgaaccagcctgagaaaccccgtctctactataagtacaaaattagcggggcctggtggtgcatgcctgtaatcccagctactcgggagtctgaggcaggagaatcgcttgaactcgggaggcggaggttgcggtgagctgagatcgcgccactgcactccagcctgggcaacaagagtgaaactccgtctcaaaaaaaaaaaaaaaaaaagagctcccgcggccacctccttgttaattagcaatagaagttaaaaaaattcttttggcttcatcaaaagcatccacttcctgccatatgttcttcaaatatgaaaagttgtagaaagagtttaaaatatacgttttcacagtgcaaattttttaaatattgaaaagttatcccaattcctattgaattaagcccgggtatacaaaaagaattagagccattttgaccaccaggaattttcctgttagtggggtgcaagggacaagggaagtggagcaaacgaaaaacaagatacacttgaaccggaaaatacagactaatcagaggattaggtgaaaagtgctatagaattcagaaaagcgatgtcactgcaggatggagttgctaataatctacagcagtgtgagacaactgtaggaattgtcccactgcatgtgcaaataaatacacatgctacatcatagtatgtacatcttaaatttggcaaattcaaccgtaagcatgttgcttagcctgtgattagttcttccattggtaattcacaaaacaaaatttttccccaattgtccctgttgttttcccccaaattaacataccgcaaggtggctcatgcctgtaaaatccagcactttgggaggccgaggcacggggggtgggggggatcacgaggtcatgagttttgagagcagcctggccaacatggtgaaaacccgtctccactaaaaatacaaaaattagccgggcgtggtgacaggtgcctgtaatcccagctactcggggggctgaggcaggagaatcacttgaacctgggaggcagaggttgcagcgagcagaaattgtgccactgcactccagcctgggcgacagagcaagacttcgtctcaaaaaacgaaacacacacacaaactcttcatgccctttcacaggaatttaagatcatgttccaaaattttaattgtggtaggttttttttttaagcatgtcccttctaatgtttgaatcagtttattccattcatcacgtaaatccagcataaaagctccacttaagcctttgaaaacactaaattgtgtaattttgaagagtattttgccatggtaatcttaatttttccagcactaaattttcagttatgcgaaatcaggtcctttatgtctagatgacattcttgccctcatcactaccatcaagaaaaaggagtccaagtccaccacacaagtcaaaaagtaagtaaatggccaatttatcaaagttgacttctccaaccacaataacatgaggcttttaaagtacgtttctggatagaaaggaaacttatttaatgaggacctactaactattgaacacagcatcctacttatccttctccataaagttaaattgccaaggctcctaggaatagatcctatggaagcaaggacagtgagtgtgtgtgtgtgtgtgtgtgtgtgtgtgtgttttgagacagagttttgctcttgttgcccaggctggagtgcaatggcactatctcagctcactgcaaccccgcctcccgggttcaagtgattctcctgcctcagcttcccgagtaggtgggattacaggcatgcaccaccaagcccagctcattttgtatttttagtagagacggggtttctccatgttggtcaggctgatctcgaactcgtgacctcaggtgatccgcctgcctcggcctcccaaagtgctgggattacagacttgagccactgtgcccagctgtgtgtgttttgttttgtttgagacagagtctcactgttgcccaggccagagtgcagtggcatgatcttggctcactgcatgcaacctccacctcccgggctcaagcaattctgcctcagccttccaagcagctgacactacaggcacttgccaccatgcaggactaattttgtatttttagtagagacagggtttcatcatgttggccaggctggtcttgaactcccaatctcaagtgatccgcccaccaaggcctcccaaaatcctgggattaccgggccgaccatacatgcaaacattcttacacttgctgaatacgctctactattatcacactctcatgcctcaggtactgcctaaggttgtacacagacctgtaataagatcaatgaggctaagtatgctcacaatcagaattagataattgtcaatcttcatccccattattcatctctacatttttttctcctatagtacttcccgctttctaacatgctatactatttatttatttatttatttatttttgagacagagtctcactgctgcccaggctagagtgcagtggtgtgatgacagctcactgcagtctcaaactcctggactcaaacaatcatcccgcctcagcctctccagtacaatttttaaaatttttatttttagagacaggatygttgctatgttgcccaggctggtcttaactcctgggctgtagcgattctcccacctcagtctcccaagtatctgggattacaggcacaatccactggacttgctcagagatctttattgtacactgatatacccaagtgcctagaatagcacctggcacatagtgggccctcagtatttgttgaactaatgaatgatcattgctcctttggaagcctacaaaccccacagaagcaggaatcacaactatcttgttctaggctttattttcaaaccctagcttactgctgatacacaatggaagctctaaaagattgctggattaaagtggtagcttgagttaattaatacactgggcccactaattctttgtacaaggaagatagatgcctggctgagattatttaaagcattgtttctgtgggaaagtgttttgtttttttgtttgtttgggacggagtctcactctgtcgcacaggctagagtgcagtggtgcaatctcggctcactgcaacctccgcatcccgggctcccgagtagctgggattacaggcgtacaccaccactcccagctaatttttgtatttttagtaaaggcggggtttccccatgttggccaggctggtctccaactcctggcctcaagtgatccacctgcctcagcctccctaagtgctgggattacgggcgtgagccactgtgcctggcctgtgaaaaaatgttttctgagcttcaatttgtatatatatttatagaacaaaactagttcctacattggcagtgcaggtagggcagaaccagaagcgggacaacacacacagacaccactaacaacagggccgctcccttaggtctggtcttaaccagctctaggccaggtgaagaggctaactcrrccatgactgcgtgtctgtctcgccattgctttcttttctctagtatagatgctcagcgtctaatcagagactgattctcaactggcgtgaccaaaggacagttatattatctccagtctcaatttccttatcagtaataacaggcattttatccacactttcagtttgtgagaaataaggcatgtagacggtttcacagagggtcgggaacaagatcaacccctaacaaacgttagccattatgactaatgacttttactagttttcatttttgtcttccctcttctcactttaacctaatcaggctgggcgtggtggctcacgcctgtaatcccagcaccctgggaggtcgaggcaggcgaatcacctgaggtcaggagttcgagaccagcctgcccaacatggtggaatccggtctctaataatacaaaaattagccaggcgtgttggcgcgcgcctgtagtcccaggtactcaggaggctgaggcaggagaatcgcttgaacccgggaggaggaggttgcagtgagccgagatggtgccactgcactccagcctggacgacagagcgagactccgtgtgaaaaaaaaaaaattaacctaatagaggaaagcacgcgcccaccccctctctgagcatgcgcaccaacagaatagccgcgccctttcctaattaaatcattaaccaaggtgagggtaaggaagaaaaggaggcttggctaagtcccactctgatgtgatcacgttaaaacggtgtaaggcacattacatcataggttaaaaggcctagaaaactccgcgctccccttgccagaactgcagactcgcgagcctaagtctccgagaactcagggattgtgaaacccgccccgactctgcgctagcagcgggatccaggcacccgcagctaactggggagggagatgactgcctggctgacttttcattggctcagagtcacaaaggctgcaggttcttcccccttccggtcgctgagtggttgaggccgraagacaacgctcatcgtcattggctgagcccggctgtcagtcctttcgcrcctcggcggcgcggcatagcccggctcggcctgtaaagcagtctcaagcctgccgcagggagaagatggcggtcgccgtragaactttgcaggaacagctggaaaaggccaaagagagtcttaagaacgtggatgagaacattcgcaagctcaccgggcgggatccgaatgacgtgaggtaagggcctaacgggaactcggaactcggagctcggagaggcagccctcaggtcggggtgaattgggggcggggagggcggccagccttaagaagactggaacctcgaggcctgttcgcggggcggcgggtaaaaccctgttgtcgccgaggtggagaggccccaggtcccctcsgtagagcgctggtctcaggtccctgaggaaggagagcgaggcctgggtgcgccggcatgctktcttggcctgtgagaagacccggactgctgattcccgctctcggccctgcaggcccggaactgcagcacaawgccccttcccgctccggcggacacccggccygttgctggccccgagaccctgccgggacgcaacaagccgccttaccccrrcttcctgtccacgtgcagcctcctcggggatggcgggatggggacctgatccaggcttgttaatgtgtgggggcatcgaggtgaatataatttctgtgacacaggtcctggagaaacgaggaagttaaatgaaatagtacttcctgtcctgtttcagacatttagatttatttgaaactatctttttggaacttttgtgattttttctccttatgatycacatctctraaagtatttgggtgcgactgtgtgtgtctacatatgattttgcactgatwtgtaaatcttttacaggcccatccaagccagattgctggccctttctggtcctggtggaggtagaggacgtggtagtttattactgaggtaagatttcctttggacttwactcrtgctgaaactactggtactttactaaatatgttggtttgaacaaaacctgtgataaaatcaataacccagtgtttgtcrtctttgttttgtttaatgttgtaatagactagatttctgtataaawrtagttatcctgaaaaactggaggttgaagaatatattaagtktaccaattttgagtgaacttaattcttataaagtaacactataaaagcattttggaatgaatgcccgtttaaggctactttasttggaaagatttttgaaagtttaaccatattctcttgtcaaatggaaataccatttatcttgtatttcaagtgttttatgttgaacattttaaatttcaggcgtggattctcagatagtggaggaggacccccagccaaacagagagaccttgaaggggcagtcagtaggtaggtttaaaaaaagattcctgaaggcttctttagtttctgaggtaccacacaaatataaatrtttattaacaataattctgtttcagcaatattaaaattgagtggtatgccactccctgccccccccaagttctgttggtatttgactgaacagttgactatcagttccytcaaaacgcagttctgcactcatgataasctaaattttatccaaataaaggtcatgtgaagagtaaaattggaaaaattgtcaattagtaccattttttctgacttgtacttgaaaaacttaaccagtttgaaatacttagaaaatacaggagagcaaaattggtttgggcgttagttcacacattgtagtatcctttctctgctggaggaaagaataaaatgggatggagacttgatagaacaaagcttctggaaacragtcctagaagagagggcatttgcccttggtgtgcagttacstaaatacctcagtggtcatttaaattaatttttggccaggcacagtggctcatccwtgtaatcccagcactttgggaagccaagaccagcagatcacttgagcccaggagttggagaacagcctagatacatggtgaaatcccatccctacaaaaagtacaaaaaagttssccaggcatgctggctcacgcctgtagtcccagctgcttgggaggatgaggcaggaggatcacttgagcctgggaggtcgaggctgcagtgaaccgtggtggcaccactgcacttcagcctgggtggtatagtgaaaccctgtctcaaaaaaattaatattttctatgacaggctgggcggggagcgtcggaccagaagagaatcacgccaggaaagcgacccggaggatgatgatgttaaaaaggtattgagattgaaagaacttaaatgaatgtagtaccttcactttactacatttaaaagcacaccactcatatgctagttaaattactgagattttctttttctgcagccagcattgcagtcttcagttgtagctacctccaaagagcgcacacgtagagaccttatccaggatcaaaatatggatgaaaagggaaagcaaaggtatttccctgggggaaaaaaactctagtgaaataatgcagttataaggaaaatcaagggattgttcaagcatcctgtagtatttcttagaaaatgatgggtttaaatgaaatggatcctgttgacagtaaattttcttattctgttctttaggaaccggcgaatatttggcttgttgatgggtacccttcaaaaatttaaacaagaatccactgttgctactgaaagggtatttatccaagttttgttttgcatcatatatttaagttatcaaagtagtagattaatgtttttttwaaaaaatccttaaagctcttttaagacctaactgtaaacctgaaacaaagccaagtaaaaacttggtttaacttcttatagaacagctttacttaaacattgtgttggaatataacagttgttgatatcatagctaatagccttgaaatttagatatgtgaaaaaaaaaagcctcaagtctccatttccttaaagacaaattacagtcagtaccaagkgctaagttctagttagttggtatcctgaattgaaaatgtgaagcggccaggtgcagtggctcatgcctgtaatcccagcactttgggaggctgaggcaggtggatcacctgaggtcagaagtttttcgagaccagcctggccaacatggtgaaaccctgtctttactaaaaatacaaaattagccgcctgtggtggcatgcgcctgtaatccccagctatttgggaggcggaggcaagagaatcacttgaaccctggaggtgaggttgcaatgagccaagatcacactattgtaccccagcctgggcaacaggcgcaaaactccatctcaaaaaaagaaaaaatgtgaagsatatgcagataccttttttttttctttttctttttttttgtagagatggggttttatcatgttgcccaggctggtctgagctcaaagcaatccacccacctcagcctcccagagtgctgggatgacaggtgtgagccactgtgcccggcctgcagatacctttacatagtgraaaaaaaaaaaaaaaaaaaawttttttttgagatggagtttggctcttcttgctcaggctggagtgtagtggcgtgatctcagctcactgcaacctccgcctctggggttcaagtgatttctcctgcttcggcctcccaagtagctgggattataggtgcgtgcaaccacgccctgttaatttttttgtgtttttagtagagatggtggtgttggcttctgacttcagatgatctacctgcctctaatgtttcacgtaattagtatgtgtaataactttttatcataattgaactgaaatcatatataccttttgttgtaactatttcaacacgtaagtattaaagcaggctacttaacttttagcaaaagcggcgccaggaaattgaacaaaaacttgaagttcaggcagaagaagagagaaagcaggttgaaaatgaaaggagagaactgtttgaagagaggcgtgctaaacagacagaactgcggcttttggaacagaaagttgagcttgcgcagctggtgagtggtaatttggaattctaagattggtaatcctttgtgtttacaaaagcactgaccctttaccttttctttagcaagaagaatggaatgaacataatgccaaaataattaaatatataagaactaagacaaagccccatttgttttatattcctggaagaatgtgtccagctacycaaaaactaatagaagagtcacagagaaaaatgaacggtaagtatgcgaagaggtccattgaattgttcatagtgggtaaggtaatatgttcatatgcacacgtttgttttctaaaataattatgattcagtgattggtttgctgtgtttgstttttttttttaaataagataataagatattctaggccgggcgtggtggctcacgcctgtaatcccagcactttgggaggctgaggcaggcagatcatgaggtcaggagatcgagaccatcccggctaacatggtgaaaccccgtctctagtctctactaaaaatacaaaaaaaattagctgggcatggtggtgggcacctgtaattccagctacttggcaggctgaggcaggagaatcacttgaacctgggaggcagaagttgcagtgagccgagattacgccactgaactccagcctgggcaacagagctagactccatctcaaaaaaaaaaaaaaagatacattctgagatgctggtgagtttgtagtataggaatatttgtatcatgatggagtttaatgtgaaagttatagacagtgcttatgcatctgtattccttaagcatttgtgtaaaattacttttttttgcatgctattattgttctgataaaatgctaataagacaaatgtgaaaaccaactcagtttctagatggaaaacacatggaaggatagacactgctaagatgatgatttatctctttgggatcagaaaaattaatatatatgattttatgccaaaactggttctgttttacagaagttttatttttcatcagacataaagattgatctgttttcttcatcagttagaaaatgtsyagttctgtctgccacaatttctagtatgtagatttcccatggatctttgcttttataattttatgtcagtttgtggttacttaattgccataatcttttgtcataactttacaaaaacaaattcagatgaagcttaatgacaatttgtgaccagttataaaattatggctttgaattttcttaatcggtaaattttacacatgtaaatttttattctttagctttatttgaaggtagacgcatcgaatttgcagaacaaataaataaaatggaggctaggcctagaagacaatcaatgaaggaaaaagagcatcaggtggtgcgtaatgaagaacasaaggcggaacaagaagagggtaaggtggctcagcgagaggaagagttggwggagacaggtaaycagcacaatgatgtwgaaatagaggaagcaggagaggaagaggaaaaggaaatagcgattgttcatagtgatgcagagaaagarcaggaggaggargaacaaaaacaggaaatggaggttaagatggaggaggaaactgaggtaagggaaagtgagaagcagcaggatagtcagcctgaagaagttatggatgtgctagagatggttgagaatgtcaaacatgtaattgctgaccaggaggtaatggaaactaatcgagttgaaagtgtagaaccttcagaaaatgaagctagcaaagaattggaaccagaaatggaatttgaaattgagccagataaagaatgtaaatccctttctcctgggaaagagaatgtcagtgctttagacatggaaaaggagtctgaggaaaaagaagaaaaagaatctgagccccaacctgagcctgtggctcaacctcagcctcagtctcagccccagcttcagcttcaatcccagtsccawccagtactccagtcccakcctccctctcarcctgaggatttgtcattagctsttttacagccaacaccccaagttactcaggagcawgggcatttactacctgagaggaaggattttcctgtagagtctgtaaaactcactgaggtaccagtagagccagtcttgacagtacatccagagagcaagagcaaaaccaaaactaggagcagaagtagaggtcgagctagaaataaaacaagcaagagtagaagtcgaagcagtagcagtagcagttctagtagcagttcaaccagtagcagcagtggaagtagttccagcagtggaagtagtagcagtcgcagtagttccagtagcagctccagtacaagtggcagcagcagcagagatagtagcagtagyactagtagtagtagtgagagtagaagtcggagtaggggycggggacataatagagatagaaagcacagaaggagcgtggatcggaagagaagggatacttcaggactagaaagaagtcmcaaatcttcaaaaggtggtrgtagtagagatacaaaaggatcaaaggataagaattcccggtccgacagaaagaggtctatatcagagagtagtcgatcaggcaaaagatcttcaagaagtgaaagagaccgaaaatcagayaggaaagacaaaaggcgttaatggaagaagccaggctttcttagccattctttgcagcagaagatttcttgatraaaaaggattacctttccttgtaaagaggatgctgccttaagaattgcatgttgtaaaaaatctttttggaaratacagactgtttgtttaccagacattcttgtactttttgcataattttgtaagagttatttatcaaaattatgtgaggttccaaaatatgtaaaaatgataataataaaaaaagattaacatcccttgtcatcttttttaaatatcctatactcttcagtaagaatctgtatattttaataggcaaatctttaagtctgttcccttctaattctgtatcatacattgcttttgtagaaataaatgtgtgtttatttcattatttttgggatgtcctcgttgacacttgtataataaatatcctctttatcattttcagcttttaacactagatactgcacgtgattagaatgtttttgaaggtttcctcgtttttatttgccttggacagtttttagttgtcagagtcagagctttgcagctttgagggggaacagttctctttaaaatcatttgctattttctattctcccttgttattttaatctaagcattttcccccgtttctcatattttaaccatatgttcggtagataactaaacagtatgatctggttggcattttcttcctgatgatgggagcgtcattcttttgtcttcatggttacttgtgtgatataacatacatctgttaaagaaaatcacttctttctaggggagggaggtagaaaagtatctttcaaacttggtttttgagtttgtgtcttgtcttaactttgtgttggctctaacttaaacatgctgatatgtgttttcaagaattttgtttaaggaagtattgtatggaagtccacaaaatgaaggaagttcatctaggttttaatatgtaagcaagataacacacaagtgtaccaagtgattattaactttgttgttttacaaatttgtatgaacttggagtatctgttggccattactatacatgtgcaaataaatgtggcttagacttgtgtgactgcttaagactagtacttgtattaactttctgatgctttatacaagagagcacttaaattgcatccttccttgagtttaacactgtagctttagccttgactttgaatattcattttgccttcccttgacaagtaaatggttacagtgaaaatgtgaagaagtatttccagttagtttttgtgtgtatataactcacttgtgtaagtggatgtgttaaaagatctctttttaaaaatccttttattggagtarttattaaaacagtaaatgcatagagctttgcacagcaatctgtatccatgagccagttccaccactagtaccttcatctgtggcttatccagcaaaatgtttcatttcctgtgtgccctggcaggaaagaggttggtaaatagtgaattaaagggatgatcataaaatttaacctggttaaaaagcaccttatttgatgacagtttgtatgcactaaaatcctttatacaaattaagttttgtctactgatttgtacctggaaaatctgaacaatattcatgttgcttacagaaaaggctagtattggcttgaagctctacgataggaggggtagtaatgggggtataatgaatgcttgaggggaaagtaattttcagtaatttcagttaagcgctactgatcatagtatgtgaaaggaatttttcttatatggaatgcttgatgaatttgcatgtcatccttgtgcaggggccattttaatcttttttttttttttttttttctcggagacagggtcttagtctgtcacccaggctggagtgcagtggcacaaacaatctgactgcagcctcgacctcctgggttcaagggatcctcccacctcagcctaccaagtacctgggactacaggtgtgcaccaccattcccagttaattttttattttttgtagagacaggatctcactatgttgcccaggctggtctcgaactcctgggctcaagcgttactcctgccttggcctctgaaagtgctgggattacaggcgtgagccaccactcttggtctgtgttccaattttagtatgtgctgctgaagtgagcacaggaattttaataacagattgtactaacatttttaagtggtattcatttttaggttggaaggtttaattttttaaatatagtattttagatttttttgtttccgatcagtgctttatccttgaactaaaattttatggaacttaatgttcagagaaccatggaattgcacttgaagagacacaaggaagaagaatgtaaaagtaatgacagtttcccagggggaaaagacatgcagtagtctttttttttttttttttttttgagatggagtctcgttctgtcacccaggctggagtgcagtggtgcgatctcggctcactgcaacctccgcctcccagcttcatgcaattctgcctcagccttccaagtagctgggattacaggcgcacaccaccacacctggctaatttttttttttttttttttttttgtatttttagtagagttgggggtttcactgtgttggccagactggtctcgaactcctgacatcgtgatccgcctgccttggcctcccaaagtgctgggattacaggcatgagccacggcgcccggctaacacgcagtagtcttcctactggagattacaaattagtgtttatggttgagtgcagtggcctgtaattcccaacactttgggaggctgaggtggaaagattgcttgagcccaggagccagagaccaacctcggcaacatggcaaaaaactgtctacgaagagaaaaactagccgattgtggtggcatgagcctgagtcccagctactctggaggctgagacaggaggattgcttgagcccaggaggttgaggtgaagtagctatgatcacactactgcactccagcctgggtgacagagtgagaccctgtctaaaaaataacaaaaaaacccaaatagtgtttatggaaaacttaggagctgaaaggggatagagatggtgagttaggactgaaatcagtttagagctgtattaggaaagacaggctgggtgctatggctcacacctgtaatcccagcaatttgggaggctgagggtagaggatggatggcttgaagccaggagttcaagactgacctgggcatcagcaagaatctatctctacaaaaaatagaaaaatttagccatgtgtgtacctgtagttctagttacttcgggggctgaggtgggaggattgcttgaacccaggagtttgaggttatagtgagctttgatggcaccactgcactccgtactggtgacagactgtctaaaaaaaaaattggcagagatgtctaaggggctattaaggaaacatcttttaagataccaaggtttgggtaaccaccaaaataaagatagtttgaacttcaatgagctgtatttccaatctagggtccttctacacactatctgtagaatgataacaatttacatgattactcaggtaatttgggcaaagcaaaagccaccataccaataatgtattgacataaattcaaaaggaaagagagtagtgattacatgggccaatgctattagagtcagtcaagatgtgggtttaaagtacataaacaagaatttcttttatggctaatattgtgtaagaatttttttatgactagtcaaactttaaaatatcttctgaaatccaacgacaaatccaacccattttccctttttgaggttaaaatgaatgttattaaatcacatagcccagaaaatgtagctatgtatttgattcaataccactactctagtaagccagtggggtagagactacaacttggtaaaaataaacgaggtatctgagaatgtttttcttacgcctgtctttgtctcagctagcaggacttttttttttttttctttttttaaatagagatgagagtcttgccctgttgcccaggctggtctcgaattcctgagcttaagcgatcctcccattttggccatcctaagtgctaagattacaggtgtgagctaccatgtccagccaatcttttcaaaaaaggaacttaaataattatactaaaaaaaatgatgatactcaaatgcctgcaactccactttccatggccagttgactaccctattcaaatttgtaatagctgccactccttgccatgactgtcccaaaatctttggtgttggccgggcacggtggctcatgcctgtaatcccagcactttgggaggctgaggcgggcccctgatcatgaggtcaggagatcaagaccatcctggttaacatggtgaaaaccccgtctctactgaaaatataaaaaatttagccaggcgtggtggtgggcacctgtagtcccagctactcgggaggctgaggcaggagaatggcatgaacccgggaggcggagcttgcagtgagccgagatggcaccactgcactccagcctgggggacagagcgagactccatcaaaaaaaaaaaaaatccttggtgttaagtggcttggtctctctttcccactttctttcctctctttcagcacatccaaatatgtttgaaacaatgagccaagtcacatcctgaaatttgtcctcgttttcttccaaataatggaaacaacagtttctgtgacattttttgtaaatattttgtgtgctgtgcagctaaagggtgaccagagtgctccttgtacatagtagatctgaaaaggagtatggaggaatcaaaattatttggggctctttgtcaaattactcagcctttttggagatttcagatacagcccaaccctttaagaatctttgttgtcttagtgaactagtgttacctctttaaatatgttatatatctctgttttgatggatgaagaacaaagttatctaggaactgagattatataatgaagattaaaaagggcttttgtttctcttctaatttcttatttatgtgaatttagttgcctttcatactctcagacttctttttcatccagatacccctccctcaaatcacaatcctttcgtctagttttctgtattaagacctgccatttgtgatgttctggactctacatcaaacaatcctgacctttccaaaaatttgctttttgacagccagcacgttaactataaggaatgatcttttattgtggaattcagtatcccctggtgctccagagtgaaataggggtgagtggggaatgggccacaaaataaatgcacccttcaaatttaagttttctgttaatgcctgttgggcctttgttctcacagccctgtgtatgtgcttctgtttataggtacatacccacagagcagtatgttcaaggctgctgacctttgtgttagaaatgcaaaatgctaggctatgctaggcttggtgtgatggctcacgcctgtaatcccagtgctttgggaggccgaggcaggcagatcacctgaggtcaggagtttgagactagcctggccaacatggcaaaaccctgtctctacaaaaatagaaaaattagcctggtgtggtggcatatgcctgtagtcccagctacttgggaggctaaggcaggagaatcacttgaacctgggaggtggaggttgcagtgagccgagattgtgtcaccacactctagtctgggcaacagagtgagactccgtctcaaaaaaaaaaaaaaaaaaaaaaaaacctacaaaatgctattctcatgcaaatgatgtgataattgggtcaccagggaaggctttgcaggtgaagtgacctggaagaataaagaaaagctatttaatagctcttgagcatatgttgtattctaggtactgttctcattactgagttgcaacagtgaacaaaacaaaagtttctgcctgcatagagcctacatttgcaggagggacagaaaagggccaaatgagagtgataaatgttacagagaggaagtagggaaggaagattaggagttctgaagtgggatggctttgcagtttttggtaggatggtcacaatgcctcgctgaggtgatgtttagagatcagataggtaaagacgcaagccatttggatatgagggaagagaattccaagcaaaggaataacaagactggtcctttcaataaacagtaaagagcccttgtggctggagcagtgtatgcaagggaggaaaatggtaaagtaattcagagaggtaatagtcaatgaaaatggctgaggatttgctacaacaggagaaacacaacaagcctatggtcttgaacccaacttggataaatatcgacaaccaaaataagtgactgagacctaagtcttagtcatcgaggtttattgagctagcttgtgggcatgcccggtggaaaaaaaaacttgtaaaaacttgtttcacggatgtatctgtgcctatttttttccaaagaggttctcgggaggtttagtatttatacattttcctttaaaagtctgaggagggtgagggtggcagtgagatgaatgattacagacttatgagactttagttagtgcccagcaaatctacattttacataaggtaaggtgaacatttgaagaaataggaatagaggaagcagagaggtgaaggactgattaatcttgtctttgttctctccctggggagataagctagtaatcgacattatcaatgtggagtcttgaaagggctgctttctggttagcccttggggaggaaagcctaatggcatttggtgagggagtaggtataatgaggcatgttggacctctcatcccgtcatagctatgaactgtttcccaggtttctttggggtccccttggctaagagggggtccattcagttggggacttagaattttatttttatttctcaatataaaaccacaactggccaagtgtggtgaatcacatgcctgtaatcctagcactttgaggggctgaggtgggcagatcacttgagccccaggggttcaagaccagcctgggcaacatggcgaaacctgcctctacgaagaat

SEQ ID NO: 8759 - DNA, 645179 bp, Homo sapiens
catgtttatttaaacagatgcagaaaaagcatttaccaaaatttaatattattttgtcacagaaactctcaacaaaagaagagaattccctccactttgtactgagcatctattgaaaacctggagccatcatcataacggtgaacgaatgttttttccctctgataagaaattaggcaaaaatgtccactcttaccatttctattcaactttttaactggaagtcacagccagaaccaaatagcaagaaaaagtgtaaaaagcatacagattggaaagatagaaataaaactgcctttatttttggatagcataatcctatatataataatcctaaagaatcaacatataaactacttacaagtgatttcaacaactttttaggatccgatgtatataacctatatcacttatattactatgaaactaaatttatgaaaaattaaattgaaaaatatttacaatagcactcaaaaacttgaaacacaagttaaattttagaaattatgttgacatgtacatgaatgggaagccaagttgggaggattgcttgagcccaggagtttgagactggccttggcaacatagtaagaccttgtctctcaaaaaaaaaaaaaaaaaaaattaattagctgggtatggtggcatatgcctatagttacagatactcagaaggctgaagtgggaggattgattgaacccaggaggttgacgctgcagtgagccatgactgtgccactgcactagagtctgggtcatatagcgagactcatctcaagaagaagcgcggtggctcacatctgtaatcccagcactttgggagaccgaggtgggtggatcacttgaggtcagaagttcaagaccagcctggccaacatgctgaaaacctgtctctactaaaaatacaaaaattaggtaagcctggtggcacacatttgtaatcccagctacttgggaggctgagacaagaggatagcttgaacctaggccagagtgagactctgtctcaaaaaaaaaaaaaaaaaaaaaaaagaaacccaaaagacatgtacattcaaaactataaggcactgcttagaatattaaacatgtaaataaatgaagacgggctatatttgtgaatggaagtctaaatattgctaagatatcaattatcccacaatttatctgtaggtccaacctcattacaatcatgttccctactctccttttttgggtagaaattaataagctgatatttaaaattatatggacttaagaaaactaaacatattcttaccatatgatccaggcaattgtgcttctgggtatttactcaaaggagttggaaacttgtgtccacacaaaaaccttcacatgtgaaatatgagaatagttataatctatagtgacaaaattagatcagcagttgcctttttctgggaatggaggttggrggatttattgcaaaaggtcagatgctgatagcagttgtatcaataattgtcaaaacttggaaccaaccaaggtgtttttcattagatgaatggatgagtaaactgtggtacttcaagataacgaaatattttttcagtgctaaaaagaaatgagctatcaagccatgaaaagaggaaacttaaatgcatattactaagtgaaagaaacttatctgaaaggctatatattgtatgattccaaatatatgaccttttggaaaaggtaaaactaaggggacagtaaaaagatcagtggttgccagtgtttggaggtggggacagggaggaggcatgaatacgtggagcacagaggaatctcagggcagtaaaattactctatatgatagtgtaatgttggatacatgtcattataaatttaatgtaattataaattacattaaaacctaatgtaaactatgaaatcggagtgataatgatatgtcaatgtaggttttcagttgtgacaaatatatcactctgatggggcatgttgataaagggggaggctatgaatgtgttgggtcagaggtatatggaaaatctctgtaccttctgctcaactttgttgtgaatctaaaacagctctaaacaatagtctattaaaattaaaaaataaaatattcaacttcaccaatgaatagatttttacctaaatattacataatatgtgaagaacctaaaatagtaaagataattttgttttgtaaaacaacattataggatttaccttacctaactttgaggctcactgtaaagctacagtaatagagactgtgatagtggaataaggagatatatatatatatatatatatatatatgccattttatatatatatatatgccattatatatatatatatgccattatatatatatatgccattttatatatatatatatatatatatatatatgccaatgaaaagagagtccaaaaatagacccacacgtggtcaattgacttttgaaaaaagatccaaggtaattagacgaggaaattatatctttctcaacaaatgatgatgaagtgaatggatatctacatggaaaaagaaagcccttacctaagcctctacttcacagcaaacaccaaaatttgctggaaataaatcatagacccaactgtagaagctaagactataaaatctctagaaaaaaaataaagaagataatgttcacaactttggtgtaggcaatgatttctgaaagggacaaaaaatattaagcataatgaatgatttaataaattgtatttaatcagaattaaacacttctgctctttgaaagcactccaaatgcaaagtcaagccacagattgagaacaatacatattatagtaaatgtacttgacaaaggtcttttctctagaatatgtatttaaatcttattaataatctggcaaacaaagcaaaatgagcaaagatttcaagaagaatttcacaaaataagatatacaaatgacgattaagcacatgaaaatatgttcagcatcatcaaagaagtgcaaatgacaccaccaatgaggtatcaccacacaagcactagaatggctaaaatgtaacaatattagatgttaataaagccatagagcatctggaactcctatatattgctgtgggaggaatgtaaaattataaaacaacattggaaaagaggttcacagttttgtatagcgctaattacatacctgataatataactcctaagacttgataggaatagagaaatataaacatgtccatgcgaacactgtgtttaaataatcatagcaattttattcttcatagccccaaactggaacaacccaaatgtactttaatagttgaatgtattaaaaaattgtgatatatccatacgatatagaatgatagatactattagaatgatagaatattattcagagatgaaaaggaatgtattactgatataagcaacatgactatacctccaaaacatgttgcaaagtgaaagaagccagacacaaaagattactattttattattgtatttacatgaaatatgagaatagttataatctatagtgacaaaattagatcagcagttgcctttttctgggaatggaggttgggggatttattgcaaaaggtcagaaagaaaactttttgagattatagaaatagactatgtattgggtactttgtcagatgagtatttacatctaaaaaatgtttcaaatgagcatatttattgtgtgtaaattgtaccttatttaggtttatttggaaaaaatatagctctaaatatactggttcattttaatttgggttaaatatttaagaattttttccatgtgctgaatcaaacaagtagagttgacagtggagatcatagtcttattctcaaggcattttcatgtaaaataggaactcaggtaactgcagtaactgcagaaaagcaggtacaaatattgattataaaatcctgggaaaatgtaaagaggaaggggatagagggaacatggtatattttcattccacaattagagttagcagctgcatcattctgattttcctttttataaatattttttattatttattagattaactaatttgagttgaggccacaacatggttgagtaaaaataatcattttcctttttataaatattcaataaaacttttcctttttataaatattttttattatttattagattaactaatttgagttgaggccacaacgtggttgagtaaaaataatcattctgagaatagcaataggtttagaaggttaatttagggtgcctctctgctattagatgtacctgaaaaacacttctaggcaaaattagaccaaattaaaaacactggggcttcaattataataaactctcaaatataagttttattattgtttattataataataaataatgtataagtgtgcagacatgggcagactacattttgcaaatttccacagtaaggtaaaaggattacaaagctttctggtataatattaacagaactaaaagacatgaataatattaaagaatgggctttggctagtgattttcaatcaattctcttcaaagcaatactctcttaattttactgaaagaaaattcaactttaatataatatttagataaatcaatacatcttaactataaaaaagaaaactatctatataagacaatatgtatttcaacatataaatgcttgggtaaaacttccttaggaggcaaaataaaataaaagtttgcacctattcttagatgaccccagtgtaatcgatgggatgttgatattgtgctggtgactcaagtaccatgggcaaggttgttatcagtgatgtgcttctctgaaagtacatctttacacccattgacaaatgggtgtaaaatccaaaaacacaaagtaaattatcttctcaatgtatatagtagatgcatcctagaaaaaarcaaacaaacaaacaaaaaacacacacaaaaatttgatgtggaaacaaacttaaattaggtttcaaatataaggcaaggttttgttgttttgtttgtttgtttactcactacataaatgaccagtggcccattcagaagtctaaggacaaaatatgttgtaggactgtcctgaccactgagggacagctcacaccctgacccaacagtacactaatgcctgcagtacccaccgttcccggagtaaaccaaaagacatcctgcgactcacaaaatccattatggagttgttttaaaccttatgagaaccactgacctaggccataaaaaacaaatgaaaaaacaacaaaaactaggaatggcagtagttctgttgagttaaagaggagaaagaggagaaaccaggactggaagagatgaaattgtgagtctggaaggaaactattgcaaaggcctttattacctttaagtaaatgtctcctaactgaactgaaagccttcattctaaccattagtttggtcaggaacatttcagggacgccagggtggctgttttattttgcacttcctttactgccctcccagcagcctacctagcagtaagttccccagcctgcagtgtccccagagggcaccttccctcggctagtaacttctcagacactctggccttggggatgtcttggatcttctaggtacacagtggctgcacacagttttgccaggcctttctcaagaggtaaaagttcctagctgtttgcatttcccagaaataatgttttccatgtgtagggattttacagatttcaaagtgctttcatgtcaattactttctttaatttaaaagaagttcagataccaggtcaagctaggaatgatccggtctcagagggaaggagcgctctaggaaaggaggatcctttaatagagggccgtcctggggccgcgtgcccatggaaggcgagagtggaggagtgtcctctttctcccccaccctcaggcggcggcccggccaaagccagagggggctgtctcctcctcttccccagcagctgctgctcgctcagctcacaagccaaggccaggggacagggcggcagcgactcctctggctcccgagaagtggatccggtcgcggccactacgaygccgggagccgccggggtcctcctccttctgctgctctccggaggcctcgggggcgtacaggcgcagcggccgcagcagcagcggcagtcacaggcacatcagcaaagaggtacagtcgaggcatgggcttgggttgcatcctttgccgggaccgagattcctcacttcttccactcttccgagagttgctgtctgtggactgccgtcttgcttcgccttcagagagtgcgctctggggcaagaggaacttgaagcaagttcaagttcaatgccatgagagcrtagtgtagggggaattacctaagtcctgcaaaaggaacggggagtgcttttcattgttctttagtttcgaagaggtcttgctatcacgatacatcccgtaaattgatttctgaaatctttccaagaggaaaactttttccaattggaaaaaaaagaatttcttcaaatcagagcccatcctgcagagaaaggcttcccaagctgtgtggttcatcctgggactttatggagggtagctgatgcatcaaaaaaaaattatatatatatatatacacacacacacacacacacacacacacacayacatatatatatatataaagttttacagaactttgttttcaacttttaaaacaggatttctaaagaagttatgtggttttttttctttcatggcaatggcgcctccagcctcacctttttcaaacccacatcttatcttcatatcctattttattgtagtgaaatcgtgaaatttctccttttgcttaaatacagaggagacttctatgtcatgtgtactttaaggccacagtgactagatatacactttggaggactttggaagatggctgtatttaatgtaacttaaataacttattctcctcagagmctcttagtgtttatgtatatatagctctcatttctgaaactttggggagtctttgaagagttattttattatcatgaattttacaggaagcacatgtgcagcattgtaagacatactttgtaacacattatttcagcaaacaattctttaagttggaaaacctgtatcaaagtaaaaaaaaaagaaatatttattattcggttttaaatatgaaaatgtttaacctaagagtacaaaatctgtaggttagaagcttttaaaagttttaatgaggctgaatctgcttaagttttgaagtatacttatccttcttccagttaacttctagccaagtcaatagttctgatatttgttcttataatctagcatttttagcagtactattttttaaggagtaaagagatatcccaagctctttctataataataactccctgattaaaattcttggaataaaaatgaccttgcattcactatataacttttttccttctatttttgcttttgcttctctgagaggtaaaatggggccaatatgacttaattaatataatttacgagagtgattttaagagtatctctggccacttatttttaaaaattctacttttaactattaaactttgctcaattacaaggtgtgtttaaacaagacataatactttaataatgttaggcagctgggagaaatgaggggccaggggcaccaatccttatgtccacttggaatggggcagaaactcaaagcatgcagagtaaggatcaagtaaattgttgctaagaattatcctgaacacacacaggatttctcttttttcctctcccttcttatttactctcttttcaaataaggtaatattaactctgatttctatgacccaggcacaagatgaagtgaattcaggaggaagggtttatactaccattctgtcaagataccacttaaatgctacatacaataaggaattttattcaaaatagctacaacatacaatctactataggctgctataatctgcattctagtatatattattgtctttgtcatagaccatttacaatatatctggaggttggctcaaggataaatgacttaaacctgttaatgttgaaagtatgtaaaattcatgaaactttaaaattggatagtgatttatgatttaaaaatgccttatgtacacgatctttattcaccttcagatattattattctcaaaggacaaatttagaacttaggcttccagtagttgtaatttaagtttacataataataactttatttcaacaactaaaacacttccggtattgtttgtgctgaattcccttttttatggttccaaggtttctttccattaattgtttaggccatgttttctttttagtgttgttccattgaagcaagccctctgtgaaaatcacgggatatgagtttgactggagaagggttttcctggctatgatcaacttttctgttttcgattatactagcactgacctttctaggcaagcgctaattgtgtagaagttctatttccccttataattcgataccactttattaagaatttttgacatgaatcaaccatttttagatgttgcagttgagttagaaacataaccagactttttgttttttactttttctttgaaatcttatgtggtttctatagcatactcgattgtagtatgaatagcattgattcagcaagaatgatattccaaggaaattctttagctatatttaaaattgacgaaatagaatgatgcaatcaaaatgattctgcatttcagcaaggcagtgtctaaaatgttttctgatattcttgtgaataatatgtggaaactgaagcataatggyaggtaaattgcaactgattgaaaaatagttcacaaagaatattgcatagtggattaaggtcaatccggaaagaagtctctagcagtgcaacagaggttttcttatactcaactatcttggtaatggcttgatggaaaatgtaaaatccaagcttatcagaactgcatgtggtccaaaattgatagaggtggctaagctggttactaacaagttcagaaattttaaaggtctctatagccttgaccatgaatggcacctacatgaagttgcttttattattcatatccacatgttaaaaaaaaaaagtccatttgtgctcttctggaaattagttacattgtttatatgtttaggaatgaatatgaagacaggaagagaaaggccactctgaattgcagcaagttcgatatgaacatatagtgtaatatggtgacaaaaaaggttggctcacttttacacaaaactcatagaagcacataggtctgttgcttaacacacatttgggtatttcattgacaaatgggtgtagatgcagagaagggagagcagaatggttaagagtctgagaagattttcagaagaggaatgtcccaagtaaaatctttccatctgaacaaggaaagatttagggaaggcaatcataaggactgtcctcaaattttcagaagagtcgttatgttaaagagggactattctaaaggctgaaggtggatccayagaagaacatgacaaacaaccaggtttgaattttataatatggagaaaatagctcctctcctcacttcctccccatgccattttgagttgytcagaaatagctgaattgtgtttgagcaacttgcttctggaaatgaccatgcagtgatcagatgtacagttagtgagggatgctttatgagggaatgcctctactgagaggaagttaagactcatcaactgtctagccatttgtcagttctaagattctaatattatagtctattgcttttagagtgcatacttgyatttaaatttctgaattcttaaaatgtcaagaaaatgttaaatatataaaaatgtgtttttaaatcccttctgggatttaaaataaaaacatgtttgagacaatcctcacacatttttggcaagaatacttagatatttagcatggattttccacatcatcgtcaattgcacagttctaaaacatcttgtgttataacacgcaagaatactttataaattacctgagaaattttcaggggattcatagtggccataaacctggaattaatttttttaaatatttttctttgctgcatatgttaactttttggcttgtttgccatatactgacctaatcatttagtaaaaatgattcataacagataaaatgcatggcatttcaacatattcaaaatatttatatgaacatattcaacactgaatattatagatgtgatagaattaataaaatttatataaattttatattatgttatatttcacatatcaatgtgtacagatttctggtctatcttaagatttttctaccctaggatttcatgcaaactaatgaactgaatctatatcaagggatgctgggggctgggcaaggtggctcactcctgtaatcgcagcactttgggaggcctaggtgggtggatcaccttaggtcaggagttcaagaccagcctgaccaacataacggaaaccgtgtctctactaaaaatacaaaaattagccaggcgtggtggcatgtgcctgtaatcccagctactcaggaggctgaggcaggagaatcacttgaaccctggaggcagaggttgcagtgagccgagatcgtgtcattgcactccagcctgggcaacagagggagactctatctcaaacaaaacaaaacaaaacaaaacaaaaatttaaaaagatttgcaacttatcatctatccagtttgcagtagggccttatttagcatctagaaaccatgtgaaaaagatcaggaagaaattattgtaaataattattgtaaatggttgcacaagtggtttaacttctaatctagaagattcgggtttaggatttgtttacagttgcaacttgagcctcgatagctaaacaggaatttaggcagaagctccgtttcagtaaatgagaaaacaagacagagtttagagaaagataaaagtagattttccaggcttagtatataccaagcagatagaaataaaactaattctaggctttccccattggtaagactgaatttagaggtcagaagttgtgaaggaaattggtggggttgggcctatatgcattggaatgtggtaaatgaatgaatgtttacagtgagtaaagaagataaaaaaattcctgctcttgtggaactaatatttagttgggrtggagatgagcagacaggactatgatgaatatatgatgaagcaacaaaagaacacctatattgtataaaatgtagttgatgaaaaatgtcctggacaaacaaatacaacggggtaaggacagtcaggagttctaggaatggagggaggttgatggctattttgttggtaaaggttggtaaaggttgacctctttgagaggatctcactttggcaaacacttgaagatgacgtgggagtgatttgtgcagttatcagggggaagagtactctctgtacagggagcaggcytatgaggatctaagcttggagcatggtgagaaggctcagaggagaaatgggaaactggaacacatagcattgttgaccttaattttaaagattttgcctttttgtctgagtgagatgaggaggcatcggtgagttttaacagagttaaataaatgaataaaatcacaggtttttttgtctcaaatacgcactaatccatgggactagaccaacagtccaagcatagaattattttagatttatctcttgtcccaaacactccactgatagaacacatttaagtgattctacattcaagagcattccacttcaaccatcttatcatggtgaagctcagatgtgtctttgtaacactcttttcttccctttggcaactcagtgctattccattattcaaaatatatcagtacctcagaaacaatttgtgtgcagggaacttccgcagcttttaaaaattttgctccagtgtagttagaaatatgacagatttttaagggtaattttaaatagtatgcactttaaaacaaaaatgaattattcacaatcccacatggacatataggtactttggagttcccttttttattatctatttcaatctcagacgctaaagtttagacacaattgttgaaaatgacatagtgatgtattgatctgatgatttcttttatgatatgaaatttgaaatgctacctgttttacattcagaaacttattctatgttctgtttccatttttgttactgttttaagaatcacttgtaagctttaacaataacgttttggactatagtaatgcaattttggcctaatttaattctgtcatttagaacaaaaaaggtaaaaaaattggatagcttttccttctctctccctctcttctctttctcccttcctttcttccttcctccctttctttattttccttttcccttagtattcttcctgtgaataaaataaggtaattaaaatagataattctaacaaatataacatttaggaagatagtaaggcaaaactttacttaaatcttccttattaaaagccacaggtaattactatctaaagatagtttgagacatattttcagggtgagttaaagctaaagacatttgcttgtcaaagatgtataatatgggtttaaaaatgtttttctcctaagtaatcttgagtgtggatcttaatatgggaactttatgctatttggattttatttggacacgtgacatttacaaaagatcattgaggattgcctattaatgggttattattcataatatcggcctctgtgacatgcctaatctagttcaaacaacaagttaatctatgcaaattcctgatgatgaaaacctcaggagctatttagtgcctggcacttaggaaatgtaccttgtgcaatgttaagtatgtctctgtatgtgtagtccactcaactgacccccgaactgtgtacctccccaaggctcttcatttagctgcgtcttgagtgccagatggtttagattggtataataatatgtagtgcattgtgagcattaacacatttacttacgtagcagagctgtttagtagattaatataattatcctcagtttgtagaaggaaaatatgcccagcaacttgtcaaggacaaacaaaaattccartgcttattttagaattagaaattaaattacggtcctgctcttgactttgtagatgctaactatcacctcttttggacttttatatatttatctttcataaaataccctgaggaaaaaaaaatccatttctaagttatgttagtctatcatatccagagattcatttggtattatggaagaacaaaaaataaaatgtgtagtcttgaagggtctttttcatttaaatacacacacacacacacacacacacacatgctgcttattactatgtagacatatacacacatgtattacttaaaactatgcattaattcaaatgcattcatcaaattttagtgtttacattcttggaactttgattactggacactaggctataagaaaatattaattgattctttattggcttttctgaagtaactttacagaagttacttcagcaagctagaaacaacggtatttattatactgtataatgaaccctttaagaatagtcaatgtgtaaatgtcagtgaatgaaaagaacaagaaccaaacagatatacctaagaatcagagcaagattaatctcaaaattccttctgaaaagatgaaaaaccttgacatcttcataaaaacatttaaagactttcatttgaagttgaactcagttaagacaaaagtcttccaatctcccagattttgagagggtgtatttgtgtatgtatgtgattgcagcaccagtgcacatgtaccatttacagcctagcactcacaggacctaatttgtatatttagtatgttttctgtttgatttttgttgtcttaaggtattagattttgtttatcaaaatctttgaataagaaaatctaaaaattgaatttctagaaaactctagttgccttgacaaatgattatggaccaaagaataaattataaatgagacaattataatattccatccagtagctatactgttaaaattccaaggtataatccctttcgagttgcttgtaacttagaaggtcctattctatagaagaaatagagttagtagagtttgctgcatcaaatatattttttcaaatgcctacatattatagttgacacaatttcctggctttattgccttctgtgcaattttcaattattggatgaggctgaaagtttgaaagagaatatgaagcagtgcaattgtcatttcagtgagctacctcatctcattggtttgtcgtggtacatatgtaaaacactgaatataaaacatgaaacatctagtaaggcctcaataaatgttcattttcaaaatgcctcaaaaaatgaattaaacctaacaacctaacatgacwttctctggctgaaagaaacactcttctccaacatcatgtggtataccaaattcagttgagactgtttgtgaaggaaggaatttgcttatatacttaaacacacaagtatttgaattctaattagaatttgtgctgcagtatttctttattctcaactttatagcttagcctacaataaaaactcttatcaatacgtacctctttatacctttagtttccacatacagtactcttctttggaggtaactgaatcgtagaaaacgtatggacttaggagaaggctagactcggatccatagccaagtcaccactttactaagatcaaaagcctgagtcaacggagttaaattttctattcgtaagataggtttaggttagataataaatgtgaaaatacttgccagctaatcagtaaatactagytcttttcttctttattttatgagcataaaactaaaaaaaaagatttgctttgcatatagcatatcctttttgcttaagaacagcaaaatattctaaaaatttctttgaggagaccctaagagactatagatggcaaactatttatctcattgccaagagattgaataattctgtcgaggttacacagcaagtcagtaacagagataagaagaaacacaagttcctataattagctaacagttatgttagtagctctgtgtgagaagtgatttaaaacaggcaacatgatggaaatttttgcaataatttgtagttattcatacttcaaatgtggtacaataaacgttttttctaggaatctcattgttgaatatgtatttattttgttgataaactattttttaaaaacttctttaatacttataatatgtttagataaatatatggcatatagtaagcacttcataaaggttagttattattcttagtctatgaagtatatgttttcattgacatctgcttgggtagagatgacaatgtggcgtgtttgacacacaatgtaagttaatttcagcatggccttcagtggaaagtctaattggattgcagaaaatctctcaatatagattgtctttatttggactctccctaattactatagtaaaaaaaattcttggaatacattatttaatacaactctggatagggaggattcttagtgtgtctacttgtgtattaaatttttagtgtgtctattttgtattaaatctactattaaaaaaaccaccaaaaaacaaaaccaaaaaacctacttcagaaaatcatatagtactctaacaaatctctagagaaaactgcttttctaaacttgggaacgctggattttgaaaatatttcagacaaaacacttcttaaaggcccgtttaccatcaaaaagtttcaatcttgcctaacacataatgtgcaaatattcattttttcattctgatacattagaaaagtcactggatttgtaattggaattccaaaatataaattttccctctagctcttcctaaagagattaccttaaacatggataagtcacttaactattctgaaattcaattttccatctaaaaaatgacaatgtaatgttcgaatctatttcatggggttgttataagggttaaataaggcagaccatacaaataccattattaatactatttgttattataataaatgacagagttggtcttaggcatcattggttatgaagttttgctccaccccctttctttgttttttttccccagtggctcctaaccatttgttattaattaataatgttatgtattaatatacatatatgtattaataatgttgttaataatgttatgtattaatatacttagttctcctgttttcaaggacccatgacacatagctttcaaacatggcacaaattatttgtttagtaaacatatacatactactgcataagaagaaaatatggtatctgaaagtgtacatcagcttcctacaaacaagtagcaaagagtaagtattcagtgaaattataaaactatcataaaaatagcctaagggctctgaaacattctatgtcaagattcctttttatcctcttaaaaataattgaaactttgatttatggtatatctactatttgattgtattaaaattaaaattgggaaatttaaaaatgtttactaattaatttaaaataccagtaataaaacaattacatgttgacaaaaagaacataactttatgaaaaataattttatatccaaaataaaactcttcaatgtctggcttaatagaagagaactggattctcatttctgcctctgcgttcaaattattacatgttattttagtttaaattattttggtttaagcatattaagaaatatataacaacaaacatagataagctattggaaaaaagaggagtctgtcagtgccttttaagatagctgtaaatattctttgattctataccaaaactcagtaagtggtagttttcaaaagattggctgcagtgtggtatctgaaactgcatcaacgatatttttgtacgcttttatattaaaatctacggatctatcttrcacctggaaagaattttacccatgtgtgatgttatagtatcattcatagatcatttggaagatactgatttactagttatgcagatcagccacaacttgacagattttcttataaaatattttaattacattttttatgactattgatctcaccagaaaagtccctaaatattagaagctgttaatctcacaatggtagagacaaatttttcagaatttttattttcatttgtaagttyctgtagttattgacaaattttgttatttttcttgaaatagttactttattcattcttaagaaaatgtttatcaaacaaatgagtcttaaaaaccatagttagatcctttttgtagtacatagggtattccacraaaaaagtggctagtttagcttgcagctgaaaacaactgtacaaatgcttttcctcaaatcaaccatcatgcttcagtatacagttgatgttaaaaagatgtacccaagatttaataaatttaatcattgttactacttcatcaagtacattcatctgtgaaactagttgtttttttcttctgggagtgtgtggtggtgaaaactaaactgaccactagcatggtttagtacccctgccttgatttgtgctaatgtaccatcagtgtttcccaccactattgcttttgcaccatcagtgcacatgtcaacacaatgaaaaggcagataataattaaatcttgttactaaaaggatttttgaacttgtgtacctatggataatgtattgtggactcccagggattcacagatctttctttgagctctacagggttggactacagttaagttcctcactgcctgcctcttcaccaattctacaaaatctatagccatatgaaggtaaattttgcwatcagaaaaagccaaaaccacttcagtttttacctcaggtctagtctaggagagtgataccatttctttttaagggggaagaaatccagaaaagcttcttctgtggaaaaagcaggaagtgttaaaaccagccagacatacatatagaaatcaaaatctctgccatatcatctgcccttcttaatttcctttcacttgcccaaactatagtagagatagtgtacttacccacagttggacatatgatgttattcctaatagacttaaaaagtgaactcatggcggggcgcggtggctcacgcctgtaatcccagcactttgggaggccggggcgggtggatcacgaggtcaggagatcgagaccatcctggctaacatggtgaaaccctgtctctactaaaaaaaaaaaaaaaaaaaaaagcaaaaattagccgggcgtggtggcgggcgcttgtagtgccaggtactctggaggctgaggcaggagaatggcgtgaatccgggaggaggagcttgcagtgagccgagattgcgccactgcactccagcttgggcaacagagcgagactccgtgaactcatgagcaaggtttagtacaaaggaaacatactaatatctgtaattctgaatattagcagaagagatttttattccttgctgagctcctgaactcacatcaggaggggtcctttgttcttttcatagaaagaattcctgttggaagcactggatatcgtatttctcaaaatatggaatttccttcatttatttctagcctttgaagttttgtgatttctaaagcatttaaaaggttttgtaatgttgagaacctaaaacgtgattcttttctctgtgcccatctcataccattgtatgtgtgtcatatgatggatctggtttctttttcttatttgttgggagatgtccagagactcaaggatstatcctttgaccaaatttttcactcttcaagggcctcatactgctctgatttcagatgtatagatatattgcttatcaaacactgatgggtctgarcatgagtggtagtaagatatttccagattaagtagacaaattgtgcagaaytttttagtatcactatttaaatgactaaatttttgaggtttatgtgtatccagcccaatatgtcctctccttatctagtataatttatctttaaaaattagactggcttggcatatgtcagattttgtatttaacagactttttatatatttctttgttaggaggtgttcaatgttagacaaagtgaacagattactttggaatccatgtcctggtcctgctgaataacatgtcctcaccctccttccatttttttttttttctgccatacacattccagtaacactgaaagagttaattgatgtgtcccatctttattgcttttgtaaatagctatagatacactttatatgtagataatggtatgttttaaaattctgcaaaaatagcttttcaattctctttattctctttctcaagctttgataaaatatttttcattcaacttttagggactgattttctccatagagttcctgatgtggtgctactggagtgatgctgagaaaacattattctaaatgttttttagaaacattttttagaaaacatcattcacccagaatctgaaattttatctttatttatttattcctttggataaaacattgccctcacaggctattcttttctaaaatgtttgctgtgctgttattattcactttaatggaaattaatttatctgctgacctcctttttgacagtttaggactgtattaagttttcagatctgctcggtgagaaatagtgaaataaaactagttaacatctatggaatacctaactatgggccagcactgctgtaagcatgtctcatgccttaatttatcaaaggtagatgctattaatctcatttaacagaagagaaaactgaaatgcaaaatgttaagtaactttccaaaagtaaaacaaccagtgaactggtagagaccaagatttggacctaggtagttctactttgtggcccattcacctacccatggcagcgtgtgacctcaaccctgaaagagtacaaattagtaagtaaagggcttcctttagtgacatacttcagaggtgattttatttcccttttttgtgagatttcctatgaaaagattaacaatttaaacaatatttgccatttagattcagcactatgtcctgatatatcagaagagtctatgaactttttttttttaaagactccttggagatagcaatgaatgaattcttaactgtgtcaggcatgcctgaattttttgagtcatataagagtttgtagcactcctagaattgttaacttaattggtaagaatgtgctttttttctctttgttgttgtatgaagtgttaaaccaaaaataatcaaggcccagggcttttcctggtccattaatggatatatgacaagtgatggcaaaaggatagttacagttattaacttaatcattaattggctcagggtatccccaaaaccgyagttggaactgaagtgctacaaaaatgaccattttgttgttatagcttttcttcacataaggaaataaataagcaaaaagagggagtgtcttatctatttgttgatcaaagatcttgtaattctgcttatggtaactcccagagtagagaatatcatccagttggccccctttatgaacttggattgcaatggaagtcctatcggccagtttactagttaacaggagctgtagtactagagctatgactgcatcagaagtccagcagtgtgggcacaaagcagcrcagcacttttgaagttagacatcgagagtttgagtcctagattcacaccttgctggctgagtgctgttgcaatagtgctgttgagtgagttatttaacttctttaaacctgatcatcctcacctttaagagaatgaaaatagtagtgcctttttaaggattaaatggaattaagtatttaatttgtattcagaagaggatggaatcatcattcaaagactttacaatcagtggtgttttcagcatggacaactggagctttaacttaaaagatctagaaactgggcttgttggccacagttttagtgtgattagaggtggtcataggktagtcaargttgccactatcctggttatggatggtaatagaactgcctatttatttgatgtcttcacttagttgtctcctaggtccttcacagcgaacatttgccaggattgaacataggtactctgcatttcctcaactcttttcccatcagcttttcccaactcagaaaatggtaccatcattcaccccttgaatcaaatttgacatctagaagttactattaacttctctctttccttcacctcccagattgaaataatcagcatgtctgtcatccacaccaccagagtttattccataaatatccacatctttttgtccctattgccttctagaccacagcactctttttttgcctatgcaacttcagcagcctcccagctgctctcccttcttttctcttttccattttacaatcaattttccatgcaataggcaaagtgaactctgaaaatagtaaatcagattagatctttcctctgcttaaaacctttcaatgcatttctattataagaataaattctaaattcattagattttaagtctattcatgacagctcttgtatttttctctgatttcaaattattctctttttctgttatttaccagcaacagtaaagactttttttccgtctcaaggcctttgtccttgctgttcctctgtccagagcattgttccattagatccctgatggctgtctccttctcaatattccaatctcatgtcaaatgtcacctcttacagaggcctttccagaggaccactttaaattagcttctgtcaggcactcatctccctgttgtaatttctttgaacaattaaatgtttatcttgaatacccttgtttatttacttttcttctttgttgtttgtctccccagactgttggaatataaattttgttataaaatggccttcatctccagagctgaggagatacataaatattttttattttgaattaacacatggctgtgttcaggctcttctgaatgtaattccatggaggaggtcaaaattggattcctgtatgtagtgaatctgtcccgtttatgattttcagttatataattagttagaagaccaatccaatcatatttcagataaacctcaagagcaattgctatggcagagaactagaagggtatttaatcaactagttccttttccaagatctttagctctttaacagttataaattaataaagtatgttatataatgctaggactttttgtctttcattgtttctgttgctttatctccagcttctagtctgacatatggtaggcactcaaaaattggatgaagaagcagctctttttggacagaccaagagtgttgccttttaaaacattttatgtgtactttttccccctgatccttttatagtatgaatgaatgtttgtataagacataaatttctacaaatactgaaacacagtatggacagatatgagttattattattaatatcacctagataatagataaaatattttagaaagtgaggctaccttaaattatcttgcttcttgagttttttttttcccctctaaggatattccagtaagagttgagcagtatttaagctttggataaggaatgcatatttcttggcttagtcagaacttttctggatggaaggtctttttggatgagaattatactacataagattaaaatgcccatttaagatgtaaattatagggataaaatatagataactcacatggggtgatttgattggcatctgttttcatttttctttgtttctttttagataccaccaaagtccttcctatttcaggcaaaaagatatgttttaaaaaccactcacaaggcctctacaatatgtcagataatgcatgtgcgtgaatgtccttggatgtgtatggtctcttgcttgaagttatcagccagcaaaatggtgaaatacttagaattaatcaaacatctggaggtcaagaaacrcagtacctatattcttctccttactttaagaatgaaactaataaaaaataaggcggagctggcccttcagcaaaggagggatttttattatatgagtgaatttgagagaaagggggacaagaaaagacctttgagatcagggcccaggtctgttttgttactactgtatccttactgcatagcacagtgcctggcacctagcatggtcacagtaaagattgaatgatagaaaaatagaaaaggaagagctaacttttaggaaggaacacttacttcccacttacagttattgaaaaaactatgaagatggttaacatcatgatactgtcggatgtaggcagttacaatttctactcaacgatagaaaaaagaactaaagagaatttaccaggacatgaaagaaaggtgtaagatcatggattcctgaaacaggatgttccaattaaatatttaaatttaagtgaggattgtaggagtttaacagctatttaaaatacgccctgctgctttccttcctaggttctccacaccttcaaagctcatcacttggayaagattgcctctttactttttccaaatcaatctggttcatccattttttgcaaaaatgaaaactcccctctttcactaaggtatttgagccatcaagaacaccctcctgtctaggcatggtggctcacagctataatcccagctctttggaaggccaaggcaggaggatggcttgaggccaggagttcaagaccagcttaggcaaaatagtgagatccctgcctcyacaaaaataaaatgaaaaaattagctgcgtgtggtggcacatgccagtggtcccagctactcaggaggctgagatgggaagattacttgaacccgggaggtcgaggctgcagtgacccatgatcacaccactgcactttagcctgggcaacagagcaagaccytatctaggaacaataaaaaattcattattcattatttgatccaaaacaaaaacatgttatagactatctatagattcaattttcaaaaatcctatgcttctcatctctaaatattgttataatactgcaattttcaaattagctttcacctttaagaaatgctactttccatattggaatgaataattaatatagaaccaaaatgcatgtctgggatttagaaaatcttgggattctgtttccatccttgcttattttttattaagctaagtcattcattttaagaaatgatcccctttaccccaactatagaggtatatactaccttatatactaccatacttaaaaggttagtgaagaggcatagaaagagtagtgaaacagtgaaaccttctagatgccagatgctatacaaatgtgaagcatatgacaccagcatggtgaaaaaggaagctaattaagaccatcagatagtatttgattttatctctccatagaaatcatgataactatgttacatagttactgaaatttagacattaagtttgtggaatctctctgacagttatattagctaatcactaaacagaaattttaaaagaagtatttaatattaattctcaagtcttaggagaatatttagctaataattctacagttgactgsagagtttattcattatttaattcataatgtcttttcaatcactttactgtttcttgattcatgaagaatacatgccaagtgtattagtctgttctcacactgctgtaaagaactggccaagactgggcaatttacaaagaggtttaattgactcagttccacctggctggggaggcctcaggaaacttacaatcatgacagaagggaaagcaaacacattcttcttcatgatgtcaggaaggagaagtgcagagcgaagtgggggaaaagccccttataaaaccatcagacctcatgagactactcactatcctgagaacagcatgggggaatcactctcatgatctaatcaccttccaggaggtccctcccccaacacatggggattacaatttggattacaattcaagatgagattttgtgaggacactgagccagaccatatcactaagagaataaaaatggacacagaatgccactttcctattccctttaaatatttccasttgaaagtatttccatgacctagtgagttcttagagaattcaatcactattgatgtcccaactggtataataaaagaagaaaacacataattttgagacaaattccacctttctcacactctcagcatataaacacataatcgaagcaagaaaaatgagaaaaaatcaaatatataatatgatgaagaattttacactattcattatgacatgtggggccaaagtgacaaaagtaattggacaaaggtagactcagcaatgaggacttggaagaaatgagctttcagtcccattttaaagtagaagagaaggtagggtatcaaaagtagggtgcgctacgcaaagtggagggtgtttttgttgttgttgtttttagagacagggtctccctctgtcacccatctttgcccactgcagccttgaactactgggctcaagtgatcctcctgcctcagtctccctcagtgctgggattacaaatgtgagctacccaacacccaatgttttcttgattgtaaaagaaaattgatggtttctcatgttcaccagagggaaacatccattcattttatcaatgtgtttaaaataattcttactccttctttcactttaaagtgtttaactcatttttgcattctattcataaatatgaccagtcacaacttagaatatgtatactgtattatttcatattaacacacacattttgttcttctataatagatttgtgtatggtttcatatattagagtgttaaatattgaatttattgtaatttacttagtgaaatactgatgttaacatctagtatgtttatttgagggatataggaggcttacagtgaaatcatcctttcaccaagatttctttgtaagacactgttactggaattgtgctttgtgcattacatttcattgacgtaattttaaacttccattctacttcactacaaatggaatttcattatatctgactccacaataagtgggttccagaatcgttgacatttagtagaattacagatcttagtgtctttgtacattctgtattaaaatgcattatgtgtgctttcaattctgttttaaagaaattgccattgatttacatggttgtatggaagagttttgtttaaatgccattgcctgatttcctggtggcttttattttccttctgaaatcayttacaaatatttcttagggtattggctactgttggtttgaaatgagatamaacttatggattataaatatgtttgtgcaaattttctctagcagtaattctaaaacctttgtggacattaagctgtaattgtagctttctcttgcaagcttytttatcctctgctttattattcccttgtaggaaattaagtattttatataataatgcttagaacatctttctcttttaaagagggaaattaagataaagagcttggcaaatataggatctttcctggattgtatgtttctgagatttggtgacagagcgtctgctgtggaggatggggaaggacggatctgggctgaagaagtagacagagacagtggactttggttttaagaggcctgctgctgggatcttctcacccatccctagcagagctcagaagtaggcatccagctgcaggtaattgtgttttgggctcaaaggagcccttagagtgccagacctaaagaggcaactcccgataagagtttcaatagttttatccattctagaaccgccatttccttaagagtctgaggcccagggaccaacgcccaggacatatatacactttgataggaggaacatttcaaattcatccaggtcaagatcactcactaggtcttgtgcacctcctccgcctcttttctgtctggagttagtaaccacctcaaaagacagctttctgactcgtcattataccacctacagtcttacttttagcttggtttgagggtgtcctgttcattacttacagaaacagatttggagtgtgaatgcccttaacaccagttttaataagcatttttaattctacaataatgtgattcagagaatttttttttcctttgtctctatctccctagatagaaatatgtggaggttggatttcctgctgagtttctttatttttttcctttcttttttttttttttttttttaagatggagtctcmccctgttgcccaggctggagtgcaatggcgtgatcttggctcactgcaacctccgcctcccgggttcaagtgattctcctgcctcagcctcctgagtagctgggattacaggcgagcgccaccatgcctggctaatttattcttgtatttttagtagagatggggtttcactatgttggccaggctggtctcgaactcatgaccttgtgatctgcctgccttggcctcccaaagttctgggattacaggtgtgaaccacagtgcccagccttcctgctgagtttcttagcattattgccaggtcggaacttaggcatagtaacatgaaacatgttctgcatctgaaggccagaatataataagcattgttaatttagttaaaggaaaaggctgctgttgaaggttagacttcttgtgtatgtgtgggagataacagaataaygtctcttttccaagatgcatatggttttcttttgcttatgtgccaattttaatcaatggagaaattaatatgttaaatgaaataattaaccattttataattttagtcggatattggttgaccagtacttatatgatggtataaagttctagaaactggataactttaaaaatctttccatataatgcattatattctgggtcatagtttcctatattataactgctaaacaacataaaccaattttattttcaaaatcaatctttggggtaacttctacttagagccctgacctaataaatgatgtacgtgtttatttctgacacgtattttgataatcatttagattagtcttatttatgtggatatgtgtaataaaatttctttggaaaatatggtttattgagtttaaacctcttacctccatttcactttcctaaattttaactatttttttctgttccattgcaggcatagtaccaattctgtgtcaggcattttattcactttgtttcaactgttcttgagatcccggaggattaggactattgcagttataagtctataactgaggaaaggaagcttatctggacaggaagatatttagagtatgatataaagacagtctctttttaaaaacagcattttaaaggtataatttcttttttgtttgtttttttcgtttttttattttttatttttatttttttcttttattattatactttaagttttagggtacrtgtgcacattgtgcaggttagttacatatgtatacatgtgccatgctggtgcgctgcacccactaactcgtcatctagcattaggtatatctcccaatgctatccctccccactccccccaccccacaacagtccccagagtgtgatgttccccttcctgtgtccatgtgatctcattgttcaattcccacctatgattgagaacatgcggtgtttggttttttattcttgtgatagtttgctgagaatgatgatttccaatttcatccatgtccctacaaaggacatgaactcatcattttttatggctgcatagtattccatggtgtatatgtgccacattttcttaatccagtctatcgttgttggacatttgggttggttccaagtctttgctattgtgaatagtgccgcaataaacatatgtgtgcatgtgtctttatagcagcatgatttatagtcctttgggtatatacccagtaatgggatggctgggtcaaatggtatttctagttctagatccctgaggaatcgccacactgacttccacaatggttgaactagtttacagtcccaccaacagtgtaaaagtgttcctatttctccacatcctctccagcacctgttgtttcctgactttttaatgactgccattctractggtgtgagatggtatctcattgtggttttgatttgcatttctctgatggccagtgatgatgagcattttttcatstgttttttggctgcataaatgtcttcttttgagaagtgtctgttcatgtccttcgcccactttttgatggggttgtttgtttttttcttgtaaatttgtttgagttcattgtagattctggatattagccctttgtcagatgagtaggttgcgaaaattttctcccattttgtaggttgcctgttcactctgatggtagtttcttttgctgcacagaagctctttagtttaattagatcccatttgtccattttggcttttgttgccattgcttttggtgttttagacatgaagtccttacccatgcctatgtcctgaatggtactgcctaggttttcttctagggtttttatggttttaggtctaacgtttaagtctttaatccatcttgaattgatttttgtataaggtgtaaggaagggatccagtttcagctttctacatatggctagccagtttccccagcaccatttattaaatagggaatcctttccccattgcttgtttttctcaggtttgtcaaagatcagatagttgtagatatgcagtgttatttctgagggctctgttctgttccattgatctatatctctgttttggtaccagtaccatgctgttttggttactgtagacttgtagtatagtttgaagtcaggtagtgtgatgcctccagctttgttcttttggcttaggattgacttggcgatgcgggctcttttttggttccatatgaactttaaagtagttttttccaattctgtgaagaaaggcattggtagcttgatggggatggcattgaatctgtaaattaccttgggcagtatggccattttcacgatattgattcttcctacccatgagcatggaatgttcttccatttgtttgtatcctcttttatttccttgagcagtggtttgtagttctccttgaagaggtccttcacatcccttgtaagttggattcctaggtattttattctctttgaagcaattgtgaatgggagttcactcatgatttggctctgtttgtctgttgttggtgtataagaatgcttgtgatttttgcacattgattttgtatcctgagactttgctgaagttgcttatcagcttaaggagattttggactgagacaatggggttttctagatatacaatcatgtcgtctgcaaagagggacaatttgacttcctcttttcctaattgaataccctttatttccttctcctgcctaattgccctggccagaacttccaacactatattgaataggagtggtgagagagggcatccctgtcttgtgccagttttcaaagggaatgcttccagtttttgccaattcagtatgatattygctgtgggtttgtcatagatagctcttattattttgaaatatgtcccatcaatacctaatttattgagagtttttagcatgaagtgtggttgaattttgtcaacggccttttctgcatctattgagataatcatgtggtttttgtctttggccctgtttatatgctggattacatttactgatttgcgtatattgaaccagccttgcatcccagggatgaagcccacttgatcatggtggataagctttttgatgtgctgctggatttgttttgccagtattttattgakgatttttgcatcaatgttcatcaaggatattggtctaaaattctcttttttggttgtgtctctgcctggctttggtatcagaatgatgctggcctcataaaatgagttagggaggattccctctttttctattgattggaatagtttcagaaggaatggtaccagttcctccttgtacctctggtagaattcggctgtgaatccatctggtcctggactctttttggttggtaagctattgattattgtcacaatttcagatcctgttatttgtctattcagagattcaacttcttcctggtttagtcttgggagagtgtatgtgtcgaggaatttatccatttcttctagattttctagtttatttgygtagaggtgtttatagtattctctgatggtagtttgtatttctgtgggatcggtggtgatatcccctttatcattttttattgcgtctatttgattcttctctctttttttctttattagtcttgctagcggtctatcaattttgttgatcctttcaaaaaaccagctcctggattcattaattttttgaagggttttttgtgtctctatttccttcagttctgctctgattttagttatttcttgccttctgctagcttttgaatgtrtttgctcttgcttttctagttcttttaattgtgatgttagggtgtcaattttggatctttcctgctgtctcttgtgggcatttagtgctataaatttccctctacacactgctttgaatgtgtcccagagattctggtatgttgtgtctttgttcttgtyggtttcaaagaacatctttatttctgccttcatttcgttatgtacccagtagtcattcaggagcaggttgttcagtttccatgtagttgagcagttttgagtgagattcttaatcctgagttctagtttgattgcactgtggtctgagagatagtttgttataatttctgttcttttacatttgctgaggagagctttacttccawgtatgtggtcaattttggaataggtgtggtgtggtgctgaaaaaaatgtrtattctgttgatttggggtggagagttctgtagatgtctatcaggtccgcttggtgcmgagctgagttcaattcctgggtatccttgttgactttctgtctcgttgatctgtctagtgttgacagtggggtattaaagtctcccattattaatgtgtgggagtctaagtctctttgtaggtcactcaggacttgctttatgaatctgggtgctcctgtgttgggtgcgtatatatttaggwtagttagctcttcttgttgaattgatccctttaccattatgtaatggccttctttgtctcttttgatctttgttggtttaaaatctgttttatcagagactaggattgcaacccctgcctttttttgttttccatttgcttggtagatcttcctccatccttttattttgagcctatgtgtgtctctgcacgtgagatgggtttcctgaatacagcacactgatgggtcttgactctttatccaatttgccagtctgtgtcttttaattggagcatttagtccatttacatttaaagttaatattgttatgtgtgaatttgatcctgtcatgatgatgttagctggttattttgctcgttagttgatgcagtttcttcctagtctcgatggtctttacattttggcatgattttgcagtggcttgtactggttgttcctttccrtgtttagtgcttccttcaggagctcttttagggcaggcctggtggtgacaaaatctctcagcatttgcttgtctgtaaagtattttatttctccttcgcttatgaagcttagtttggctggatatgaaattctgggttgaaaattcttttctttaagaatgttgaatattggcccccactctcttctggcttgtagggtttctgccgagagatctgctgttagtctgatgggcttcccttccagggtaacccgtgctttctctctggctgcccttaacattttttccttcatttcaactttrgtgaatctgacaattatgtgtcttggagttgcttttctcgagaagtatctttgtggcsttctctgtatttcctgaatctgaacgttggcctgccttgctagattggggaagttctcctggataatatcctgcmrwgtgttttccaacttggtttcattctccccgtcactttcaggtacaccaatcagacgtggatttggtcttttcacatagtcccatatttcttggaggctttgctcatttctttttattcttttttctctaaacttcccttcttgcttcatttcattcatttcgtcttccattgctgataccctttcttccagttgatcgcatcggctcctgaggcttctgcattcttcacgtagttctcgagccttggttttcagctccatcagctcctttaagcatttctctgtattggttattctagttatacattcttctaaatttttttcaaagttttcaacttctttgcctttggtttgaatgtcctcccgtagctcagagtaatttgatcatctgaagccttcttctctcagctcgtcaaagtcgttctccgtctagcttcgttctgttgttggtgaggaactgcgttcctttggaggaggagaggcgctctgctttttagagtttccagtttttctgttctgttttttccccatctttgtggttttatctacttttggtctttgatgatggtgatgtacagatgggttcttggtgtggatgtcctttctgtttattagttttccttctaacagacaggaccctcaactgcaggtctgttggagtaccctgccatgtgaggtgtcagtgtgcccctgctggggggtgcctcccagttaggctgctcgggggtcaggggtcagggacccacttgaggaggcagtctgcccgttcttagatctccagctgcgtactgggagaaccactgctctcttcaaagctgtcagacagggacatttaagtctgcagaggttactgctgtctttttgtttgtctgtgccctgcccccagaggtggagcctacaaaggcaggcaggcctccttgagctgtggtgggctacacccagttcgagcttcccggctgctttgtttacctaatcaagcctgggcaatggcagacgcccctcccccagcctcgctgccgccttgcagtttgatctcagactgctgtgctagcaatcagtgagactccgtgggcgtagtaccttcccagccaggtgcaggatataatctcgtggttcgccgttttttaagcccgtcggaaaggcgcagtattcgggtgggagtgaccagattttccaggtgccgcccatcacccctttctttgactaggaaagggaactccctgaccccttgcgcttcccgagtgaggcaatgcctcaccctgcttcggctcacgcacggtgcgtgcacccactgacctgcgcccactgtctggcattccttagtgagatgaacccggtacctcagatggaaaagcagaaatcacctgtcttctgcgtcgctcacgctgggagctgtagaccggagctgttcctattcggccatcttggctcctcccctaaaggtataatttctataaaataaagtttttttacacataagaaatgtatgtgacatttgacaaatatatatatacccatataaccgtcagcccaacaacaacaaaaaatagaacatttctcctttcccagaaggccctcactgtttttttgctgtcttcttccacagccctgaaactcttatctgattagtttcatctgtcttagaatttcctttatatgaaacaccaactaagtacttttttctgtctgccttctttcacccagtctactgtctgtaaaaatcattcatgtttttgcatccatcaatattttgctccttttaatcgctaacattttccgttgaatgaatgtacctccatttttattttattggcctgttgatgacattaagactgtttccagtttttaattatcatgaataaagttgctatatacaagtcatgtacaagcttttttatggacatatgttttcatttgtcatgtttatctgggagtaaaattcctgggttgcatggaaaaaatgttcgtttaattttataatagacaaattgttttctaaatgaaggcatgatcttagtctagtaatgtttatttacttctatcaacatatgtgtttggtaagttaattttttggataatgaatgataccgtaatggatatttttttctcactacttcttcctttctccctctttttacacaattaaaaaactaaagataaaagttggctctatagggaaagrttttattttttacrtttctggcaaatttgagatttctataaaattcttcataggtatataaaacagagtaagtatattttgtttaacttttaaagcagggtattattcatttgttagttgtttaaaatctactataattatgggtaaggcagtgatacaaaaggaagaaaagaaaaatcccaatttattcattaaataagaatgtgtcaatgcattttgaatgagaagtcattttaaactccaaatacaaagatgagcaagacgattttttaacctcaggaatggcatagtagggaaaaaagtaagtgtatgtatatcattagattcatacagtcaggctgaatgtggaaagggctttaagaaagttattaaaattgtttttacattctggggaagtagaaacatttccatctaacaggaacagggcagtttcacagaggagttggaatttggactgagttttgaacagaagagaatttcgatgggcagatcaggaaaagagcagttcaggaggagggaatggtggactgtggagcatgggcgaccagaaaggcagattaagttaaaacagggttgacaaattgggagaacacaggattaagggactggaatttaagtttagatttgctttaataaagaaaaatgttactttgtgatgagagaaaataagctaaaaattaaaaatttaaaaaccaatccactctgagagattaattaaagtgaagatggggtctgctaatgtgttactgaagtgaactgcagagtacagtcactggcattgatgagtctagatgctgtgagaaagatcattagcgcattgacaattctaagtagctggagaccttttaaactttcaacttccatatttttagtaatttttcaaatgtgattaatttagcccatgaaaacacaccccatcattgatataaccaatcattataattatttattcgactggtgtactttgtctctaaatgacacatttctatgaaaaaaagatcagtttcactaactcctcaggcttctggctgtgacttttcataaatgtctgtatgaacgtaagctataactttgcttcattgttgtttagatgacattaataattggttttacttactgactatgggcattttaatacaagattccattttaaaagtgtgtacttgtagcttattgcaacacagtgaccaaagacaccatattcttacttctggaatcaatttgtgggcattgttaacagtatcttcacaactgcactagtcaagcaatcagagctaagctttcaaagcagattagaggaagcttattagcaataaaatatagtcaaaatataccaggcataatcatatttttatgtagtggaattacctcagcacatggagaatctaaattaaatgagtttataattgaggtttgtgtgcaagggaaaagaaaattcgtctgttatggaaacgctctatattttttacattatagccaaagtcttagttaccttttgagggtatctgtaggtgccattaaattcagctatcctcttctgctgtgggtataagcacatggcaaacccaggcaaaaattagaaaaataaaaaggattgtagagaaatggagatataaaaaattaataagagaagaggcaagctaactcccttatccatttttttcctcaaggttattaacagaaattatttccaacataaatgtccataaataattttgaaaatctagaaagaaattgcatttctactttaaaaatagctttctatggctgaaggtttgcttcagttgttttactgtcacaactcccaaaaaccagctggttctgggatgtcgtaacaatttgatacttcaaaccaatggtttgtgctcattggctccctggtgcaaacagggagataaatgctacttaaatagtaggtgaatgtaattttgcactttagaaaatgtctgcatgtttattagagaagtgaatgctgaaatcagcgaacaaaatgtaaagtgagcaactaagaaatacttataagrgctcacttgtattatttaactgtgtaatcctctatctcatatatatgtaatactttcttcaagttcattatagctcccgggcccagtacatcctagtccagttccaaccatgtctaattttaaaatagctatgctcacttcaaacgaagatgttgctatagctttattttattttataggcttcaattttaaagttgtatcacctatagataacaaagacagctttcatggacacctcaatttagaagagtcttataggcactttgtgagataaactgtaagtgtatgtgctaatcagataattcttttactagagactttaggtgaagatagcaaatcttctaaaacagactgataattaaactgggttgatcattattgggttcattattatcaaattgaaatatgctttattttgtaatgtttaaaatgtgttcttaaattcagtagaatattaatattatattatacttttccatttttaaatcatattaaaaatagcaaaaatattacttcttcaaaaatgctttatacttcatgtatattactgattttaagtaaaagtacaattaagacaattagccagwcctatttatgagtagctctaattggagcagcttgttgctggaccctattcagtggtagagataaggttgagatggctgaatagttcatctaatttgaaatactttggtgtcacatggaccttttcctgaataccatggctatgtactcactatttggccaaatgctgaaaatgaacatatatttgcctccgtcaaaatgttttgtaaatgttcactcagacattgacataaacaaggcagaaaggttaatggataaaaaattctttttctttaaaaaaatacatacacatacgaattttctctcttttagttgctaacctgctttttagattagtccatggttatcttggaagaggtgtgggagaacaaggtgagagctaaggaaggaattctatgcaaagcgtttctgattctcttagtattttgtggaacagcatgagacatgtcttccagttgtgtaggataagtacagcccactgaacactgcttaccagcagtttaccacaagccagttataacatcaaaaacatcggaaccctttcttttcttctatatttgaataatgataaatgccttcatgctgtgtgagcactattgaagtgtgtttctctgcaggtaaacttggcagtgtcttatataactacactcgatgggagtattacttaaacagtgtgaaatacattgtctgataaaaattgtatcacaatttggaatgacgtttatgcaagtggatagtctgccagttattttatagtctaaaaaaatgaacctgtaaggctacagtataaaatccaagtctttatagttgtatatttgtagtgaaaacaaccgtgggggaataatataagcttaatcatttggtgattagtctaccaactattaatgatgagagataacctatctgttctttatttctaaaataagatgtgtaatacagctaattagtcactattttaaaaggaatttaaatatagttttcattgaaattcaaatatttaattgcatgtgtacctaatgcctaattatttacatgttggctgatgttctctattatctaactgctgtgctgttcttaattgctgctagttcatctccgcccatctcccttggtgatgatagtcctgcatttcatggcaattttcaatagcagtttaatggtcttaagtgggtagcataatagccaggtgaacaacaaaaaaaacaaaaacaaaamcaaaaaaactatttggcaaattgggatatgagaattgaggccaaaacttttagtccttgccaattttttttaaaacttcaattatcttgattcatattcccatttgttgggttggtaggcactccaaaataaatataataatcagagagaacaccaactgtaggtactagttttagcaactgaaacaactggcgttaaaatcactgagcttctgttacatgaatacctgagtattatgtggctacttctgaaatggagtatgcagtgctcttataattgggcatttcagttgaacactgcttcagtaaagtaactggcatttcaagtcttccttctgtagtgattgctttgtctttattcaatgattgcttttttaagttagaatctggttgcatagtgctccatggttctttcctatgcagtggtgtttctcagtgttgatgtggagaagccaggagacatcctacaactctgagaagcatttgatgttggcagcagtggctgtgaggttagcccatgaacttagggctagaggtgagtcttaaccttccaattcagcatcttttccatctgaacattcaagtcaaatgggaaacctgttggccctccagctggatctttccactgttttaactggaatgaattggataagttataaggcagatggtaagattggatctgatgggatggagtttggtgaagtggaaacttttaagcattaggtttgagatagctagggagtgttgacctctctttccccctgacattatcctcacatttgtttttattccaccatatctaccttgatccacctgattcttttcatttttttctttcattctctttgtgctggctttctttccttttttaaaatcccatggtatctcatcatctcttcttgtcctcccattctacaaatagaacatgaaattgaagccttttttwaaaaaaaaaaaactaattacagaattaatatatgtttactatgtacttactacaattagaaactatatataaacaaaaaagagagcttgcccatcaatccacatgcaaaattggttgagtaccttgaagatttgtaatagtatatagagaagaacattatttttcttaactatttaaaagtgtattctgcattctcaattaaaagtcattttatcttttactttttcttttattcctttttaagcaacaaatgaattaaatttcctttgttttatatatgrcctattaacctcaatggagaaagaggctccctttgtttgcttcaggacttacatattgttacagttagtccttaggtaaatgaaatgagaagagcttcacatcagcactagttcttccccatggaattttagtttctccacaaccactttactgaatgtgtataattataagaattatttcattttcttacaactttttctctttattttatactctcaccctattatctgtcctttttcttttttttttctttctttctttctttctttctttctttctttttttttttttttttgagacaggctcttactccgttgcccaggctgaagtgcagtggcaggatcatggcttattgtgcccttgacatctcagtttcaagtgatmctcccacttcagcctcttcactagctgggactacaggctcttgccaccccacctggctaatttttctattttttttgtaaagatggtaytttgccatgttgctcagactgaactcctgggctcaaacaatcctccccacctcggcctcccatagtgctaggattataggcatgagccactgcacctggyttttatattcttaatatttcttgtttcttctatttattttctttactttaaactcgttgttataaagtggtatgggttaatcaagagtgatggaaagattagctctgtttttctgtgtgtgagtgaaagatttagaagtaagaaaatataattattcttcttcccaaagtaatgatgtttaccaaaacactggtaacattactttaaatttcctaaatttataattcaatttagtaaagtaggacttctgaaatggatttttagatatattggggaaaaacaattcaggatctaaggtaaactttttaggatgtatatatatttgcatgccattcatggttgtgtttatctgaaaacctaatacatttttatcataaaaatctacataattctaaatcatctcaagtgaaattagaattaatataaagaaataaacaaatattggaagttaaaattttcagatttattaggtgttaaactgaatttttcgtcttctactcctatcctcccgtaaacactatctagaaaattgtcacccaacctattgtagaactaaaaacctagtggtcttcctcatcttcattgtcttcattatytccactacacgaaacattcccttgtaacaaatataatattcacagcattgtgcaaaaaatgtacattttaaatttctagtataaaatttgatttgtgactctgagcccccagtttccttagggcaaacaatatgggtgctttcagttaattttagtccaatccagtaatttttcagttacttttccatttaaaacaagtagttcgaggttcagccttctgatcattttcctgatatggaatctgggagcagcagggaacataagtaatgtcacggtgtcaggattgggaggtgtgcattttggatcctgattaaatgtatcaacgtaggtaatatattgtgattgtttcaaatagtggagatcaggaatccttcctggtacaaattcagttccccacagtaacctcaaaattgacttcaaacctactgacttcaaatctgactcatgatgtttctcctctcccatcacttttcactgtgttctgctgatctccatactgtttcctcaatgatgggcccaaaaaatgctggaagktttcttctatttctctctttgagaatcatgaggcactcattgggattgtggttcttggattgtttccctctttgtatgtatttatgtatgagccatatacaatcaactgttctctcaatatcaagaggtagcaattttaaatgttctgtgttttaaactttaatgtataacttacgtcagtcaatcctgataataccactattctyactagtcatcaacatcattatcatcattgtcatcatcatgtaacaattatataatggttaatattggccacaaatcaatcctagttccttaaaatctattagttgagccttatgaaactgccctttttgtcggttcaaatggtgagtagaagcaatttcatatggttcaacttattattacttcaatttccttacaggcttacagccaacacagtgattcaggccaccatcatctcacaactagaaatcatcactgtggccttctaatggatattcttgcttgcaatttagccctcccccatttgtttgttgtacttcagctaggttaagctttataaaacacaatagtattgagctattcctctctctaaaatgctgtcatggcatctgattgaccttagtataaaatccaagctctgttaatgtgatttataagtcatgtagccgtacatcccagttagtctctgacagccctggtttacaactgctgccccagcctaattaatagtggtgttccctttattctcagaagtggactggtttagatgatgaattacatgaccaccttatttataatgtacctcatgctctgccctgtgcagttctctccagcctcatctctcaccactttttaaatcataaaaatgagctgtatccattctgaattcctttggatttatggaatatatcactgtctctttcagttcaaagcctgtgcccataatgttgtcactgcctaaaatatctctctgttaacctgactaatgcataccaattttcatgctcatttttcttttcttttttttttttttgacggagtcctgctctgtcacccaggctggagtgcagtgctgcgatctcagctcactgcaacctccacctcccgggttcaagcgattctccttcctcagcctctagagtagctgggactacaggcgtgtgccaccacgcccagctaatttttgtatttttagtagagacaggatttcaccatgttggccatgttggtctcgatctctcgacctcgcaattcgcccgcctcrggctcccaaagtgctgggattacaggcgtgagccaccgtgccggtccctcatgctccatttttatagtttctccaagaagcactttctgacctctagactagtttgaattttcctatttctgtacccatattggctctattcttcccctaatcaaacccttttcccaattaaccatgtttatatcctagtttatgtgcttccttttagcatgtaccattgtttctctagggccttataagtatttgttatacagacattacatatatatatatattatatatacatgtgtgtatatatatgcatatatatgcacacatgtatatgagagtatgtgtgtgcacatgttgaacaaattcatgagacaaaatacaactttaggttgcttttggactttgacatctgctcttgactttttatgttgagaaagggatgttgagagtatgaagcactatagcaagggagaagaaaagaaagagagaccagaaaagggctgattattgaatatcaagaaaggaacacatagaaaacaagtaagaggctttgaactgacaatttggatggacaactacattccatttctgatcatcgatcctgtctttgcactattgcttgcacttatcttagcaggggcacttaaaaagcctgaaacgcgtatcttgcctgcaatgtacaaacttatcagaacatctcatatagtaacataattttcagtataagtatagataggaattacgtttaaatttgagtaagtattggactaagattatctctccttttttaaaagttggtaagttatgttaaacaaaaacaaaacaatttctaaaatgatgactaaaagtaagggttgtttaaatccattttataagatttacttccagaagatgaaagtgggaagctgaagtggcatatcatttctaagctatttttgtaggttgaattgcatccttcaaaaagaaatgttgaagtcttaaccccaggtaactatgaatgtgaccttatttgcaaatagggtctttgcaaatataattaagttaaggtgatgtcatactggtttagggtggaccctgatccaatatgactggtatcatagaagaggggaggagatacagaaatacagggagaaagctgtgtaaagatggaggcagagatgggagtggtgcatccacaagccaagcaatgccaaggaaagaagcatggacattttttcttactgtgtctagaaggaaccaactaggctgacattttggtttcagagttacagcctcctgaactgtgaaatgaatgtctgttttttttttttttttattattattatactttaagttttagggtacatgtgcacaatgtgccgattagttacatatgtatacatgtgtcatgcttgtgcgctgcacccactaactcgtcatctagcattaggtatatctcccaatgctatcccttccccctccccccaccccacaacagtccccagagtgtgatgttccccttcctgtgtccatgtgttctcattgttcaattcccacctatgagtgagaatatgcggtgtttggttttttgtccttgtgatagtttactgagaatgatgatttccagtttcatccatggccctacaaagcacatgaactcatcattttttatggctgcatagtattccatggtgtatatgtgccacattttcttaatctagtctatctttgttggacatttgggttggttccaagtctttgctattgtgaaaaatgccacaataaacatacgtgtgtatgtgtctttatagcagcatgatttatagtcctttgggtatatacccagtaatgggatggctgggtcaaatggtatttctagttctagatccctgaggaatcgccacactgacttccacaatggttgaactagtttacagtcccaccaacagtgtaaaagtgttcctatttctccacatcctctccagcccctgttgtttcctgactttttaatgattgccattctaactggtgtgagatggtatctcattgtggttttgatttgcatttctctgatggccagtgatggtgagcattttttcatgtgtcttttggctgcataaatgtcttcttttgagaagtgtctgttcatgtccttcgcccacttkttgatggggttgtttgtttttttcttgtaaatttgtttgagttcattgtagattctggatattagccctttgtcagatgagcaggttgcgaaaattttctcccattttgtcggttgcctgttcactctgatggtagtttcttttgctgtgcagaagctctttagtttaattagatcccatttgtccattttggcttttgttgccattgcttttggtgttttagacatgaagtctttgcccatgcctatgtcctgaatggtaatgcctaggttttcttctagtgtttttatggttttaggtctaacgtttaattctttaatccatcttgaattgatttttgtataaggtgtaaggaagggatccagttttagctttctacatatggctagccagttttcccagcaccatttattaaatagggaatcctttccgcattgcttgtttttctcaggtttgtcaaagatcagatagttgtagatatgcggcattatttctgagggctctgttctgttccattgatctatatctctgttttggtaccagtaccatgctgttttggttactgtagccttgtagtatagtttgaagtcaggtagtgtgatgcctccagctttgttcttttggcttaggattgacttggcgatgcgggctcttttttggttccatatgaactttaaagtagttttttccaactctgtgaagaaagtcattggtagcttgatgggaatggcattgaatctgtaaattaccttgggcagtatggccattttcacgatattgattcttcctacccatgagcatggaatgttcttccatttgtttgtatcctcttttatttccttgagcagtggtttgtagttctccttgaagaggtccttcacatcccttgtaagttggattcctaggtattttagaatgtctgttgttttaagtcacctagtttgtggtcatttattatggcagtcctagaaaactaagatacctaaattaggaaacaaatataactatattaaaaggggatagtatatccaatatatttaatacagaaaggatgaagatatagatagtagaatgatcagaggaataataatttttttcccactgttctcaatatcactgctaattcctataagaacacaattactcaatcactaatctgctgtagtagtctgattgatgctaagccatgctgcaggaatgaataaacccccaaatcttaaaatcttagcattatagaggtttatttctcaatgatgcaatgacaaatacaggtccatctggtgactcagggtcccagttgtcctycgcttatgatgtttccaactcaggaaatgccttttatggttgctatggcagaggaagagaggagtggggagctggcacctaggtcttcagtgcttcagctaggaagtcatagtcatgactctgctccacatttttacaatctaagaatagtcagatgcccctcttaactgcaaggggctgagaagtgtagggaacacaagaatattttttgagagctmctatctctgcttacatataatggcagaagaaatatcctcctaaatctattaaaatcatactatgctctcaaagattctagctgctcccttaatttgatattttatccctgctataatttttacaagcttcttttcatatatatatacacacacacacatatgtatttatgtgtgatgtatgtatacatagctattacccaagtctttccattaacatggtgttatatttgtccttaccagaactactgactgctaacaacataaaactcttttccatccaaaatcattcctatttaaacatttattagtgttcaattctaataccattcaactgctcataaaggagaaagaggaagagaaggaagaggaggagaaattttccaggtaagtttatagagtaaaggaaacaacctgccattttgattgttttgagtatcaattaaattatcagttaataattcaagaaaatatatcccaggaaaaaaaaatcccctgtataataaactaaagcttttttaacatccttcttaatccctcatatgaaaaatttatactcccctcttagatattaataaaagctcaatgtacaggtagctagggtgccccccgtcttccctgctggatttgtaggtcctgctcatgcagaggggttatttcccagcatgtggatgctctatttgactccactgtaggccaaccaccccttctcatcaatcatgttgcaattattttttacacaattacgtcttcttttagagaagagaattatttaaccagaaataacatcaacaagccttttacagaatatacatgcttaagtttcacaccatattgttgagatattttaagtgtttaaaaaatagtatgtgaatatatttcggttgtaaaaaattcaaaggaagctttatacccattaggatggctgccataattttaaaaatggaaggtagaaattggtgaggatgtgaaggaattagaagccttatgcattgttgatgggaatataaaatggtgtgacaatcatggaaaacagtatggagggtcctcaaaacattacaaatagaattacaataggatccaacaattccacttctgggaatatgccccaaataattaaaagcagggtcctgaaaagatatttatacatctctgtcatagtagcattatttacaatggccaaaaggtgggagaaacctggctgttgacagacgaatagataaataaaatgttgtgcatgtatacgatggaacattattccgtctgtaaaagagaggaaattctgacacatgctaccatatgaatggaccttgaggacattctgctaagtgaaatataccagtcacaaaaagacaaatgctgttatgattctacttacctagagtagtcagaatcatagagacagaaagtataatggtgattactagcggctgcagggagagaggaatagggagttattatttaatgagtaccgagtttcagttttgcaagatgaaaagcattctggatgtgaatggtgttgatggttgcacaacaatgtgaaggtactaatactactgaactgtatacttaaaaatggttacaatgatgaattttatgttatgtgtattttacaatactttaaaataattcaaaagtaacatcctcactcccagtgctctatacagagaaaaccaatgtctttattctttagttctgcgtttacatagacacaaattctcacatagcaatatatggtttattctttgattcatttttttttcacataaatgctatcttaatgcatatcttgttctgcatgttcaacaatgtctcagtcttgccatgagaaacggagcagggaaacttcctgggcctaaactgaataggccattttattctcttctctgccacattctttgtggttctgtctccactggactgggactctccattggtcctttaccaatgagccattctattctcatgaaatattcatgagaatgtttcaccagatctaggatttctacatattacttctaacatttccatatttctttgcctaaaattttccattctatttgaaagttgtgtgccttttttctttttctttttatcacctacatggggaggtagagtgttggctttcaaaggtgaaattgcatctttccacaactctgagttttctgagttttgagtctgttcttgacttcttttaaaaaaaaactctttggtcatggtggcaatagaggttagagtatgaataccaactcctctcgtttaggcctctgttctttagatatggtcattttaccgcttcaaggatcagaacatatcatatcccaaatttataatccccagaggtaactcagatatgtataattctttaataacaatctgatttgttctcaatatttaaagtgaacccaagatgaagagttggaaaggaaatttttaaaactctaatgctttagtaggctctcaaactgctgacagctcaagtgttctgtctctttggcaacatataaaaatccagaataacagttaaatattccacagctaactattatttaatactaatattatgtcttggttaatggaagacaccatagaccacattttgaatatttgtgctyctttttaatattggtaatcctccttctgagataaattcaggaaatctgacctttctcctcagcccttttgaaataaagaccacttttccaattaggaatatctaatgtagtgttaaagctcagagttgaaaagatgttttagtattcatcagatataacgttgtagtattattggtaacattgtgaaacaaattccagtacacttcagctctgctaacaaagatgaaatagagaataaagtaggtgtatgctgaatcttattaaggttgacatccagtttgaatacattcatcctctaaggtatagttttgggtataaaccatygagcaagcacaaaacagtgaagctgagagctgcagaacatagagatctggtggattctaaaggactgagaatgatcgatggctactgaaatgaagtgtgaaatggtatccatagctgatatttgtctttaactgataaaatggctaaagcatttcctggtcaacacaccactctccctcctctcttctcattcctctagaacagtggccttcaaactcttttcttgataacaaatgcacttaaattggagaatatctctctttctaacacacacataacaaaaatgtcatgagatgtcttaaatacttagacattttacattcagtgtactccaatatttctattttatattcttttttaaatactggttttgacctattaaatggacttcaagaaatttttcagtctcatctaggcacacagatttaaatattacttctatgttagtgacctcttctgtgagtaagctccgtctctaactttctatctcctttggatatccttattcgcatattccttccagaacgtacaacttaacgtggcttaaacttaacagctaaacattctccctctgaagtatcccattctttccacagtcctcacccacctccatcaagttattttcctcctgtttccaaatttctgctgagggtcccatcagtcttccaggtgtaaaccattagattcctactagatccctatctttcttcccgttactatatcagtgagcaaggtcttgattctatttcrttttttgtcacaattaattattattaatagaaaataaacacttattccagtttcaaagttgttataattgaagttgctaattttaaaaaatgaattttaaataatcacttaataatccttctttgactaagacaatgaaatgtggctttaaaaaaagtaatcagcaccatttgcttataggtctttcagaatttgttcttaaagtttctggaactttcctctctgtaaagtacaggaaatactgagctacactggaaagcctctctgggacaggcaatggggagttaagcagtcatcataaaggaatcaatgtacattcagcatagtgacttggactacacaacaattccttctcctctacggtagctcaagagagacatgcttctaagcacagaggtatgagaagtctcagactgttatttgctgttagaattggtctccccatctaataacagtaaatctctggcacagatgctattggtccttaatgtcctgtgattttaggaaatagtttggatttagtttaatttattcagaaatcaaacatgtttaattaggttcactgctctggcagagtaagggtatgctggtttagtatctttataatatatatataatgagtaggtaaatcatagtcttaaatcatacttagaatactatattatttaaaccaatatctatttcaacaaaatgtttataaataaaaacagctgatgaaactaaatccaaaggtatgacaaagacgactcagctctatgttgcttaaagaactttaaaaagcatgtgcccataaagccgttcaaggagagggaaggaggtccccttctccttattcttacgatagaattcctattggggctgtgccagaaatgagcacttctaagtatttcagagaagtccaaagtgttaaaaagtcttttatgcaaaagaacgtctttctgaatcagtgaatagtaatgctcatcagaattttctaataacacaaaaacaaagccaagtccatacatttgatcagttgtcaaagtaatgggaggtggactattatgtcaaccttagtcagagctcctgctggcttctttgtatacactgttcaccaatttgagtaaagtggactttgtgagagaatagtgtttgatggccaggacctcttttgggcatttcttcctaagtggaatacacaacagataagggagtagaggaggtaatacagggaagctactcattccagctcagaaggagcagaaggagttagatgaagcccatatatgcattcaagaagccaatggtatcctctagctgtggatagtggctaatgtggtcatccagaatccacactgtggaccgcagcagcgttttcccgtacagatccaaaaactctggatagggatttacaggatccaatggccggtagataaaatgaatggggatagttacagaggcaagagctcccacccagcgccttctgagcttcttcctctgattgatgtactgtaagagaccgtcaatggctaagttcccgtcaytgatgcggatccctgcccacatgtcccacagctcactctcacagagccaagtacacggcccaaagactggggtgagacctcgagagaatacaaagaagttcatcagtcatgtgaggatgagtgatagcacacctccatctttgagtagcttttggagaaggagtggacggtgagtctcaggaaagatacctccatttgacagacagactctttatggtatgccgaccagatcgattctgcttgtacctgtagagaaactcctgagcgacaattatctccatagtcatgagacttgatcctgcagttctggagccccagatgccgcaaaagcgcttccacgatgctgacctgctcaaatatggaatagtgatgcggtctcggtttgtcactgaagccaacgccaagaaatcaagggcaatcacccgatgaaacctcaaggtcagaccttcccaattcttgtaccaatcgtagctggatattggaaaacgtgtaaaaccacaactgtctcctgacttccaaccacacccacagagtcttggtagaagatacgcagtcccttgtaagtgaaaaacttgcctgaagacttccacgagtgaagatcaggtgacagctgagtgtatgggatgtgcaggtacgcagcaagcaggagcgcggcccacagccccacctggacccaccactccctcatcctgcggaggcgatctttgcgcacggcggcgttatcccacgctgccagcctcggcgttgcagagcacggggcgccgtggcgcccgcagccctgcagggccggccggcagcggggtctcaatcagcagcccacagcccgcacagggcggcgccgcgcccggcagctacagccactctgacgtgcacggcggcactgcgtttgctaggcgcgactgccacaagggaagtgcccgggtgtgctggttgccgtggcctctatttctaaagtatttcttatattttcctatttcttttcattcctactgcttacaccctcattgactgaactattgcaaccgcctcttgaggtgactgaaatattcatagatattgcagttattctccttttgggcatatagtaggattacatttgctcacccctgaaattaggcatagacaccgtcaatgaaatgtgaacagaactgacwtgctttactcttagattgaatacgagttttacaagccagtgcataattcgccatgctatagagacagatgatcttccagatggatgcctgagtgtagaatatatagatcagttccccccacccttcacacatgggcccaaaatgtacacggagcaggagcaagaaatacacgtccttgctatctttgttagtttaatccacagagactttggagtctgcagttatacagcatcctagcctgtcctgactgatatgatcccttaactgatttttctactcaaagtctcttctccctccgattattctacatcactatcatattaatctttctgaaatagaactctaattatataaattccttatgaaaatctttgaatatttccctgttatcttcactggctttcaagaccatcacagtgtgcatctcaacttccttttaaaacacccacggtttccctacgtgtacacacacactttctaacacgttcgcttttctgttcctatgattctaagatgctctctgctagtcctgtctaagtgctacctattcttaagtaacagttcaaatgccagtatctctatgaggctttttctggatctctgcaaaaaaaaagggacaagaaacaccttcctcccaaaggaacaaagaatggcaattacttataagtaagccagattttagcaattggaccatttttgtcttaaatataactaacctgtctctatagcttacaaggtattcataaattcttcaaacaaaagaaatttatcataaaggatacaggtaaaagttctgtgaaattgtttaaaaaataactaaataaatgaattcccaaatgattttgagtctttattgtagttcttatcactctttgcagtggccatttctagcacttttcaggcaataaatggtcttctttcacttccatattattgaaaattcttttgcataatgcctagcaaatatcttaatgttgaatatctgaatgaatgaatgaatgaatgaacgaatgaaattaaggttgcattttattttaaaactaccgtttttttcttcagaaatcacaacgaggcaaatgttgccaataaaatagttattaagttaaaaaacataaatatctgagaaatgaactgagaaaaggagaaatccttacaggacatgaatggtacaggagaatagtacatatcaaagggtgaactctgggtcacagcttgtgggatcaggcaagaacatgtctagtcatagtctttcaaataatcttattaaaaattattttttctaagatccacttttactcttttctctgactaattttatttagctttcaagcatttctttgtggcttcagttttgacttcagtttttaaacaatttaaacaaataaaaattacattacagrattgttacttttaaactcttactttccacggggactgttattgtaaaatctgttcttattcttttaatttaactccattattttgttttaaatgtaatgattgttcattatatttttytccaactgctttaaaagcaccaatccttctttgctgtatatgtatcaaagtccataaatattctttgacattatcctagccttgaataataaaaggaaaaaaacctctcacaactttttattctacaaaataatattaaaatatgcccctatttttactgtaaatgtaatcttcacagcaacagtcaagagaacaagactgagtcattcttcatcacacattgcaagggctatgtctcctctgttgtgaggagaatattgccctgcagcaatattctcacaagtggagctctgggtcattgactgcacttttgctaataagaaatcttcagtaggagtgactgggccttgtgcaaatctctccagtagtttcttccactagtgacgcattagagcctcagaatcaatcactcaacaagtgtttactgaaagcttactgatacccagaccttaaactgttaccaaacagaatgccagatatgggatataattccagcctgaagagtttatgctcaagacaagacttacatatattacagagaagcgtaacagagcaaatgattaagttctaartttcactgtacaccctaaaaaaaaggagaaattgatatggaacatgartagtataggaaaatggtccttaggaaggccagacatgagagggtgagctctaggtgaccacctgtaggatcaggaaagaacatatctagtcctggagttaagatttctattttttctagatttatagaggtataattgacaattaaaaattgtgtatattctagatatgcatgaygatttaatatacatatacattgtgaaatgattaccacaaccaaattaattartatgtgtatcacctcacatagttatcactttgtgtgtgcgtgtttgtttatgcatggaggacatttaagatctgtgtttggaaaattccaaataaacagtacaatattattaactatagttactattctgtacattagatccctagaacttattcatcttataactgaaactgtgtaccctttgacccaaacctctcatttaccccaattcctggcaaccaccattcattccaccattctactctctgcttctatgagttcaactttttagattccacatgtgagtgagatcatactgtrtttgtttttctatgtgtggcttatctcacctagcacaatgcccttcaggcttatccatgtcattgcaaatagcaggatttccttctcttttatggctgaataatattcctctatctccctctctccctctctttctgtgtgtgtgtgtgtgtgtgtgtgtgtgtgtgtgkctgtgtgtctgtgtatgtgtgtatactatatttactttatccattcattcactgatggatacttaggccatttatttatcttgactgttgtgaatgatgctgctatgaacatgtggatgcagatatctccttgagatactgatatcaccttttaaaatatatagctagaaatgggattgctgggtcatattgtagtactattttcatttttkgaagaatctctatgcttaatgctgttttccatagyggctatgcctatttacattcccaccaaaagtgtagaagggtttctttttctctgtttcctcaccaacatgtgttatcttttgtcttttatataatagccatgctaataggtatgaggtgatatctcactgtggttttgatttgtatttccctgatgattaatgatgttgaacactttttaatatacctgttggccatttgtatgtctctttttggaaacatgtctattttttagatatgtttaggtcctttgtccattttgaaattggcttattttgtgttttcttgctattgagttgtatgaattccttatatattttgaatattaactcctgatcatatatatggtttgccaatatattatcccataccacaacttgcctttttattttgttgattgtatcctctgctgtagaagtttttagtttgctgcagttacacttctttgtttttgctttcattgcctgtgcttcgggtgtcgtaccccaaaaatcatgaccaagactgatggcaaggagccttttctttatatttattttagaagctttatggtttcaggtcatacatttcagtcttgaatccattttcagttgatttttgtatatggaataagataaacatccaaaatcattcttttgcatgtggatatctagtttccccaatacagtttattgaaaagactatttgttccccattgtgtagttttaatggcctagtcaaagattagttggccatatatttgtgggtttatttctgggctattccgtttcattggtctatatgtctgtttttatagcactatcacactgttttgattaccatggctttgtatatagtttgaaatcaggacccatggtgcttctggctttgtccttctttcttaagattgctttggatattttgggtcatttgtgatttcatatgaattttaattattaaaattctyattcttttttttagaactgttttttctacattttctttctttttttctttcttttttttctgaggtggaatttccctcttttcgctcaaggtggagtgcaatggtgcaatctcagctcactgcaacctccgtctcctgggttcaagtgattctcctgcctcagcctcctgagtagctgagattacaggtgcacaccaccatgcccagccaattttattttttgtatttcttagtagagatggggttttgctatgttggacaggctggtctcaaactcctgacctcaggtaatctgcccacctcagcctcccaaagtgctgggattacaggcataagccactacacccggccattttttctacattttctaaaaaattgccattgaaatgttgagtgactgcattgactctgtagatcattttgggtaatgtggacattttaacaatattagttcttccaattcatgaacacagaaagtctttccatttatttgtgttgtcttccatttctttcttcaatgtcttatagttttcagtgtacagatctttcacctccttggttaaatttattcgtatatatttcattatttttgacgctattgctttggtttcttattattattatactttgagttctagggtacttgtgcacaatgtgcaggtttgttacataggtatacatgtgccatgttggtttgccgcacccgtcaactcatcatttacattaggtatttatcctaatgctatccctcccccagccccacaccccccccaacagaccccaatgtgtaatgttcccctccctgtgtccatgtgttctcattgttcaactcccacttatgagtgagaacacacactgtttggttttctgtccttgtgatattttgctgagaatgttggtttccagcttcatccatgtccctgcaaaggacataaactcatcttttttatgactctgtagtattccatggtgtatatgtgccacattttctttatccagtctattattgatggacatttgggttggttccaagtctttgctattgtgaatagtgctgcagtaaacatacatgtacatgtgtctttatagtagcatgatttataatcctttgggtacttaattcttttttggataatttgttgttaatatagatgcacgactgattttcatatgttgatttcatatcctgcaactttattgaatttctttattagcttctaatagcactttagatggagtttagggtttccttcatataagatcatgtcatctgcaaacagagacaatttaccttcttcctttccaatttagatgaatgttatatctttttcttgccgaattgctctgactaggactcatagtactatgttgattgggagtggtaagactgggcacctgataaggttaggctttatgtccccacccaaatctcatcttcagttgtaaccctcatcatccccataatccccaaatgtcaaaggaaaccagatgaaggtaattgaatcatggaggccagtttccccgatgcttttcttgtgatagtgagtgagttctcatgagctctgatagttttataaggggctcttcccccttcgcttggcacttcttcttcctgctgccttgtgargaaggtaccttgcttccccttggccttctgccacggttgtaagcttcctgaggtctccscagccgtgctgaactgtgattcaattaaaactttttcctttataaatcacccagtttcgggcagttctttatagccttgtgaaaacgactaatacagcacccttatcttattcctaatctcagaaaagctttcaacttttcactattcagtatgacatcagctgtagacttgtcatatatgtcctttattatgttcagatacatttttctatacctaatttgttgggagcttttatcatgacaggatgttgaattttttcaaatgctttttctacatctgagatgataatatgatttttattctttattctgtgaaagtggtatacagtagtccccctttatgcatgggggatacattccaggacccccagagtatgtctgaaactgcagattgtactgacacctacatatagtatgctttttattctatgtatatacctatgaaaaagtttartttatgttaggcacagcaagagwttaacaacaatagagcaattataacaatwtactataataagagttatgtgaatgttgtctctctcactccccctcaaaatatcttattgtattatactcatctttctccttgtgatgatgtgagatgataaaaggccaccatgattagatgaaatatggtgaacgacataggcattgtaacataaagttaggttattattgattttctgatgatgcatcagaaggaagaccatctgctttgagcgacccttgattattgagctatgacaatgttgatggttggatgccaggtgcatatgatatcaatgtccaacaggtcggttgtgatacagtttggataccctagaaaaaggaatggttcatctcctgggtgggaggaaacaggacagtgtaagatttaatcctgctactcaaaatgcacaattcaaaacttatgaattgtttttctgaaattttccacttaatattttcagaccatgattgagtacaggtaactgaaaccatggaaagtgaaacaaagcataagtgagaatactatatcacatttatcgactcatgtatgttgaattatccatttattccaaggataaatccctcttaatcatggtgaatgttccttttgatatgccgttgaatttgatttgctagtatttttttgaggatttttatatctgtgttcttcagagatattggcctgtaattttctttatttgtagtgtccttatctgggttagcattgtataatagttacctcatataatgagattggaagtgttccctccaagtgtctggtcttgaacttttctttattgggagatttttttttctgatttattctccttactcattatcaggtactcattacccaaatttgttcagattttctatttcttcatcattcagtcttggtcgattctatgtgtctagcctttatcaacttcttgtaggttattgtatttattggtgtataattgttcatagcagtstctatgatccttttttatttctgttgcaatgtctcctctttartttataattttatttagttgaatcctcattccttttttcttagtttggctgaaggtttgtcaattttgtttatctttaaaaaaacaattcttacttatattgatcttttctattctctttctagtcacaatttcatttatttatgctctaatatgtattattcccttcccttttctatctttgtcttagttttttttttcctatttccttgaggtataaagttaagttgttcattttagatctttttttttaatataggcatttatcaatgtaaacttctctcttagaacgtcttttgctgcatcccagaagttttggtgtgttgtattgttattttcatttgtctcaagatacttttgatttctctttggatttcttctttgacccattggtcattttggagtgtgttgcttactttccatatatctgtgctgggattaatatttctgactttttagccaggctgcctgtattctaattacaacttcaccacttacaaggtatttagctttaggtaagccatttaaactctcagtgcctcagtccccttatctgtaaaaatgagtaatacagtgatattaataataataatgagagtatctacctccctgactgattgtgaagatgaaatgaaatagtcagtagaaagtagttagaatagttcacagcatacagtatttattatttttatgattaactaatgttttatgaggtccttagagtgctagacactgtttgcatgaattattttatatgayctcaccacaaccttataaaaaagtttttattgtccgatgttttagacrgcgtagttataggagttagtttcagccaccagttgtatatagagaagctgctaggcaaacataagatttttttaaatctagcacaaggacctgaactttaccacatctgtctcccctgttgactatcaattcaatgcctaggtcccatgagggaagggtcaaagcatttgatgttaaaatgtacttctcagaggatgtccttcggagaagtattctttctcttacttatgttttgttaatttttgcttggttttgattgtagacatcagtttgtaatcagaaatgaagggaaggtcctgggagtaccaacatttaagagtgaccaaaagaatggaagccagcaaaagggatagaattctatcatcttgactcccaaacctactccatgttgatagtcttaatcttagttaatgatccctgctgcttgatccaaaaacctaacaatgacttcactcatttccctccttctgcactgttgttacctcttcagggacaaaatttcaatactttccacttagactttcactactgacttctaactcatctttttgctttctcttatttggaacagttattcagcttaccctaagtccagagtgaatttccaaaaaatcaaaggttctscaacttttcatttctcttcaattccaactcagkttcacacgtttatcacctagtgtagaagggctttcctccacagttttgcttggcaaactccttttcatccttcaagactcaacaaaattgttgccttttcatgaaaaaggatactcttccatccttctgatattaataattttttgttcttgtgtccatgatagactttgtcataatgtattacagtttatcctggaggaaagcaccacaagaccaagagtttcctttttttttttcatcccaatgcttgatacatagtagccatttgataagtacatgttgaatgaaagcatgaatttataacatatataccttcacytgacttggagtttcataaggaatgcaacagcttccaattcatttactttctttttgcttaacaaagtatctgacacrtagtacaaaagttaaatattataaataaaagattaattgcacagatatttttaaaggagacagaaaagatttgaatatccaggaattccacccaacgatgaaagacctataggcggttacaagtaggtaagcagagtccaaaatgtagggtcattttcaatggcagagaggaataggagagtcaataagaagcaaatgctcaaggagcttgagtagagackggaataggcatctctttattatcttattggctgatttatacttcttgtaaaataattagcttaagctaattatctaagaaacaagaatctctcctaggcagattcagttgcctttcctggttctccctgagtgctctgagtaagccccaccattgccttctagaaaaactttctttcttctttcttgcccactcccatctgatcccttcacggcatccagaatgatgatccaaaagtttgggtccaaatgtgatgcaaaagtttacagtggtctaccatggttcctttacaaaaaaagaccaaaaatgttctgccattcttgctcatcatgattttgcctcagtttttcaagttatgttttgttcataatggatttttttttgtttgttttctgaatgtgttctgttccttctactgccttaaaaagccctcatcactgagtcttcctactacttccctcacctccacttaccctactgaattttcaaactgcaagtcaaatattacttccttaggggaatctcatcagactgtctccctagaccaccacaccccacccaacaactagatcacatccctttattaggggtactatgttttcagtataattgcaattataattattgacccattgaatgagttgattcatgtcccttccttctttattataagctttaagagggcaaaaactatttctgtttttcttaccatctttccctctttagtgcttccacattgtctggtacattgcagacatctaataaatatttgtcggaaggaataaatattagtgagagaataaatgggtaatgcattcatgagtgaataaagattatatcatatttttgtggtaaatattttgtttaccttcaatgactgaaacaaagagttccatatcctgaaatatgacctgaaagccatggaatgaaaggtttgataaagctggacgtggtagctcacacctgtgatcccagcatttctagagaccagggtgagagaatcgcttgagctcagaagttcaaggccagcctgggtagcacaataccttgtctctacaaaaaaagaaacaaaattagttgagcatggtagtacacacctgtagtcccacctactccaaaggctgaagtgggaggattgcatgagcccaggagttccaggctgcagcgtgctgagatcatgccactgtgctccaggctgggtgacagagcaagagcctgtcccccccaaaatttttttaaataagaaagttttaataagcagaatattagtttaattatgaatgagaagagatgtatagcatttgtaggggtacagaaccatgyattccataaaggaagaagttaagagcaatgatgtggaataagcatggggcttttaagaacttgtctgaaaagaggatattctttggtcaatagttgaaaaaataaaataaggcttgctggagtggagcaagtcaatggaaagccttcacagttaggtggagcatttacactaaatgactttatttcgaacattcaacaaacactgactgattgtctattggttacccgccatataatgttaggtgctggggaaatagaagtaagtagaatgaggtgggggaggttcactgtggctcttggaaaggaaaatacataatcaaagtttgtgttagaagggtcaatctgaaggcttttgaaaaatggatctgggatagggaggatgtttgttgaatgaatgaatcaatcaatccaattaattcaataaactaatcatgattttagtgagtattctatgaaccctcacttagtttgattaccttgactgtgacatttaactttgtatttcactacttctttgcttctcttacattcagttaaaaatatttttaaaatacaattttcaaggttcagaaacaaaaaaaataaatgacattctggaaaaaatagatgtgctcagaactaaaaaataaaaataatggagatggtaaatatataagtgagaaatatgatgatgattttcattaacaagatacaccattaaatatattctcacgtgatccaaagtaatttcgttctctgtgcccagcgagttggtatctactgatggtggtttttcaaatgcaccgtgcagttagacgtcatcactgagacctcaataatagacctccatcactgagaagttcagaggtagaagatgcagggggacaatgttggcctgcattaatcttagcttgaaaagaggatctttagataacactatctaaatttagctgtgttcaaaatgctccaccacagaagagcagcaaaaagcaatctcattaaaacaagctcagaaaacaattccaagatatatgagtaaaagcaaactaaacaacggaagcacaaatagtatgaccttctcttgacttctacttgcacagctctacttattcaagctctgtttcggacattaagcttttttcatagccataactttcgtgttttttccatcatcctgtctattatatttccccttttatcttttattgagttcttttaggagaaacttgaaaaaaaaatctctataaatggaggttttttactcaagagcttttaaaataacagtacatcaccagatcatttttaaaaagtgttctattgtagttaagtgaatatttattgaaatttttctcgtcttcccattgaagactacagaaatctctttcttccagttgagctcaaaaggaaaagcaaaaaaagatggacagaagccagaaatgctgaataaattagtatcctttttatttactttttaaaaactatgaattggctcatttaaatagattctaaaagtatttgtatgtgggtctgaacactgttgtcatggagattaaaacatttttgttgttgttgtgtacagtggagatggcagttttcttctagttgatgcttctgtagaataaaaaaaaaagtttagctgagaaaggtaggtcttaatggaattgttaatatgtagtcttattttggatgacattttaaaatcacttacgtatttaatctgtggattgtagagcatgctgggaagttatcaattccattggtacctgcctcagttgcagttcagccttaagtacttaccaaagggagctcatttggggtggcaggggtaaccgaaaagtgtgggagctgaggtattgtttgagagcctgtgggcagtgtgactgctccaatcgtagtytcagtgaggaagagcaccatctgtgcaagattttctcagatgtcctctataagactttcattgtcatcagttctatgtgctctcaaatcattgctttttcttctttattttgcacataagctataagctattttttaagacatataggttttatttctgtgtgatcaaaaactatgtctcgggcaacttctactttttggaattaacaattattttctttgtggtcttgtgtgtgtgtgtatatatataaacacatacgcacaagaagactgtctctctgtttgtatatatacatacacgcacatataaatacacagagagagtgtgtgtgtatatatacacmgagagagagagagagagagagagagagagtcagtcttgctctgttaaccagctggggtgctgtggtgcaattatggctcactggagcctccacctcccagactcaagcaattctcatgcctcagccttctgagtggctgggactcccagcattcaccaccacacccagttagttattgtactttttttttttttgaagagacagggttttgctgtgttgcccaagctgatcttgaactcctggacctccagcaattctcctggcttggcttctcaatatgctgaaattataggcgtaagccaccttgcctgaccatcgtccatatatttttgaaaatgacctaggaacaatgagactttttgaagttttttccgtttgctaacttatcagagaaaactagtggaaataatatcaaaaagaaatcatcaaatgctacccatggataatgtacaagaaaactcagcaaaattatttggcacagatgaagaagacaagaaaaatgtctgctttgtgagaataccatagtaggtccttcagacaggaggtactttattaagaaggagcaattctcattaataaagatttagagagatcacttataagatgtatttatggcagcaagctcatttggtacatgtatgtatgagggaatcaagatctgaaaagattttcatcggttagagtgatacgtctgttatgatrcaattaattgtgatatactgtctactggagatttgttctccaaaacctgacaatctartactttgtaggaactaatgtgtataatcttagggggcttagtggacagaaagttcattagccrttggtactgtgataggggaaaaagcaaatgggaccttaaacaatatgaatagacatggtttctcaaagaatagtctatggttcacctgagcacacatcacaaaggatgctgacaatgcacagttaaggtaccccacctagattaaatgaattaattttggacttgggtttagatatttacatttttatcaggacttcttatgttcaccccaaagtttgcaaaatgctcatctaaaataagaaagatgataggcctgatccatcttctgtttactaggttaaatctggaaaatataaacctcaggtgccagacttcagaggsatatagaaaaacaattactttttgcattagtccattcttgcattgctaaaatcctaaagactggataatttctaaagaaaagatgattaaggcgggatgcagtggctcacgcctgtaatcccaggattttgggaggccgaggtgagcagaccacgatgtcaggagttcaagaccagcctggccaacatggtgaaacctcgtctctgctaaaagtagaaaaaaaaaaaaaagaagaaagaaagaaaagacgattaagtggttctagattctacaggctgtacaggaagcacaacagcatctgcctctggggaggcctcaggaagcttccaatcatggcagaaggttaaggaggagcaggcatgccacactgcataaacaggagcaagagagagtgggaaggtgctacatactttaaaatgacctcatgagaactcactgtcatgaggacagttccaagggggatggtgctaaaccacttatgagaaatcagcccctattctccaatcatctcccaccaggcccytcccctaacattggagattacatttcaatacgagatttgggtaggatcacacatcctatatcacttttggagaaagartggaggtagctctgaaggtttgttacatcacagcatttgaggaatggctggggtgatggcaaatatcatacagaagagcaggcgtagacaagatataccagttgttttcaaatatctgagaaaatatcagtaagaagaagtatagtcatgagtgtgcctcacttgcctaaacattttgattaaaaatgcattttagtagatttaattatgcctttttcctctggtgaccatctgttaaaaatttttaaaaccttgacctatgaaaaaatttgtcagtaagatgcatttgttgtaccaaacttctcagttctggactttttaatcagtgtagttgccatcggactcacccaccagcttgcctgctaatccatctgatctgtgtcactcaaatacagcaggcagtgaagaacagctgctttttcttatttcattctccttctatctgtcataaaatccaggtaccaataactagggataagtgttttaccaagagcagttatttcaatagcttgaacttaaataccagattaattttcacagaataaaaataatgtttagtataagttttaataatggcatgtagatgaaatatttggacttggtgacttttaagttgtggttgctttttaaatgacttctctgtttgaggactttgtgtatacacatttcctatcacatttgtggtaggaagattctaagatgaccctcaagattcacaacctctggggtacacatcctatatgatcccctcctgttgagtgtgattggagcctgtgaatatgatgggacatcattcccatgattaggtaacattttacaacaaagtagaagatataattcggatataactcaggtggctaaattagttttcttcaagctactcaaaaggaagattattctgagggcacccaacttaatcaagtgaactcctaaaagagtgtctagttctcagagagcttttcctgctcttgaagaagcaaataatcatgtgagaaggccacacagcaagaggcttaggaggcctctagaagctgagagcagcactggattgataatcagcaagaaagcacagctgagctaacatggagactgcagcctctctaggtcgacaggaactkattatcaatgaatgttgttttaagtcactacgtttgtgataatttattatacagtaataaaaaccaaatacaaaagattaaaaagaaatctaagttgaagatatcttaaaccgaattgcatttaatacacctaacctactgaacatcatagtttagcctagcctacctttaacatactcagaacactcacattagcccacagttggacaaaattacctggcaacacagtacactgtggaatattgttggttcaccctcatgaacatgtggtggactgggatcctcagcttgctgcccctgcccagcatcacagagagaaatgtgcttcatatcactagcctggaaaaatatcaaaattcaaaatttgaagtatgatttatattgactatgtattgctttggcactatcacaaaatcgaaaaatacsaagttcaaccrtcataaattgatgactatctgtaccaccaaatagcccattactcaaatcctcaactttttctcttcaatgtatgtgacctctatttatatagtcaatacttcttgatttgaaaaaggattggatgataatagaagtgaaaagtttgaatgattatactcatttttctttttctttatctataaaccagcgcccagttggaacatttccatattttagttctaaggttgtaaattgctgaaagtttaggttttcttattgatgattctctgctaacatttgataagtaggtcccattgaatatcacaattaatctatttaagaaggttgagagatatactgttaaaccaaagggaaaatggtaaatgaaattacaatttatatttttcccctaattcatgggcattgaatattaacttagtggtctgcacttgtagcttgttaattgtttgacatctagctgaaaagtaaagtgttatatcacagatagcttttctaattgcaaacacatcaccctgtttattcattggttcactaagccttaattaggtatctatcctgtaccaaatggtatgccaggggtgaggatacaaagatagaatagaactttttagtacaatgtgaagaaagaaacataaagaaataagactgctgragtattttaactaccaggtttgcacgttgacttctttatgcttcatttggattttctgaggctttaacgttttccgtttttaagactaagctcaagggtcaactcttycatgaaaattaattgctatttatgtttccatctataagaagagtgaaataaacaatgaaatctaatgacactgaaaagtgctttcaatgtactgttgagtgggaaaagccacatttttaacttgtatattcagtgtgatcccaattttataattttactctcaatccatatatgtgaatataatacataggaaagaggttggaagtaattcaatcatgaggttaacaagttttatctcagatgagattgtgtgtgatttttaaaaattatatttattctacctaataagcatttattacttttataacctgagagataaacattattgaaaaagaagakcatggatttaaagcgaggatgtgagactgtggctgttacatatttttttggtttggaccttggttaagaaggcaaagagggatagagattgtgggacatagagggagacgcaggcctgaggacagttacagtgttataaagggagaggcttaagtatcattataatatgagcagaaattgcaaagagtgagaagctaaaatggaagggagacgataaatagctcagcaaggtttttagggaagcagaaatgactcagatttgaaatataggtgacagaattagccytaaggaggagaaagaaaagatcttttgagactataagaaaggaggtgagagttgatgtagccataaaaaatacagagatgaaagggtggggagttaaaagagcctgtgtatgtagcctaaattcttgctatgaactagaaagccaggtcattagccgaaattgacaatgggataggggtggtcttggggaggttaaggctagaaaaatccaagcaaagcaggtaacaagaggacttgattccagactgtgaacagatttgaggcagggtcagaaagccaccctgaaatttcagtgctataaamctgtagtgggaactctataggaatactaatttctcccttcatcaacaaagatattatactggtcctgtgaagaggcttagtcacttcccagtttatgtatttcaagattatattcctaaaacacagaagtttttcagtttgttccctaacctgaccccagtctacctgtttccatccaagactatcactaccacttctaaaccacctccagccacacaaaaaacacacactatgcttgagtcattccaaattacacaccttcctctaaayattagtgtgaaattaggacatttgggaaatgtgattgatatgatttgcatgtttgcccccttcaaatcgcatgttgaaatggtattcccagtattggacgtggggactggtgggaggtgattggatcatggggacagatccctcatgaatggtgtagcaccatycccttggtgataagtgagttctcccttagttcccatgagatctggttgtttaaaagaaattgggatctccccctgctctctcttgctcccactccctccatgtgacatgtgtgctccagctttatcttctgccatgactggaagcttcctgaggccctcaccagaatcagatgtctgcaccatggttcctgtacagcctgcagaacagagaaccaattaaatatcttttctttataaattacccagcctcagatgtttcttaaaarcagtgcaaaaaatggcttaacactgtgatatttggtattttctagtccattagtgcacatccccccgatgtaggataaatatggtatgaatatttgaatatttttatgagtaataattaagcttattgaattatcacaactccagtgagataagtctaattttaatatcattagaaaggtgaagaagacaagaccagcgagggctactaatttctcaaggacacgctcatcctcatgtgagagctggaactcaaaaccagaccttgactttgtcaaaatgcacttttggttcccaatctgatattaggtgcagattcttctcttctttaaccaagggccaaataatacagccacccaccccaccctgccccagctctccttttagaaccaaactgttgctctctcactttagtgaggtggaaggaagactatttcaaattgactgatgaattaaccctatcgaaggtcagaaaaatgttagataacttaagggggaaaaaaagaaaataaatatcaaaatgtggaaatgtttgaaaaagaaagacaagaaggataggggaaaatagagaagaatagagagagaaaggaagaaagaaaggaggagagaagggaaggaaggagaatgtttgatgagcttatgaaggatgtctctttgcaactgagtgtgaatttagatgggattacataacatgaaacaaaatgaaaagaagaaaaaacagatacattcagtgatttaaaaatggggtaattctttctgtttttatttcacaagtcttttgtaacttattttagagttttaaaactttgtakacatatttaaaatgttcaattttcactaaaacaatcacatttttaaacataagggcatatatttggtgtgacaacctaacatttgccaccaagtgttaaagatgaaccagttttaattttaactagacgatttgaaacttttttgatatacttgagaatttgggactaccaaaaaacccctaaatatgatcctttatattttttattacttctaaaatattttgattctaaacaaatatatgtaaatactatgtggagaatttagatactaaaaatttaagtcaaatattgtttaagtacttacaatatgcccgggactgtacatgatgctaaaagtagccagatgcaatggttactgacttcgagtggcatctttttgaaacagagggcagaaatgaataaatctgagataacatgatgtgagcttgttccatactggagaatggggcactcagagaaaagagtgtgtgcaactgcaggtggggagaagctttgggtttggcactccaggaagatatgttcaaagcagaagggtaaagggcactgattgttcaagaaaagtgagtagtctggaaagggtcattatttcagaagcaacataccaagaaggaggcaggaaaagagaagacaaaacagcagcatggaagatgggtgaggagccaggccacgtgggtagaacttgagtatcataatatttctccatctaaattctactaggactagaagtcttatggacattttatttactctacaaagtgcccacgtcagtgacagataaagagtcaacatctgggagtagcttaggtgggttccacatggcccaggattgaacctctttctctcccttcttagctgtttgacctcagtcaagttatgtcacctctcatgcctctgttttcttgtctgtaaattgggaataataaggtaataataagtattgtgaggattatatatacatgtatataataatacatcatatataacattaatatttattaacacacatatataatctgcacatatgtttattatgtatgcccatatatatattacattatatattcatgtatacatatacatgtaaggtgcttaacagagtccctggtaccaaataagcactgaatcaacattaactattattatttggtttatctgaaacattcaaatggtatagcactaaggccatgtaaaaatatcatgtatttcaattattgaaactttttcacatttttgggtatccaggatagagaaggggaggaaggatctagtcacataatatttgagagtcagcaaattctttcaacaataatgtgattgtatttgtctgtgtgaggtttctatgatggtcattttcatggagccagtcaagcattgactttgaaattaggcagatatgaatttgaaaagtagttttccctccactagccgtttgaccttgtacaagtgactttaactcattttttattattaaaaaaatagggattttttctttgtaagatttttcaagaggattcaatgtggtaacaggtataagtgcctgttagagggcctgtcatagataaatcctcaatgaagggtaactgttactaaaaggaagatataaggagagatatgacactacttccaaataaaaaccctggttcaatattggagcatggggaccccctttaagagaagcatcctcccagcataatgtccaaaatgaaaatatttcatttgtaagcataagaaaggggtcattttaagtgaaatgaccgacttatcaagccagtccactgaactgtagcttggagtctgagttacaaagtaatctatagtgatctgagggagtaatacaaactccaagttaatgactgtagaataaattctactgatatttgcagtctagtgtcatcaaggctaattctcctttaaagaggcaaaagcttcttattgtccccaaaactgttgatatagtatgtaactcagcatgtcacagaaatgttgtttatccactttggctattttgtttaaaaaaaacttttctaccctttttatttatttatttttaaatttctatatttcataagtaaaccaagcctcaacactcggcatttcaggccaggtatggtggctcacacaggtgtgtggtaatcacagcactttgggaggcttgtgcaggaggatcgcttgaggccaggagttcgaggctaacctgtgcaacatggggagaccctgcctctagagaaaatgaaaaataattaggcaggcatagtggcacatgtctgtagtccctgatactcgagaggctgaggtgggagaattgcttgagtccaggagtttgaggctgcagtgagccatgatcttgccactgtgctccagcctgggcaatggagcaagaccctgtcttgaaaaaagaaaacaaaaacaaaccatttcaaattcaaacatatttttctgaattaaaaaagaaaaaatactctctttaagtatatgaaaaagcaaatatctttcctagagtatattacattttaacagctcttgaaaattcagttaagtggtctagtgcttgtggtaatctggatgttagctaacaagaataaaaattaattccatacgttatcaacagcaaagaattttggagcagctaccataaataagaaactgctttagatgctggagatctaaatttggtaagatataatttcagccctcaaggatctagtttgttaagaaacataggcatcataacaaataaatgttcttgaattcaaaaaaaattaaagcttgattgttcagaaagcaatttcatctayatttaggagatgtttacaggtgttatattttataatgcagatctgagttcactttttgtacaagtagaagagtcacacttttatattaatagtgataatattattaacactgttggatttcttccatgtactgtcctagatattttacttattcctagaattttatagaataggtcattttgcttatgttagccttcagttgcaggtgatagaaatccaaattgagcatctattgacacctctattgatctgtccagggaagtacagaggagacctgccttagccatctgttgaccagaggaccaatcacatcaacaggactctcccctctctcttctaagctttcctctttgttgtctttattttcactagggttttctctgtaaggtgcctaaaatggctactagtagctacaggtttaggacctggtcyttagcagtttaaatcggaggaggaaaaatacctcctgttcttaaagtccctattaatctctgttggccttgcatgggtgatgggcccaaccatgtaggaacacagggcagcttaggtcacatttccataaatatcagagaagtggtattgcctgatatgtatttcatagctagcaaatgacaactggaattgaagtccatgcttcttccgagtgatcactgtccctctaattgagtacctttcaattgaacctgtttcctggcgttactttaattttgtgtgaaaaactatcttcttgattttaagtaaaagcaatgaaaaaaggccctctaacattttctgctcacaaaaaaattagctttacagatagtagacttcatcagtagatacagtctttaaggaagaaaaacatagtttgtataaaatattactataccctttactatgtaatgtctcctggattctataataattggtgggctgtgtggtctgcttgccatcttccaagatgtgccccttattgaaaaaacaaaaacaaaacctatgtctgtagtatgtatatttgtgcatttaaatgtttgtgcccatggacttgtgtgtgtgtgtgtgtgtgtgtgtgtkaatgtatgtctatatatatatgtatggtgtttgtgtgagaggcaaagagaagagaaaaaagaatgacgttagcttatcaatatattataataaaattgtgttgactagtttctttatcgttctcttccaaactgataaaaggacaatttttggtgtgcggtttaaaagaaatgaacttttccccctatactgagggcaattttaaaagaaggtagtttctcaggtgtttctagtcaaaatgacaaacctacaaagtacatttgcattattttatgtatactttaytgatagwgtcctttaaatgttgagttcaagctaatttttcttaatcttcaaaaagtttagggatcaaattgtatcctgcagatttttgttatgctaaatttcatttcatctcttcttctttagttctacagagaagttaggtcaagattgtttgaaagtagacttgagtccagaaacttgtctcttcgaccagtggattatctaccaatttgaaaaaatatagcatgcatgtggaagaaaatgttacttttgcatgtcagcatgttgtcattattattagaagaacacatctttcaaagaaaggaaacataaactccataatgctgtctgatattattcttgaagatggctatcattttagctgttataaaacaggaaggaacatcatggagcattagattataatatctatagtcccactagcacaccattaaataaagtgaaggtatgaatatttaaattagaatttgttttttatactatattatgtcaggaagaaattgcaagctctggaaattctttgtgtcttaggaaaatgagattctattttttatagctctttaaaaaaaatacctgcatcagcagacaattggtaacagtcatcatatttggtgttatttagcatttctcaaaaacatggcagttgtttttatgtgggtgtggcatgttggcatttttacattatcgattccttgattcaatttctactctgtgctgacctgtcatatgggataaatctaactacagcaaagctctgttattcttcagtatagtacaacagataagtaagccagatataatacatttgggtgaaaaaactacaaaatcatagagggggatctttttaagagcttttaaaacaatcttttggtttaaggcagagaagtattctacaatgaaacactagattgcataagataagcctgtgcctgttccaacttaattttctttgttactctaagaactccccatatatatgtaaatttcagcagtgttaatgggctttctttggtatgtcagaagaagaatgtaatttgtgaactagataaatctataaggcacaggtgtgagcaaaaaaaaaaataataagaatcactcctcacaaggaaatactaaataacaattattattgagatgtttcatgcattttttttatccatagtagtaagtactactatctctataaagaggaaaaattcaatccaacagtcattaaagttgttctattaaatgtagtgataaatcttcagtttgtatttttaatataagatctgagggataatcaaagcaaaggcttatgtggatagggcatttattacataccaggaaatgtcctgaactctttacacatgattcattaattttctgaattacacttgtagataggaactattgttatcctcattttatagacaaagacacagagatagaggttaagtatctttactggggccacacagctaggaattggcagaaccaggatttaggcactaaaatctgtttatttaaccactagcctacatggccattggaaatgaattatacagagatgaaaagttttcgttatagattccctcgttgaaactcaaaaacagaaggcaaaatatgtaaaagaactcaaaactgagaatatttttaaaaatagaataaaatgtcatagaaaaaaatcacatttaagagtttctttcttctattacttttaccattgcagttatgggcgtttggatacagtttgggtttaataaaacccccaagtttggtttttattaaaataagtcaatctatcattggtcaatacatcacatttatctctcttttctagtagtgtcaaatctgaggagcaaatatatagctactatacaaaaatcaaagatttaaaagttttagcattgcattgagctattaatcattgtaaaaacattttaaatgcctccattttttagatgatagctacacattaaagatggggtgtaggtagggtggttgatcagtgtatctaaatagactatagtatgcaaaaacattcagtaaaaaatgttccttgagcaagaagaaaaaataaagacagctgatcaaaacacatgaatttatatgactcagtaattcttacattatcataaatttcgctaccacttttatgaaagcaattcacacaattcacaatgtgaggagcaattaccatcaaagatacataataatatgccatgtggtatatggagccacaggatgaagatggcaggttttcttgggccatcaattttactcaagggcattttaaaataatattttaatattaaaggaagcatatgatactgtagaataaaatttatttgaatttttaaaatctccaacctgactcttctgtgaaatttcagagctgtggctgttaaattggaactatgccaccagaccctggggtatgtctatttattcttctctgcctttagggaatttttttaaaaagttcaagaagccgtgagataatgcagccttcatagttattctgtttgtagattggtagtaaatttttgatacttattatgaatccaagagtggaggtgaaacatagcactggatatttttatatgtgttggtctatgtcaatcaaataggagagataaaatgatagtcttgttagtgaaagaaaatagggacaattaatgtataataaacttaaagttacatgatatgacagcatagaattaaaaatatgtctgtctagtaatttttttctccttcgcaattattgctttcttcataggcttttcctattgttctctgtcaagacactgcagtctgttttaatcattatcatctactgcttctattttacttgttatgtcatacaaattcatgtttggttctccactaatactgtttcaagaggtcacgaagaaggtattttttttttaaaggaacaccaaaatcgaatgatggtatgatggattttatgtgtgactgagcttgtgtggagtgaagaaaaattcaaaataaattcctctctgagacacactgcatggaaatatcaaagcagtgcaattctttcataaattaaaggttatactctcattctgttttgggtccatccagaagatgataatgtttcgagagcagcagtttctcaggacactcttctgtgtttcactatggtaccaagaaatttgccagggaaagaaatgatttgcctttattctgtcaatattatcaaattaagaatgtttttccaaaaattcttttaaattattgagtgtttattatgagtatttatgatgtgcaaggtgctaggctaattgctggttgtatataaaggtatttggactccagtactattctatttttattttgtagtctgtgtgaatttataaaccactaaatcttacaggtttaatactcaaaactcctcttgtcttcaatatacctaccatagactgtaagggattatttcgagtagtcagttggggtttgatatggtgttaattctttatgcatttacatcattctatcaatttcaagtgtgttcttttattctttttcttttttctttaatttttccaggctgaaatagttatcttttaaagtctgttctacagcagctgctccaccccagtcattgcctttagctttctctagattgccattaggccttcttgaagtcgtgcttattacagatatgtgaggagtgctttttttagggggggaaggggagaaacagatgtagaataatccttttttgttgttgtttttaacacccttttctatgatggccagtgtttcactgatcttgttggctgtctccgtggctggatgagttgtctcgaagagcagtttacactcagtagtgaccaggtccttgagagctcttagctcatcatcctttaagtatagtttggagtattcttcccaggctgtactacttcatgcatttttttttttttttttttttttgcctattgtatttagagtttttcctgaaatgaatttctcactatgtatttgactatcaagaagagttgtatcatctgcaagtttgaggtttcacttgaaaatcctattagcccatacagggaataattcattccagtaggttcttaatagcccttccctgttccctgtttctaatccatttattgctctttaaagattaccatgtactcctttttcttattataaaatattgcatattcatattaaaatctggaaaattcatagaagcagmaataagtaatctaatgaatcaaaaacaatgtcaagtagtgtttcttaatcattacaattatttatgaattttggttttaatttttcaacatttggtctacttgatgtgtggcacacattgttctatgaaatccaaacagtgttattgtaaagtctctgggcttcttagagcaaaagttttaaaaccatcatttatatgtttaatatatttttatctatttctagatttrttttaaaggcagtaaaataatmtaacaggctcctgggtacccatggtgtttattatattatgaagaaataaaatattactcatacagtcgaaaccctacaattaaattcctttccctcccttcagagggaacctattataatgtgtgatttgtgatcatgaatgatttcaactagtttttctgatatttatatttattctgcaccttcaccctcatcatcatccttacaataggctttatcttttggaaatacatataatattgatgtgctctggttttaatcatcacctgcctcttgcctcagcaagctctaggttrtattttaaaggagattaaatatattttcactgaatttaattgtatctaagtaatacctttcgaagagtcaaatratacagaaaagctcataacaaaaagttgcaattcttccatccctccttcactctcagagacatgactgatctatctcagctgtttcttctagcatttacccccggatttaaaaataatatatttaaacaactataacttaatttaaacattttagacattatctcttcctttcctagtatggaagacaaagattgagcactctcatctraccctcacacatttctgcctacatcctgcaacatatacttaaaataaatatwtaatgctaacattgttaaaaccatataaatattactcacagctgagctctgtggtgcactgtgtctctcttttcttttttgtacatcgttgcctggcattaataattgctttgttttgaaaaattagtcttagtttactacatacattttactaattttaaactacactttctgacagaattattaaactcccttcagtatgtttcatcacatttggaaatctattaattgatgatttttgttattatttgtgtttcattgttaagaaaaccatcctgatgcttttctctcccacatttttgtagcttccttagaaagagtgaagaaaaggtaaatgtttttaataaattatgtgtctgaagatgccttaattcccccctcttttagatatcagctggctctagaattctaggtagaaagcatctcttctcagaattttgaagatattgcttcatggctctcaattcttcactcaccttactctatgaaccccagggtctttacatcccttgaggactgaagtgtgtttccacttcaggtgctttgcactggctggtcttctatctggaatgcttctccccaagatatcttctggctaactctcttttcttcttagaaaactgctaagatttaccattcccaatgagccgcctcttgtccttttatttatttttgcaaactgcccctgcccactgccattcctggtctccctaaacaagtcttagtatttcttccctttctcttttcatgttgaaatacactatatagtttacttatgtattaggtaaactttttattgcctctctctgtactccccaagctacttcttgacccttgaaaaaatgtagattccatgatcgtataaaatttttattactttaaaaacttttctaaattaataaattataaaaaattaatatattcaaagcaactagatgtatgcctaaacacctagaaaagtgcctggcgcatgttagaaattagaaagtatttcttatgaacagttttatgatttttcacattgaagttgaagagtcttgccaatttcccctatcttatatatgtgatcagatttttgcctctgtaaacttttaggattttatcttgaccccaaatgttctgtagtttgatcacaatatgacctgtgctatgaattttttgacccgggaaattcatacacctaacttaaggattttaatttttcattattaattatttaacaatgtgttatttatctatggaactcttctttgttagatattgaatttcatggattaatcccctagctttttgtctttggtttattttgattactctttttttttttttccttttttttttttgagacaaagtctcgctcttgtcccccaggctggagtgcaatggcatgatcttggctcactgcagcctctgcctcccaggttccagcgattctccggccttggccccaccccscccccgccgacccccatgagtagctgggatttcaggtgcctgccaccaaacccggctaatttttgtatttttagtagagatggggtttcaccatgtgggccaggctggtctggaacgcctgacctcgggtgatccacccgcctggtcctcccaaagtgctgggattacaggcgtgagccaccacgcccagccgatttctcttttcttttatttccttttctttatattctattgtttcccctggggagacctcctcacctttatcttacaacattttaaatattaccataatttaataattcttttgtgctttgagtagtcttttaaaaattaatatctcatcctgttcttgttttgtgcatgccatatgttttgctagttctccgagaatattgactcatttttgaagtttttaatattatttttgcctttgtttcctctgttttgttttctttcatgggagatacaaaatttctgggaaaattttgctgtccaataatgtttagctgagacactaaaattgttaaatctctgtatgtcacgaaagcatgttaactcaaatatgaacaaggtatcatttcattggaagactcccaaatatcctctcggtaggctatttttatggacaggtattttccaatctttgtctgctagcatttttgttgagaacggagtatgagctaaggatgagaataatcacactctacaatatgtagattttcactttttcatttttagtatgaattcttatcctcacccctcatccttcactgcatggtaattggacactttcttattaaatttccctagagaattgtattagggttctgtagagggacagaactaatatgatatatatatatatatatatatatatatatatatatatatatatatatattagtttattaagtattaacttatacgactgcatatatatacatatatatatgtatatatcatgggagtttattaagtgttaacttactcgatcacaaggtcccacaataggctgtctgcaagctgaggagcaaggagagccagtctgggtcccaaaactgaagaacttggagtctgatgtttgaggacaggaagcatccagcaagggagaaagatgtagactgggaggctatgccagtctctccttttcacattttctgcctgctttatatttgctggcggctgattagattgtgcccaccagattaagggtgggtctgcctttcccagcccactgactcaaatgttaatttcctttggcaacaccctcacagatacacccacgatcaatactttgtattcttcaatccaatcaagttgacacttgtattaaccatcacaagaataaattcccagtggtctcttgccaggtcagcaatgggatagtaacgaggtttatagggttggcagggggatctggatacctaactaagattttgcagcctcaacacttactctagccttgtaaattatttggtacttaaaatttcagagacattctggggatcagcagctcaaataacacttcttgctgtggtttgctcctccccttggcagacacatcctatccccagcttcctctgctctgggctagtaccactcactccatccactttccttccatcctatattaatttgttgacacttcttttctgatgtcatcctctggaccatatatatatatatatatatatatatatatatatatatatatatatatatatacacacatacacacacacatacacatatttatgacttaactcttattttagaagatttgtaggttataatagcatttaagtgtgtgtgttcatggtcaggtttaaccaaagtcctaggcctgagtatttcaatgtgaagaacaaacagaatatgatattactttcatacctctatttttgatagtctgtgattctgagccctatctatgctttcagtcaaattaccaatggtatgaaactctttaattttgtgtgtctcacgtttagagggtrgcttaagaggttctttaactgcatgactattgtgaggaggatacttatgagttgttcttcatttccatggggacaaggacaatgaaaatacagtataatacattcagagtgttattagaagttaggtagtaccttttaattgttaaacaataaagtaataacattgctcattaggcatgtgcttatgaagacaaaaaggcctgatttactgatttagtgatttagtccaaggctttgacatccatatgatgtggacctctgggtactaaagaagtctataaatcccaatcacaactgtgattaattacaaatatcttatgcatgtatttctttagctaaagacagaggtagaatcaaataaaaattactccaagtttactggctctatttctcttcatttgaaaacagaattttctcaaaaggcaaaggaaaagtttgtcatccacatctcttattaatgaaagtgtaacaatcatatactcacatttctccttctgaataaaacaaactactgatgagagataaagataattatttttagtacctctgttgtcttttaaatattccttttttggaaaagcaaaacaagacatgattatattgggagaagaatggtgacccaagaactagatggccttcttctggtacggttctttcactatctggtgtatctctgaagtgtgatcaaaggtaactgatcataactagataatcgttaaagcccctatcctccctccctttctgtatttttacctttcttcccttattgatactaagaccttgatactaagttgttcacaactggcccacattctaggttgaaatgatggtgcatgttggagacaaatgtacaaataaataccatatggttatattactactgtgaaaatgtatgtagaaaatgctggggtaatatggactattttcttaataatctaatttcttacctagtagacagtcaacatttccaatcatggaaatgaactagtgtccacataactgaaatccttcacatctggctatctttaggccctaaattatgtgaaattcactgagtattttccacagabttgtttactgttgtaaaatcttaaatcaaaatgttacatcaaaggaagagttgcatcaaaagaacctcagcaaaacctcaaaacaaccaaacactccacttgtctgtttaaattattagcaaaagcagctctgttatcccagcttctaagctaaccagactcatcattttggcctttcatgtatgcttttcctatggccaaaacgtccacaaattactaataaatgctgrcaaggagagaggttaaaaccaggaagccatgccttttagctgacaaaacattcattgaaatgctatctgggtgaagcactgagaaattaatcrtctgaatagtctaaattatagtacatgaagaatgcaacttgctagggagacataccttcagcattattcgaggttaatttaaaccaacatgtaaatgtttgtatgcttcatgtgtggtatcccaaaaggttgtgttttctcttttgatctttgaatatgctgatcgcctttcatgaacagtggcattcaatgcactttgaaaaaaacacagtctttttctttgaaggtaagttgtaagaaagagaaatcattaaagcctggagtgcagaattgttgtcgactgaaatggtatcaagtgagttgaatgcctcatattttaaaaatgggcatgatctctattattactaacaaaaaaatctgcattttatgtgatatctgacatgggaaagggatgcttgatgagtagccaatgatgttgaactggctgtattttccgactgacttgtttttcttatgaaggcagcattttagtaaaattgtgtttgtctttctttctgataggctctaattgaagtttgaaggttcattacacaatgcctgggaatatgttgtcaaatacaattcacctctcccacagtgaatattggcatgattttataggacagggtactctagagctcagctgtcataatatttggctccaatttcattcataatggacagaatatctacaatgttttgaatccctactttcaaatgtcagcacactggaacawatattaaagaatgggtttgaatctaagtagatgagtatttccttgaagcaacatgttatagcctaaatgttgtttccttcaattatgtttaaacaatgtaaccttaaatgtttcacagatgtatcacttgaaatccaaaacacatactactcatcaaagtcatctttatttaagcttaggaagaaaaatagaaatctgaaatgtttgctcttagtccacacacacttctcatctggcaggacatttctgaatttatttgggaaattgaatatatgtcaggtaggtttgggttgctgggtaaatgagtgtacttcagtgtcaggactgtttttattaacagattttataaactggcttggtagtttccagttctgtggcaagaacaatctatcataataaacctgtaacataaaagtacagaatacattcctgtttcaagagtctgtaagaggagtcccctcatgaacagtttatatgagaggattataaaatgaagttcagcagtagcacaagcaactgcagtgaatggtgtgttgttaaggttctttaaatcatgaaaaaaatatactttcaaggatttattaatcttactccaaatatatatattttggtaaatagcaattggaaagaagggtttgtatttcttagaagcactgagctgaccaatatattggaaaactaagtaaagcaggccagtgatctctattctgagtgaaatattttgctctgtttgacatctgggtgcaatgatggctatgtcagtgtcactttatttttctcttgtgcaagtttgataaaactctttaaatactaatgtgtattttagaaaacacaaattctgttatattccaggaggaaggaaattgccttaggatatgaatcagatttgataacatgaactatcttatttaattattctaaattgaaaacatcatgaaagataattgggatttttccatttttattttmctcttgtttcttgcttatttgaatcattcgttttattcttctttctacttaggctaagctctcaaaaggaaaggagatgtaattcaatgtatgtaagtttctaagtgtaggtatttttcaacaaacacataaacaatcatcgatgacattattacttatgtcacataaaaactgtgtttaaacagattaaaaatattttctggagagttttatttattttacaatgtttacaagtgaattgtcaagatgtctcccaatattatttcctttccagacagcaatctttaaatcctgcttgagtcatcttttattccagttttcctttttttgagtgtaaaggcaataaattataacaataaaagacttatactctttgtcccatagtttctcttttctgttgaaatatagcttgctctttggaatattaacatgtaaaccagaggttttttttttttttttttttttgaacaatctgactattctaaaacactttttaggatatcactaattgtcaataaggaattgagatccacagataaacttatcaggaacagaaaattgttttgaatacatttttaatatttaaatagtcacagatcaaaactaaatttttttttaaagattctgttgaataggtaggacttcacattggattcaacctggtatttaaaatgcaaatactttttgatttctctttttgctaagtaatattctaagagattagccatacattttaaaatgttgtgactgtttttgtgtttcatgtttgtataaatgtagagattagacacttgtttaagatccttaaagatctgaggtaaattatttttgggaaatacaaatttctttctgtaatttctaccttctgtgaacaacttcttgaagactgttctgttgctcttggtttatacgcaggtcccttaaaataacaaaataaaaaataagaaacaatacataaggacaaagactggaaataaaagaaaaataatttaaactcaagggattttcttgggtaaggcctcagagaatgttccagctgttcttaagaaagacattgtatataaaggccacatttagctgaatagactgaaaaattcttattattttgagaaatgattcaattgttgtctcaatgctaaatattcataaaaactatccattcattaatcctttttaaactgaagtaattagaaaaagcaggtcaatgtgcaaagaaatgggcttttcttcatcaaatggttaattctttattaaatggttattctttaaaatgagcaaagatgagctcagcaaataaggtacttgtaataatgaaagtactatatgcaggaatactggctttttgtttttaatctgyaattrgttaattaaatttcattgtagatgtattgcataaaatacatttgaaaggcaccattcttcctcataatacagctagtgaaggtccaaatttcagtgactcaagtgtaggtgggaaaaagtcctcacaaactttacgcaaattgttagaaaagcttatgtaaacatgactactatgaatacagaccagggatgtgccccagagtcaatgagttcaattcacttgctgccacaatgctttcaggcctaggctctttgcagacagagagcagcatcagggaatgattattacctgtgcccagcagggtttgttcaactgctaatggtcaaggtagattcaagccctctatcattcccagagacatacaaaatcaaatactgacttaaagagaaatataaatgaaataagttctaaaaggaaaagaaaacaaagaaatgtcttttacaaggcactaaagaaagacacaagggaacattcatatagattattttattaaatatttattgagcaaaatatttgtgccaggcactgttagattggcctcatgagctttgcatgggcacccacttgctatacatcaggcttggaaacatactcctgaccagcatttatgctagacatgatttatgtctcatactgtgctaagggggtgactaaaatctatattgaccaatacttgatgagtatatttgacagatgtttaaaagttaaccctgctcaaaaatgtaacgggatctttrctaatcaggatcataggtttgcatgggttcctaggaggaaaagaatgagtgggaccagtttatacaccaagcatcaaaggactccattctcaccctagggaaacacggattttactgctcaggggatgatgaaaattggattccgacttttacacctcagattatttctattaattacayctcagattatttctattacacctcagattattatctcagattattatctattacacctcagattatttctattattcagtcttagccgaagattcccagccccaggtccatcgttgctcaagggtaagatcacagacctagtgcctgcattatttcccttctgtgcaaatcgtgagggccaattttgctctctaaaaatttgcattaaacagaccaatcactagattccttctacagatcaaaatgcatttattcaatcaaacaaaagggaatccatgtgaggcaactaaggaagggctttccctccagtctggtgagcagtggctgtggctctgctggctctattttgtgaggtctttataaatgaccacaattaagctgtagatgtactcatgccctagatgtaaccatccgttctggggaatatggcttgataaacccattggtgtctaacacttattcatgtcactcattcattcattcatttattcaaacaaatatttttgagctcttatgaggtgccaggcactgttctaagcaatgggaaaacaggagtaaacaagtccccattcttatgatgtttttattttagaggggataggaagaaggagaaaaagccaatgaataaggaaagaaataaatcaacaagataatttcatataatgctaaggatgggaagaaatgaaaacaggtgttggaatagatcatggggtgggagttaattgaaggggtagtcaagaaaggccctgctaaagaagtgttgggttggttagagcccagcaagggacttttcakctctggagatgcttgtagagaaatgcagaggtcctaatatgggaatgaacatctcatgtagggtatagcttctcatgtttgaggaacagaaacaaggccctaaaggctctaatattgtgagccaggataagggcagccagggtaagggcagatgacatctggagacaggtaggggccaggtaggaccttgtactgtgtacgtaggaccttgtacatgtaggagtcagatcacgtgggaccttgtgcttcgtttgaattttattctaaatgttgggaattgattagatgattttaaaaataatactttcttaatactgtgtcactctgcctactctctgagaaacagatcataaggagacaagggttggaggcaagcaatgcttctacagaagactttggtaggttcggtttctataatttccaagctctgcaggagaccactacagcttcctcctcagttactcttatttacttatgggcccaaacccctgagcagttaaaatctggcatcaataacactatcaattctggctaacaccttggccagtgagaagggttaatataacaggagggaagatgacagacggaaaaccatttcttttacctcttttttggtctccacaggttgacaataacatgttgtaataatcacatgtatgcaatttaccagaagttttgaaatcttagattaccactaacattccaatttctaaagacagtggacatgaattcctgcagctctctgagaatagattttagctgttaatattatattacaacttcctacatagttgtaaaaatttaggttaatgattcctgtgaatttatttttatttttttgaaatggggtctcactctgttgcccaggctggagtgtagtggtgtgatctcagctcattgcaactttgcctcccaggctcaagcgatcctcctgcctcagccacgagagtagctgggattacagattcacgccactacacccagcaaacttttgtatttttagtagatatgaggtttcaccatgttgtccaggctgttctcaaactcctgagctcaagtgatccacccacctagacctcccaaagtgctgggactacaggcatgagccacctgtgaatttaaagtaaattaatattatgtacacagaagttacaataaaaatgcttctatttggataaaacaaaaaaattaaaactactgtaaaagtgaaagatactacatactttaggaacaactggtatttgtatgcaagtgggcctaaatctaatgttgtgtgaagatcaaagccaagtacaattgtagctcatgttgcagttatttcgaggtctcaaaagggataacaacaaaaatctataatagaaaacagaatctgggttaaaatcagtggaaataatttttatttcagaattaaataaattgagtgaaatgaagtatctggctcttggaggaaaatatggtatcttattctttaaatgtctttaaatttataagtcataagctgcaagtcagtagcatcattatgttgatgaattacccagtttaattcttataaaaattgaaattatcttctgaactctaagtcatattttagccacaggtatttttttgttttgtttaatcaataattcctgaaagaatgaaacttattcgacttttattacgtgacaaggtttaaaaaaatttgcttgaataaaacattatggagtctgaattcaaagcataaaggcagaaagtaaagtatgaagatctttcaaacgtctgtcacttttaataattttgttctatgttatatgacctacgaatgttaagagtctgtaagagtttcttcagctgcatttgattttaccaacaccttgtgggtacagttaagaagatgacttatttgaggctttataactgaaattggatatggttcaaacgttcaacagatataaacatattttaattaagaataaatatttttataagattgctgaaatgacttctctcaaaaatttatgccggaacatcaacaaataaatttgcattacaaaatagaaaattcaattgtggaaaatcatattctaacttattctgatgaagtagttcccttgtcaggaagctttttcttaaagtgtgttttatgatttgtgatagaattaccatcactaagtcgatcattgcccattggttagtctacatgtactgccttttagtgacatgagttcaattctaattaagaatgagaatagcctataactatgaacacagatagctacatgtgtctctagtgagaggtactagtcctctttgacatttctcttaaagcggaatttatttggggtagtgatggttttactggtagccataggggaagataagaaaagggggccaagatattcatttctactgctggcatgtggaatgctcttttcctgctccatgccagtctctcacttgatttagaaagatttgtgcgtccttagctttgaccatcaagaagagtccatctcctttgccttcctgtgcctggtacctgaaagacctagtgaagactgaaagaaaagtttttattttcttacatagtgaaagcactttgaagcattttgttacacatatctataatttaacatgataattatattgatcatttacaattctacacattattttagcaagtaatgaacgttcttaagtgcctagtgttgtcataggtataaatcaagtaggatacctgccctcaagaaagtgtataattttatgcgtagagataagagatgagtactttcgcagaaacaaatgaataattatataccaacatggagaacttaagctcataggtgaatgtgrgaatatggaggagaatgaaaatcattgccaggtgagtgatcaaagagtgcattctagaaaaggtggtacctgtacaggggtttggaggatgcattggtattaaataagagagaaattagagggaagacacatcttccaggcagagtgtctagaagcagagccagcagcagattttagtgtaagcaatttattgaaaaagtcctctcagaagatatctatgagatggtaagaaaagctgaaaaaggtaggggagaaagtggacaaagatgtgatctctaaagttgagcctcagactgatacatggcatggtctggagggaaaattgcaccacagaaagaggtaccccttaaggaacaggatgccaggattttacccctcatatctgtcagttatcggctacaagtccaaggggcagggggaagtgcaagtgatgtatcttgctggaagtctcagggtcagraggctctcattcaaagaggcaggtctctggaatgatgcagctgcaagccattagcagccaacccttgcctcagctgagagatgggtaccaggatgaaaggcctggtaaagggttatggctgtgccaccagtggaatttcctacactgggaatatacatgctaggtgcatagaatgttaggtgtgagaggggagaccagcctgttggaaagtattcattaatgcatatttgtcaagaattctagctggtaacactttattaaacattagatattgctattttatgtgctttgaagcaattacactgtttgaaaaaccttattttgtaaaaaaaaatctgttctattcactgtctcacagatttaggacartttattaattaagaacactagatttcaagtyaaacagacctgaccttaaaccttgaccttgttctttgctgtataaatggttttgtatgagttacttaaccacactgagcctcaaattcccatcagttatatgtggattataatgtctgcctcatgcttrttgtgaacattcaatgtaatcattcatatgaagaagcaatgaacacagggtctggtgcacataaatgttcaacaaatgatagacattacttccttctggatgagcaaaaccttgatgctttcagtagaaggtatttggaactatggttgaatcttttctgggggtattgaygggactagagtcaggatgaggtggatgaaatgccaggtactttcatctgtatgacttgagagtgtatgcatcaaattttgcaccctcgagcacctctctcacctccacattgaaaaaaatacatgccagattaaaaaaaatgaaattggaaaggatggtttgtagaactgttagagcatccataaaactcattacaaagtaaaatatattagtaataaaatgattttagtaatacctcgggaaccactctaattccaaatcatctctctgtctcttgtaatggctttccaatattctttgaaaaatattgaggttattttagttatgatattggtactttgatttggtttaaatatccttttattcttgagatatacaatttcaactgaatggcaactatgacagagttgaaaatgtacagaaaaataaattatagattagacaacgtattaatttaaaagcagttgcaagcaagttactatattgcaatgaaaaaaaagttcctaaaattggtaattcaactattgctgtcctaatagctgaagtcatttttatgtatggcaatcctaaatcaaagccatcataagatgctgcagacctcttaatagcttggctccagtgataatgagcccaggacattagagctcatttgagagcaggattcataattttttttactgtgcaattttcctacctctggctttgtctcaaagacatagccacacatggagaaggacactgataataagagagtttgacattctttataatttttcttttgccaggatccttataatccttgaatcaaaatgattgaagcagttatttttaaaaatagaagctagatttaaaatgtattattttgtgcctcttttgacattattttgtttagagcacctttaaaaactctactggtgattaaaatattgaaactataacagtatttttggcatgatttttaaatacttctttcagctatatacttctctaacttattggcttattatttgatttaattgtccttaggcagtgttaattatgagagtttgccgagtttcttcttgggaatttgagaataaaggatgcgggaaagaggaggtgggtggaggatggatataaactgttttttcaatgtactgaaggcatttcagattaccagaagaatcacagagacaagggaccatttagccatagggttaaacctgtcactttacctaccccacaaataagtaactatggcaactcactgaaagtgcttagctaccatgggagtggatggagttcgtgctttgtggggacaatgctgtgggacctctatgcccccatccataagggaccctgggaattgccttctagcagagaggccaactcacatttcaaataagtatttttccctcctcaactgcttttctaagctttgcacattaacaytgacctagtgcaccatttaaaagtcctaaatatatcacacagtcgccagcccaatcaaggtgagtggtcagacaccagcatgctgtgcacagtatgctagttggccttagagtaatacagggtacaccatttatgtccagttaaccaggtgaccctctagttgctttattaagcacaggcttgactgtcaaacaggtcacaaggaggacaaaaagtgtccttgcatcgtatgaaaagagttgcttgaaatcacagaataccctctattaattgctaaaatccaatttccacctgaagacatgcctccatgactcgtgagaaaaatcaattatttaggtaaataggatctgcaactcaaacactcagacctattagagtatctagcagcatgccaggagatagactgagctgcaagataaatatggaaccatcttgtggaatataaatttcagttaaaggttttaaggagtatataataaggaaagcattgttttatattaaaatgtattcaattatattatgggatggaactgaaagttcacatgcagttttcagatgtgtcccccaaagttaatatatttcctgggtactcattcacactcttctgccaatagtattaatgctttgggaaatgtttgagaagtgttgttccagtggaaatgagcctgtgggttcactgattcatttatccattcattcatttattccttcatacagtatatagctttcaagccacttttatggactattttattaactttgaatatcaaaaccaataaaatagactttgtgtctgctttgtgacacaatttaatgagtaacaattttttttttttttttgagaaggagtctcactctgttgcccaggctggagtgcagtggcacgatcttggttcactgcaagctccgcctcacgggttcacgccattctcctgcctcggcctccggagtagctgggactacaggcgcccaccaccatgcccagctaatttttttgtatttttagtagagacgaggtttcactgtgttagccaggatggtcttgatctcctgacctcgtgatccgcctgcctctgcctcccaaagtgctgggattacaggcctgagccatcgcgcctggccatgagtaacaatttttaaaataaaaataaatagcaaatgatgagtaaagtacaacaataaatcaaacaaaatgctattaggaccatatggcagaaaaacaacagaatcttagaagagttagggaagacttcccaaaggaagtggcaattaacctgagatttttaaagatgagcaggagaatttcaggcaaataaaacttgcagtggggttgggagtaggtggatggaccatgatattccaggtgaataattgagcactttagcttgggaggagggccctaaatgagaaagtatatgacctatttcaggaactgaaagaaatttggaatgcttggaatataaagtgtggggcaaatgatggaggacaaagaggcagcagggataatatagtttggctgtgtctccacccagatctcatcttgaattgcagttcccacaattcccaagggtcatgggagggacctggagggaggcaattcaatcataggggcaggtctttcccatgcttttctcrtgatagtgaataagtctcacgagatctgatgattttataaaggagagttcccctgcacatgccctcttgcctgccaccatgtaagacgtgactttgctcttcaagtactttctgccatgattgtgaggcctccccagccatgtggaattgtgagtcaattaaacctctttcctttataaattaccctgtcttgggtatttctttattagcagcatgagaatggattaatacaaggcattagagggaaagagtggggagaggtaaagttgaaagacaagcaagaagcagatcatgaaacgctttgtgagccttgttagtgagtttcagggaaatccctctaactgcaatgtggaaaatgaattggaaaagtcagaagaggaaaattcattaaaaggatgtgaagtaattaaagggatttaggataatggcctgaactaagaaagtggcagtgggaatgaataatatgaatggactgacaggattttttttgtattttgactcagcaggtgttggtagcattagatatagagagtggggaggaagaaggctctaggcatgatgctcagattgctgatttggttaaaggaagcagagaaagatacatctggagaggaaacaagaatccccactttttgttttgttttttccagttcctgatagatagccatgctcaagtgtcccagtggcagttgagtatttagagtcaaagctcaggggagaactctagctggtgataatgatttgggaattttggcataaaaatactcatttgaacccagggaaatgggaggtaacatccaggataagcttgtagaaggaagagactgtgtagtaggaacacagggaaagatatcaacaccagagaggaagagatgctttgcttgagggtgtactctacatttaaatttttctctttgagagaagaatcatgacaataagaaatttgatttattccatatttcagattgttttgaaagtggtatgtcactaatgaaaggagtgtgaagtgaatactgttgacattcctgagaaatgtatctggggggccttaaaatctgtaaatatcataaatatcatacgaatcctaagaarttctgggatttaaggatgagtgggagacttaggttcttggttctgtgttgtaagtcattctccaagtgtagcaggaccatagcactgatgaaaatgatttatacagtagtcttatgatccaatgcccatgtatgaacaaaggttactgttcctgtcttctaaattggggttcccagtgtaatacaggaagactacygtgtgctagtaaacagaaagcacaatccacatttgaccatattttcctcgttggatgtgtttatggatatattttattctgcttttatctttctgagattaatgccttatctggccttttttcctatgagtacctttggttataaagaacttcgcattgctacattatcaattttcagcctctcttcttttttatttttaatttctttgccacctcttcttaatacataatgctctttcttccttcgttcctccccctctctstttcttccttcctcctttctttcttgctttcttctttcttttctttattctttctttttttttttttttcaaggtcttgacgtgttgcccaggctggagtgcagtagtgaaatcatggctcactgcagcctcaacctcctgggctcaagcaatccttccacctccgcacccccaagcagctgggactacaggcaagggccaccatgcccaactaatttatttttgtttttcatagagatgaggtctcactatgttgcccaggctgctctcaaactcctgggccaagtgatccttctgcctcagcctttcaaagtgctgggattacagacatgagccacctcacccaaacttttctttttttttgagagattcttaaactagattgtacttacgataaatgttgactgattcattaccttcaacagtgctttcagcctctgatggttcagagaaatgattgtgtatactttatatttcacctgaatcaggtttcggttgagacaataattttctgagtatgtctccacttcacaaaattaatttattttcaacttttctctagttttaccactcttttgataaataatcttacagtggaggaagacttattgaaacaatttcatcacttttttttctcttgtttgcctcagagtatggttgattcattctctccctaggttggagccattgcagaatcaatattttacttttaactgactccaaaatatatacattctagctaagtactttcagcactatgagttgtccttcttttaaagagaaatttttttaaaatgatatcattaaaaacaagccattccatgatttattgtataagagaagataagtacggagttgtaaacctgcaatagaataataccctggatatccaccttcactgatgagtttaactgactcattcttacctgttaaccaaatgcttttgagagtcaaaggcagggtctgagaggaattatcaatgaatatttgtaatgaatcattgaggtcgcttgtgaatagttgaaacttccaatattaaggctgtgtaggccaagaatctagttatcctttcagaaatttttttttctgaccacctactctgtgccttaagcaaaagtacctgcccttctttctttctttyttttttttttttttgagagcatggtgtggtctcggctcactgcaacattcgcctcccgggttcaagcgattcacttgcctcagcctcctgagtagctgggattacaggcgcctgccaccaagcygggctaatttttgtatttttagtagagacaaggtttcaccatgttggccagactggtcttgaactcttgacctcatgatctgcatgcctgagcctcccaaagtgctgggattacaagcgtgagccaccatgcccggtcagtacctgcccttctctaaaggcacttgcttgcagtctttggaggagataagctttgatcaactcatcaacctaatggcaagtatcatttgacttgagaaaagataagaaacagggttctcaatagtgtgatctacaagatagacagcagtcagtagacgcttgcttctctgaggaagtgactcttggaagaattagtaagagctaggtgggcaaattcgggtaagacagaaggttgagaaagatgttttcagagaaggctccacaggaacatagttcctctcctgctgtattatggagagaacatggagccttcagagatataaaaatgtcattgtggctggaatgcaaagatgaagggaaagagtttgaattgaggaagggatcagagcatgcaaggatttaaagattactttaagaatttggtgcattatactcattaaatgatgtttgccacttgggtcaacaaacattctgtaaaggcttagatagtaagtattataaatattgcaggtgatatggtctctgttgcaattactcaactctgctgttgtaagggagaagcagatataaacaatatgtatgtgtgagtagatgtttccataaagctttatttacagaaacaagccatgacagtatctggcatatctcctgatcagataaatcctcatgttgctgccttatttcccaatgtctccgtttgaactagtgcagggatattttggagactttagcaatgcctagtcagcaagcatcagtgtactttagacattgaaaatcgggttaggaaaaaaaaaatatggactgctttgattttcctttgaagtaatgtcacaagaagaaaacagcaagctggttcatttgccaaggaaggaagagcatgaaagacaaratgaaatgccagtaactaggtactagaggaaaggagtgctaagaaaatgttcaaaagggatcttgaaaagcaaagatcacttggtagatgaacttgttcaaagtgttcgctaactcacctcttgcaagaacaaactatcttgcaaggctctactgcaacatgtctgatacacagcacctgcagtcaacagactctgtagttgcaaagtattgagttttgtgctcaagctatagaagttaatggactgtcataacattgttcagatgaaacccagcaaagcttaacagactaaggtggattttgcctccccttttaatccagtgctaatttctttgagtaatctcagaaaacttttttatgctaaagtgattcatttataaagttcttgtcaaaacaaccagtgtatttaaaatattttggaattataatacaggacacaaatgaaagaagatatttatactaggcagatgggctaggttatgctgcaataatgaacaaccccaaaatcttagtggttgcaaacaacaaacttttttctcccactcacaatacaggttcatcatagtcagcagggggctccaggaatcataattgctgatatagccacctgacagatcagtaacctcagtgtagctggtggccatgagaaaaggcgataatcatctttcatatcaaatattagaacaatgcaagagaaatatggtgattttactctctatatcaatatcacacacactaacayttggtgtgcattttagaatatcttgctggttcccagtaaatatgtcaactttttgcactatatrccgcttgaaatgtcaatactgcacaaatacgcgtagtctgctgacagtaacctgccaggttctagacttccatattgattactgttagcaaaatgtgtaggtgaaatttttgtagggtaygcacgtgaccattcacagaaggcaagaggttctctttggaatttaattttctgtgtgaaaaataaatcacttttttgtgtgtgtggaacatttctcatggaataatgggtcatattaggttaagtttaggaaactgatgtttattgagctgtgcacatatctgctaaaggaatttcacatctataaataaataagcttatttttccatggtgtcagagagataatgagactttcatataaaactatttttgccagctgaaatatcatgattgttattctaatatttcctccacaaagacttagtgaactgcatgtccattttagaaagttggagtagatattttaattttttcttgcttcttgagaactactatcaacaataaaaaaagctttgattttaacgtgtatatcttaagatttcttttgatcaatactaatgaaaataaacctgaaamgcgaatcattggacaaatgtgagatttttcctttaatttatacattaattgatgtaagatagtatttagaaagtttcaatcctttccagttacaattgtaattgtcacttacctcaaactaaacaaacggactctttcccatatttttctacttggtgaaggacattctaatcatctagatgcctaagtcagaaacctaggcatcatcccttcattctttctgttcctcacagtcacacttaattaattgaacgattttcggtccctacatacttcctgatttcctcccctgtgccctactgcttctctccctaactcagataatgatttctcgactatcctattttaagatcaggctattttgtctccttgcaatgatctctctataacctagtaatatcaagccctaatgaaaagtctttggtcggcttctgtcacccaggataaacgtgaaactcctgagagttggatctacttcctttcagcatctcacccttgcctgcacttctagcctccactctcaaaactctttcacacaccatttgaacctgagacattaaaaatgccttccagggcttggtgcagtggcacacacctgtaatcccagcactttgggaggccaaggccagcagatcacttgagctcaggagttcgagaccagcctgggcaatatgcgaaaccccatctctaccaaaaaaaaaaaaaaaaaaaaattgctgggcttggtggttgagcctgtcgtcccagctactcaggaggctgaggtgggaggatcccttgagttcagaagttcaaggctgcagtgagcagagattgagccactgcactccagcataggtgacagagccagagcctgtctcaaaaagaaaataataataataatactgccttccagttcctccaaaataacatgtctttccttggtaaatactcttcttactgctttcagcagacattcaacccacaggtcccaggtcgttgactcattctcatctcttaattgctagccaggcctttgggaagccgttctctagttcctactcagttaggcacccaacctctctgctctcatagcacataggctgtccctctaacatagcatgagtcacacgctttccaaactggtgtttacctgcttgtcttctttactgcattgctccttgaggtagcaaggatgtcttctttattagcttttttatactgagaaaattttaaaatacaggaaaagaaacatgataaaatatatacccacattcctaactcatagaaataactgttgacattttgtcatgttttcttttcttactagagaaagaaaatgagataaaactaacctgcatttctatcctacttttctgcctgtcttagaggcaaacaccaacacaggtttgttgtcaatttccttcccattaaaaatacttttacatacctactgtgtatctatagccaacagatcttatatttatgtggtgtttgcgtttttccaattttagaaatggtttcctacctttcttaacctacgacttctgacaattttatttcaaaattatgccaatatgtatagatctcaaaaacataacattgagtgaatatgccaataggtagaatgtcatgtaaagtttaatttttgtcaattttatgagtgaaaattgtatatcactgttgtttttatttacctttttttaccagtttttttccagttttgttttattattattttattttattttattatactttaagttttagggtacatgtgcacaatgtgcaggttagttacatatgtatacatgtgcctgctggtgtgctgcacccattaactcgtcatttagcattaggtatatctcctaatgctatccctcccccctccccccaccccaccccacaacagtccccagagtgtgatgttccccttcttgtgtccatgtgttctcattgttcaattcccacctatgagtgagaacatgcggtgtttggttttttgtccttgtgatagtttactgagaatgatgatttccagtatcgtccatgtccctacaaaggacaggaactcatcattttttatggctgcatagtattccatggtgtatatgtgccacattttcttaatccagtctatcattgttgtacatttgggttggttccaagtctttgctattgtgaatagtgccgcaataaacatacgtgtgcatgtgtctttatagcagcatgatttatagtcctttgggtacatacccagtaatgggatggctgggtcaaagggtatttctagttctagatccctgaggaatcgccacactgacttccacaatggttgaactagtttacagtcccaccaacagtgtaaaagtgttcctatttctccatatcctctccagcccctgttgtttcctgactttttaatgattgccattctaactggtgtgagatggtatctcattgtggttttggtttgcatttctctgatggccagtgatggtgagcattttttcatgtgttttttggctgcataaatgtcttctttgatgaataatgagatttaactttttcccattgaccattcacatgttcccaactctgaatttctagtaaattcatgtttttccagagaatgaaagagtgaatggccactgtcttgaggaaatgggagtattctagatgcatagtcaggcagtgtgattagtatagtgcaagaatggtaggaaaggatggagaggacaatgggaaaacaccttgctaaaaagtttggattttgtcttctagtgatagaaatgtactgatggtccctgacatgggtaacagctgctttagagctgaatttcaagaatcagcttgtgaacaatgctttggagattaagacagtaggaaggagaagatttgaagcagtaaagtgatttagaaaactatttcaatggaccagacaagaaatggtaatggcctgaaatgagtggagggagtggaaatgaagtcacatggctgcagttgccatttattggagaaactgaatttcagggatttggatcaggtcaaggtatgttatgcacataaaccaaatattaatgrtatttatttagtgtgcaccagtgatatttgttttttccttcgctaaactgaagattaaggcaatcagaacctagtaaacattgctgaattcaccattgtatcccccagtgctaatacacaaaaagtatacaatgaattctactacctacctttcgcagtgtggctatccttgcaaatttcaccctttcccttcctttcagtcattcttgtttccccatgctccatagatcatttagccaccacatctttttgtgttattttgttttctgcaatgatgctggtataattcagaactactagcaaaatctcatctctagcttcatgtgatattttcctgcttataaactacccatattcttgctgtgctatagtcaatatgtgtaactcttctgaggcctcctcattcattgcagatgtttgcaaacttacctctcttcttaagggcccattcgtatgtacttaaataggaagatcatcagagacaagtatccacatgtgaactcccttagctactgttcttttctctaaatttctctttttctctgttcaaaaaatttccaactttcaactttgtggacacttctggaaaaaaagaaagtcgtgtcttaccaattttgcagaattgaattacaagtttctcatactaagacatttttctatggaagaaacaaggttcttttgtagagatgagaatttaaatgattttttttttttttgcaatgggaagagagatttctcactagtcttactggttttcatctgactttatagtttaaaattgatagccattttgatggcaacacacatggtttagttaaattttactccgtcctcagttttcctgagggagtatcagctactgtgttttctttacaaaacaacataaattccatgtatccaccctgggaatcacttcactgcgttgaatctggataggaaataaagattcatgaatatttcacaatttactaggaaccatcactttcttgctcttccgtgtggattttctactaattagttacttggtatgtctaagatacgttatttttattatacaaagactgtatcactttttattcctttgatataaatcataatacagtgtctgataagtacagctttttaaaaactcttttcatagactgtcttattctttttagatttatgcccatgatgtgcatggtcctgaatgtggaatgggtctctctgaagaaaagtgggtcagatggttgcttgtgcatattggaaagaaactgatagcttcctggtctcttttgaagggtgctgttgtaaaatacagattagtcaaggtttacagtgctgttactagcctgaacacttcaaaccaccatgcagtttaaaactattcagtgcttatggcaaaattcaggtcttttgatgttggggcaggagtagacattttattggaatgtaaggcaaaaatagagatgaaaacattgaatcatttttggtggggggattgacttaccttaataataattttttatacctttaaatccagaaatgtcaagaaaatgacacacaagaacaaaacaaaagaaaaattcagtttagagcctgcttaaaaatctgacattgatcttccaatgccttaaaaatgtttttattatgaaaaaatttgaacatataaaaaatggaagatatggtataaggaaccctcaagtacacattacttgcttcaataattatcacccatcaactaattttttttttcatctgtaaccctaccaactgttctcctttcccactggaatattttgaagcaaatcatcatatcatataatctgtaatctgcaaatatttaagtatgcatatctaaaagttagaattctttttaaaatcataatctcagtataatgacacactaaaaaatgaacaataattatttcatcccatcaaatattgacaagctattattcttttactatatattggctagaattttatgtaaagaaaagcttttcaccattgactcttatttacctacaggtagaattcaaacaggaaagcagatcaaatacttgattctttctttttatttcccagtttttagaaaaaatgagttggtttactagtatcctttaatgataaccagtttgctttttgtatctctatgaactcatagattttaaatatatttgatatgtttcgattcattgcagttatgattcttttcaataatcaaattgtctcatctttggttggtaagagtgtcttcaacttggctttctagtcctttaaactcagttttccttaatgattctcatgcttttcagtgttaagatgtggtaggattgttttgcatatttcctgtcctggttttagaaacagtcatttcttggaggagccctggttccttatagtgaaaaagggtatttcaagaccacaggtcggtagggctgttcactgttaatatgtaggttgtttctaggtcttttcagtggatcaggtgggaaatatatatttcaaatagagaaaatacattatagtttattctgacatgcccatttaggaatatgaggcttatagttaaattcattaatttcatatttgtatcttttttctcatccactgaaagttttgattcctaataacttatttgctctatcatagctctctatatatcatttcataataataatagaaatattatcatatacaacatagtggctgaaatgactttgaaagatttcttagccacgattttatatttataaagcatcccactaggcatctacaatcaaattacctttttttaaaaaaaaatcacttgaaaaaattattttatggttaagccaccaaacaacttcatttgcttcatttgactttttgcctgaaagtattttaaatatttgttttataatgatgtaaaaacttttacatagtttcaaggtcaaatttgcaaaataagttatattcagagactagactctctagatccattcatcctgttttcttcctcactaatgtgtaaccattttatttagggttatctttccatttgttagaaatattatatatataaatagtttgtttaaacagtccgcttaagaatatttttctagtcttttgctgctacaaataatcttgcaatcagttgttttgtgcacgtgtcttttgctttttgtcattgcatctttaggatagtttgtttttttttttttgttttttttttttttttgaggcagagtctctctctgtcacccaggctggagtgcagtggcaggatctcagctcactgtaaactcttgcttcccaggttcaagtgagtcttctgcttcagcctccctagtagctaagactacaggcgtgtgccccacacctggcttttctttttttcgcatttttggtagagacgggtttcaccattttggcgaggctggtctcaaagtcctgaccttgggatccaaccgcctcggcctcccaaactgctgggattacagttgtgagctaccgtgccctgccaggatagatttctaaaagtgtgattactcagtcaaaaggtaaaagtagataaatttattagatgttgtcaaattcttctttgggagtaatgccattttccaatcctaagatcagcatgtgagaatgtgttctgtttccataggttctccaacaaattatattgccaaactttatgttccaaagctttgtggggatatgtctggtagttgattggggcagagaaaatgagaaaaacttagtatgaagaaaagagtcttaggcttgaaattaagacacaggtttaattcttgaccattgctgatcacttgtttcaccttagacaagtcagccaacttttttcatctgctccacagatctgtggtaaggattaaatgagatgacatccatgaaacatatgacagaataccttgccatagtggctactcagcatgtaagttttttgtttgtttctttgagacagagtctccctctgtcrccaggctggagtgcagtggcgagatctctgctcactgcaacctctgcctgctggattcaagtgattctcctcccaaatagctgggattacaggcatccggcaccaggcccagctaattttttgtatttttagtagagacggggtttcaccatgttggccaggctggtctcgaactcctgacctcgggtaatctgctcgtcttggcctcccaaagtgctgggattataggcatgaaccactgtgcccggcctagcatgtagtttttaaaaggcaaagcaattgaaatttgtaaagcatttggatatctacaaaagttatttgacgagaacatacaaggggacatctcttatggactggtaattttaggattgtccacttgatgttaactaaatatccttcctaatgccaaaccaacacatggggtaagaataagtgatgctggactaaaaaaaaaatttgatttctctatcaaatgtacttttaggtaaaaaaaaatatgcaaagtataaaatatttgtatgggcaaatgttttactaagggtgtttgggttattttctattgaacaaaacctgctaaaccagcataagatgcactgaactaaagtgcagcagagatgctactgtcagcaagagaaggattcaaagagaggaagcccaatccgagcattacctggacaattaaacagtcagttattgggattttcacaattcttagcttttttaactttcacaattcttagcttttttaactttgagttttaaaaatcatgatggagagaaatttagttcttaacttttattttctgggcttgatgaagattgaatttcatcagagatgagctaaacaaattaaaactgaagcatttaatttagaaaactcaaatttcttcagcctaaaattgttcatttaaacaagtttgttagattctcaaattaataggatactgaataaatatgaaattattctttcctggaaagttaaatggaaaaacaggacagaatcgctattttataactaatacatattaagtcaagaaatagtaaaggattatttgtcttcaagaaaacatcctgtaaagaatggcaatgttggtggtatatagatgtaaaatgcttaaaaagaatgattatctagaagatgttatacatgttataattatctttaagtctgccttctctaattctgtaagttaaacacaaatattgatactttaatttttaaaatatttttaaaagtagctgaaaatggggctccatccttcaaagttctaacaatacaatttatagtaaagaatatgtatgagaaacatttgttcttagaagttcagaaaaatcaaatatataatatgaagatagaataatgtagagaagttaaagaggagaaaggggtgactgattctgaatcaagtgagttttagcttcttttaagtgaaatcatgcatgctcctcacatatgctaatgtataaaacatcaatttatagaatagtatttgaattacctgcctaggctttgcaagcctagacctttgaatttgcattcaaattcttgatgtacattttctagctgggggactagaaagcaagacactttcctttcagtaccttgggctccccatctattaagtggagatcattaaaatctgccttgcaccgctgtcctaaggatttgagataaagcatacaaagggcttggcacatagtaggtgctcctaaatggtaactttattcttcacatcaggctttgcttatacttataaaagccagttttgtagataatttgctgaatagaactaagaatagttataaatattgggttagtttatttgagctgctatgataacataccataaactggatggattataagcaaagataatttatttctcacagtctggaggctgggaagtccaagaccacagcagtggcaaattcagtgtccagtgagtacctgctttcctgtttatagacagcacgttttttttctgtagcctcgcatgatgaaagggagcaagagggacctctttcagacgctggtcacctccctaaagccccacctcctgatatcctcacattggagattaggtttcaacatatgaattttagggggacacaaacattcataacatagaaaatacatattattttaaaatgctttcttattctttattatgaccactattaaaaccaaacagaaaactgtagaactagccaaggtatcttacagagatatgtttcagaggagtgtttattagattctgttgtatacactatttgtttagctttttctgttttttaggtcctcggcctatgctattacagaaagaatattactctcttttgtatttactattggtttcctgagggaagcaattattttaattattgattatttatggtttaatggggaaccattgtattctaactcacaggaataaaacaataacaaataggatgcatgcaaaatatctcataaatgtgtacctaacaaataaaacatacatcttcaaatacgaatatgcatttagagcctggcttgctgtctgaggtcttaacttgttctgtgcttcaactccctattataatggatgctacacatggaagctcttgggtcaccattggaggtaatagcgccctatagagttttgtgtctgggaagaagtggactttgtagttaggcgattaaatatttaccagcttgccttaagccaagtacatgttaaaggactattttgtattattattttgtttttaaataggcccctttctctcatatttatcttgccttaattagggagtttattgtttattaaaaagctttaatctgaactactttcattgtgtgggtgtgtgtgtgtgctgtttgaaacaaatgaactaaaaatgtttttaattgagctgcaagtgaagacttgtcaatacataaattatacagtattatatatctctatatatgcataaagaggatattttaatcagcacatgtccctgtatttaaaagttaaaagaaccgctctacagagctaagaatacaggtattttaattttttaaatgattataacgggggaaattccactgttgtttctttagtgtttgatgagggattgtaatctaatcagtttaaacgactataaacacagcgatgatcatttaagttggatttttattcgaaaagtaagttcttggaatttagggtattgcacaatctgtcccatacaggggaaaaaaaaatcacctacttgtgatttttactaatttttttccgtgagaatagaatcctgctgggaagcttattttattctcttagatttgcttcctcctttttttccccctccggagaacgatgactggtttacaaatagcaatttatatcaactgacacagtcctttttccttatactgttgatctcagaactgttctgcagtcctgaagtatgaaacactattgccattttttggtacagccagtgctctaaaaaatgtraatggatgaaagcgattcaatctattatggaagcagaaacatcttcctatttgctttacaaatttttccgagtaaaatgcagtcaggtttgtaacattgcataaaaacttgttttagaattctttacactaaattaaagatgataaagcaatctgcttttcatactaaacagtgaagtgaaaagcattattttaaagaaatatttctgttttgttrgtgtacgaaattctgtaatagtggctaacttctttaggaacctttttaggtgaaacttatgattgactatgaaatctattctaggacaaaataaaatgagaatagaattatatgtctaattaaatgatatatctaggcaaactaaccattcaagttttaatttttatgaaaactttctatgtgcccctgacatctgtacatgtgtttaatttccagtgagctcaaaatacttcaagtgatctcatttgagtattaactagggaaatacattcacagtcyagcaattttcttttatgtctacattattttaaatcatagcatagattttccactgtgctttatgaccagaacacatttatttgcaaagtattttcacttaccttatattgtagtatgtagtataggacaattgatacggtcaactgtttaaaacgtcagatgcaatgatagagccttagcatttatagatgtagcattcacagttgcaactctttcagtttcagacatttgtgaggaatctcataggtgtgtaatatggtttgaaatttgtgaggacagcaattcgtgctctgactctagtcattggcggccagtgagcaagcgcaactgatcacccagtatcaacttcacaatgtggtttccactaatcggcaccttatattaatttttatgaaataataaaaaccttatttcatagcaggagcgggtacccaaaaagtagttaaatggctaatcctttatagtttttatgtttttggaaatttgtgatctcaagactatccctcaagaatgtcaaggttttgctgaagttaaagacatttgttattctgtggtcagattatttcagtagttgagatgtagtctcacattaagggagaaatctgcaaactagaaatggtttgcaaatggcaaggcaaagcattcaaataactgttacatgtgataaaaatctcttttgggtttcaggatgacaaggtacagggcccagggactggcatttaaagagaactcctatacacacacttaaattcaacaaaaaagtctgtattctataatatccaattaccttaattgtgtagtggggaaaatgaagagttgaatttctggttagctagactagggtaggaagacaccagctctttgtttgttttgtgctttgacatttcaattttcccgcttggctttgtccttctgtcttcccttgacattgatgattttgttgtaggtacgtcacctccttgaatctactgatatgaagagaaagctataactaaagttaagacaatgttaaagtaaggtccaattctcagttatctacagggctatccaaaagaaaaatggaaatttcatttaaaatagctgcatcttttaagtaggaatattttgggctattatatgccagactcatcactggtgctatttaatttctcctcccatcaatgagagctctccctgagacacattgtgagatctttctgaggatgaaatcacttaaccccagcaacgccactgattattttcagctacaacaaccacacttctatgcacacacatcaatcacgccaaaaaacattctgactaaaaagctcaaaagaaaataattaagcattctcttttccatatgaagatattactgaccagcagaaagtggaaaaatgtatacataatgtttatagatactgacttaacaatgagtgaacagttgcgtctcacaaatttcagcagcgttgtcttgacagtggatcatggtgcttctgtgttgctaggcaacccgaggggatggaaaatttaaactcaaatttacttatgtatgttagattttagacatattatattgagagtgtattacacatgtcattacaggctagttgtacatttctattctgtcttttatgtgagtttctcagtatatacatgaaagacactctgcctgtatccttgctcctctatttttgaaaattaacatagtcctaatatgcatttttatggtygacagtcgtggtatatgagagaaaatatgtagcctttgatgtaaraagattgtttttaaaaaaacataaactktacaatatatgcttgtgtgtgtcagtcagagggggaggtggagagaggcagtgtttctgaaacaagagatctatgaaagaagggaacagtctgttagttccacctggttcttctcatttaattactataattaatatatgcagaagaaaaattaatagggttcttaaatccagggagatattaaatgtcaaaaatgtggatatttgaattaaagactaatcaacttgaacaatacattataatgttaaagaactggtagcatattaatttcaagtgagagttttaaacttgataactgcagtggttttgtgaatccaattttaagagttaaatgttgtgtcaatgccatgaatcagagaatagatatttataacaaaagatctgtatgaaatgatgcataatagatggtgatggctgaagctgctgaaaattgatggtctaaatcaaaaggatggattaggaatctttgcggaattattacagacctgtagttttgtgagaaaagcagagaatgtcaaggtcttttacttcaaggaggatttgaagtatttgggggtatacattattgcattagcttagtcagtttacagctagctagacagtgcaaacttgtgaaggaggatgttttcagtatatcacactaggatcatggcaccagtcctgaagaaatagggggaacttttgatctccatcataccatatacacacctatgtgtgggaatgctaatgggatagaatctgatacagttagggtctgaaacactacgagttcttatggtactttgattcaatatttagttgagtaattcttgttcacttatttgtattatcctcattagattgaacctgtataggtttatctttgaaactaaagattaaattgaatttaagttctactgtattttttatcaagattatttttaaaatagcttgtatcacaggaatcctgagtacatacctaatactatcctctactgtatagaaatttagtaataatgaaaaagtatactcctggatttggttttctgggcagagaaaattaaaaactttaagcaggtatcatgtagaataacatactcaacagatattattttgtgggtgacaatttttatagacattatatgtcagatgaaatagctaattaacattaattctattatatttaacataacaccctatatacctcggtgaataaagaagatttctaaaggatgagtttaagaggtattgataaggaccagatatttagtaaagaaatcccatgattccctagatttgtgactcttcagtgacacatttaattagttaatgctttgtgaatcccagaattctttgtatatactgtgatataccatatttttgtcatagtaacaacaatttaattctgattctcctatagatgaatctctgcgttctatctttcatgctactttgaattcggtttttaaaactgaatttaaatatcacagtacttatcatatgatattcaacaacctgactgttttccattttattttattttatcaacttttattttagaatcagggagtacatgtgcaggtatatatcacacaagatatattgtgtgatgctgaggtttggagtacaaatgaatctgtcattcaggtagtgggtatagtacctgataggcagttttgttttgagacaaagtctcactctgtaacccaggctggagtgcagtggcacgatctcggctcactgcaacctccacctcctgggttcaagcacttctcctgcttcagcctccatagtagctgggattacaggtgcctgccaccacgcctggataacttttttgtatttttagtagagacagggtttcgccgtgttggccgggctggtcttgaactcctgacctcaggtgatccgcctgccttggccttccaaagtgctgggattacaggcatgaaccaccgcacctggccccagtaggtggtttaaaccctttctccttctctctctcccctctgttgtattgcccagtgtctgttgttcccacttttatgaccttatatttttcttctttaaatcagtaattttttatgttgttaaaatcaatttttgcagagattagaatgtatttggcctaatttctcattcttaagtaaaacaaaataaggacataatttatagacttgacatatactgattttttggtatagatcactaaataagtactgaacttttttctttaggacgtttagagtttttgacaggtatatagtcaagccctgctctcttttacttcctttttattctctctgatgatttgtatatgaattcattctttattgatagtatcaacatgacaaaacatacaaggcctttgtcctaatggatcttataaatctaatgcaggaggcagacagtaactaaacaatataattgtatatgcggtaagtgctatgaaggaattaaacaaggtgacacaacagaaagtagttgtgtcgggcaattttagataaaatggcgagtgaatgctgtgcatggaggtgacatcttgccagagacaggagaatgagaaagagtttggcatgtgaagatcggggaaatgagcacatggggcagagggagggaaatgtgaaaaggcatgatggtggggagtgtttgaggggtgagagaaactatcatcagagtaacaggcaacctacagaatgggagaaaatttttgcaatctatccatctgacaaagggctaatacccagaatctacaaggaacataaacaaattcacaagaaaaagcaaccccatcgaaaagtgggcaaaggatatgaacagacacttctcaaaagaagacatttatgtggccaacaaacatatgaaaaaaagctcaccatcactggtaattagagaaatgcaaatcaaaacgacaatgagataccaactcatgccagttagaatggcgatcattaaaatgtcaggaaacaacagatgctggagaggatgtggagaaataggaatgcttttacactgttagtgtgaatgtaaattagttcagacattctggaagacagtgtggtgattcctcaaggatctagaaccggaaataccatttgacccagccatcccattactgggtatttatccaaaggattataaatcattctactataaagacacatgcacacgtatgtttactgcagcactattcacaatagcaaagacttggaaccaacccaaatgcctatcaatgatagactggataaagaaaatgtggcacatatacaccatggaacactaggcagccgtgaaaaaggatgagttcatgtcctttgcagggacatggatgaagctggaaaccatcattctcagcaaactaacagaggaacagaaaaccaaacactgcatgttctcactcataagtgggtgttgaacagtgagaacatatggacggacacagggaggagaacatcacacactggggcctgttgggggaggggtgggaggcaaggggagggatagcattaggagaaatacctaatgtagatgatgggttgatggctgcagcaaaccaccatggcacatgtattcctatgtaacaaacctgcacattttgcacatgtatcccagaacttaaagtagaaagaaagaaagagaaaagaagaaagaaagaaacaaagagagagagagaaagaaagagaaagaaagaaagaaagaacgaaagaaagaaagaaagagagagagagaaaggaagagagggagggagggaggggatggccaatgtgactagagtgaagtaagagaggggaagaatagtattagtcaaagttgaaattgaagacacaaactggctattcaagactttatgcctgtgatgtggccaggcatggtggctcacacctgtaattccagcactttcggaggctgaggcaggtggatcacttgaggtcaggggttccagaccagcctggcaaacatggtgaaaccctgtctctaccaaaaatgcaaaaattggccaggcatggtggcacatgcctatactcccagctactcgggaggctgaggtaggagaatcacttgaacctggaaggcagaggctgcagtgagccaagattgcaccattgcactccagcctggccaacagagcgagactctgtctcaaaagaaaaaaaaagtttatacctgtaatgagatgagaagttcagattttccagtgtgtgttgtataaatgaaggacccaattttctcagacagaagataaaaggagttgaggttcgtaacgaggtgattttaaggatggatcatagaatcatcaagccaggaaggagagagtgaaatcaaggagaaggtgatggataggagaaaggaccctgagttattataacagagtccaagagtcagagagctgcacagatggkgtgggatatgccaggtcaaggaaagggccatgggagtgggtgcctgatgcggagaggaggaaaagaggtcagcgaggaggtaaagagcctgggcacagkcatgttggtagattttacagttacataaggagaggtaggaaggaagatggcgaaccagaaagtaagtcattaataatggctggaaggtggttttatgagggatgtggattttcagagagaaagagaaaactgattaagaagtagcatcaaagaggagcaaagttgatgcacaacctatctctagatcttgaaggtcttatagaatattgtttctaagtcagaagtatgatgacagggggaggagccaagatggccgaataggaacagctccgctctacagctcccagtgtgagcgacgcagaagacggtgatttctgcatttccatctgaggtaccgggttcatctcactagggagtgccagacagtgggcgcaggccagtgtgtgtgcgcaccgtgcgcgagccgaagcagggcgaggcattgcctcacctgggaagcgcaaggggtcagggagttccctttccgagtcaaagaaaggggtgacggacgcacctggaaaatcgggtcactcccacccgaatattgcgcttttcagaccggcttaagaaacggcgcaccacgagactatatcccacacctggctcggagggtcctacgcccacggaatctcgctgattgctagcacagcagtctgagatcaaactgcaaggyggcaacgaggctgggggaggggcgcccgccattgcccaggcttgcttaggtaaacaaagcagccgggaagctcgaactgggtggagcccaccacagctcaaggaggcctgcctgcctctgtaggctccacctctgggggcagggcacagacaaacaaaaagacrgcagtaacctctgcagacttaagtgtccctgtctgacagctttgaagagagcagtggttctcccagtacgcagctggagatctgagaatgggcagactgcctcctcaagtgggtccctgactcctgacccccgagcagcctaactgggaggcaccccccagcaggggcacactgacayctcacacggcagggtattccaacagacctgcagctgagggtcctgtctgttagaaggaaaactaacaaccagaaaggacatmtacaccgaaaacccatctgtacatcaccatcatcaaagaccaaaagtagataaaaccacaaagatggggaaaaaacagaacagaaaaactggaaactctaaaacgcagagcgcctctcctcctccaaaggaacgcagttcctcaccagcaacagaacaaagctggatggagaatgattttgacgagctgagagaagaaggcttcagacgatcaaattactctgagctacgggaggacattcaaaccaaaggcaaagaagttgaaaactttgaaaaaaatttagaagaatgtataactagaataaccaatacagagaagtgcttaaaggagctgatggagctgaaaaccaaggctcgagaactacgtgaagaatgcagaagcctcaggagccgatgcgatcaactggaagaaagggtatcagcaatggaagatgaaatgaatgaaatgaagcgagaagggaagtttagagaaaaaagaataaaaagaaatgagcaaagcctccaagaaatatgggactatgtgaaaagaccaaatctacgtctgattggtgtacctgaaagtgatgtggagaatgaaaccaagttggaaaacactctgcaggatattatccaggagaacttccccaatctagcaaggcaggccaacgttcagattcaggaaatacagakaacgccacaaagatactcctcgagaagagcaactccaagacacataattgtcagattcaccaaagttgaaatgaaggaaaaaatgttaagggcagccagagagaaaggtcgggttaccctcaaaggaaagcccatcagactaacagcggatctctcggcagaaaccctacaagccagaagagagtgggggccaatattcaacattcttaaagaaaagaattttcaacccagaatttcatatccagccaaactaagcttcataagtgaaggagaaataaaatactttatagacaagcaaatgttgagagattttgtcaccaccaggcctgccctaaaagagctcctgaaggaagcgctaaacatggaaaggaacaaccggtaccagccgctgcaaaatcatgccaaaatgtaaagaccatcgagactaggaagaaactgcatcaactaatgagcaaaatcaccagctaacatcatcatgacaggatcaaattcacacataacaatattaactttaaatataaatggactaaattctgcaattaaaagacacaaactggcaagttggataaagagtcaagacccatcagtgtgctgtattcaggaaacccatctcacgtgcagagacacacataggctcaaaataaaaggatggaggaagatctaccaagccaatggaaaacaaaaaaaggcaggggttgcaatcctagtctctgacaaaacagactttaaaccaacaaagatcaaaagagacaaagaaggccattacataatggtaaagggatcaattcaacaagaggagctaactatcctaaatatttatgcacccaatacaggagcacccagattcataaagcaagtcctcagtgacctacaaagagacttagactcccacacattaataatgggagactttaacaccccactgtcaacattagacagatcaacgagacagaaagtcaacaaggatacccaggaattgaactcagctctgcaccaagcagacctaatagacatctacagaactctccaccccaaatcaacagaatatacatttttttcagcaccacaccacacctattccaaaattgaccacatagttggaagtaaagctctcctcagcaaatgtaaaagaacagarattataacaaactatctctcagaccacagtgcaatcaaactagaactcaggattaagaatctcactcaaagccgctcaactacatggaaactgaacaacctgctcctgaatgactactgggtacataacgaaatgaaggcagaaataaagatgttctttgaaaccaacgagaacaaagacacsacataccagaatctctgggacgcattcaaagcagtgtgtagagggaaatttatagcactaaatgcctacaagagaaagcaggaaagatccaaaattgacaccctaacwtcacaattaaaagaactagaaaagcaagagcaaacacattcaaaagctagcagaaggcaagaaataactaaaatcagagcagaactgaaggaaatagagacacaaaaaacccttcaaaaaatcaatgaatccaggagctggttttttgaaaggatcaacaaaattgatagaccgctagcaagactaataaagaaaaaaagagagaagaatcaaatagacacaataaaaaatgataaaggggatatcaccaccgatcccacagaaatacaaactaccatcagagaatactacaaacacctctacgcaaataaactagaaaatctagaagaaatggatacattcctcgacacatacactctcccaagactaaaccaggaagaagttgaatctctgaatcgaccaataacaggctctgaaattgtggcaataatcaatagtttaccaaccaaaaagagtccaggaccagatggattcacagccgaattctaccagaggtacaaggaggaactggtaccattccttctgaaactattccaatcaatagaaaaagagggaatcctccctaactcattttatgaggccagcatcattctgataccaaagccgggcagagacacaaccaaaaaagagaattttagaccaatatccttgatgaacattgatgcaaaaatcctcaataaaatactggcaaaccgaatccagcagcacatcaaaaagcttatccaccatgatcaagtgggcttcatccctgggatgcaaggctggttcaatatacgcaaatcaataaatgtaatccagcatataaacagagccaaagacaaaaaccacatgattatctcaatagatgcagaaaaagcctttgacaaaattcaacaacccttcatgctaaaaactctcaataaattaggtattgatgggatgtatttcaaaataataagagctatctatgacaaacccacagccaatatcatactgaatgggcaaaaactggaagcattccctttgaaaactggcacaagacagggatrccctctctcaccgctcctattcaacatagtgttggaagttctggccagggcaatcaggcaggagaaggaaataaagggtattcaattaggaaaagaggaagtcaaattgtccctgtttgcagacgacatgattgtttatctaraaaaccccatcgtctcagcccaaaatctccttaagctgataagcaacttcagcaaagtctcaggatacaaaatcaatgtacaaaaatcacaaacattcttatacaccaacaacagacaaacagagagccaaatcatgggtgaactcccattcayaattgcttcaaagagaataaaatacctargaatccaacttacaagggatgtgaaggacctcttcaaggagaactacaaaccactgctcaaggaaataaaagaggagacaaataaatggaagaacattccatgctcatgggtaggaagaatcaatatcgtgaaaatggccatactgcccaaggtaatttacagattcaatgccatccccatcaagctaccaatgactttcttcacagaattggaaaaaactastttaaagttcatatggaaccaaaaaagagcctgcattgccaagtcaatcctaagccaaaagaacaaagctggaggcatcacactacctgacttcaaactatactacaaggctacagtaaccaaaacagcatggtactggtacaaaaacagagatatagatcaatggaacagaacagagccctcagaaataatgccgcatatctacaactatctgatctttgacaaacctgagaaaaacaagcaatggggaaaggattccctatttaataaatggtgctgggaaaactggctagccatatgtagaaagctgaaactggatcccttccttacaccttatacaaaaatcaattcaagatggattaaagatttaaacgttaaacctaaaaccataaaaaccctagaagaaaacctaggcattaccattcaggacataggcgtgggcaaggacttcatgtccaaaacaccaaaagcaatggcaacaaaagacaaaattgacaaatgggatctaattaaactaaagagcttctgcacagcaaaagaaactaccatcagagtgaacaggcaacctacaacatgggagaaaatttttgcaacctactcatctgacaaagggctaatatccagaatctacaatgaactcaaacaaatttacaagaaaaaaacaaacaaccccatcaaaaagtgggcraaggacatgaacagacacttctcaaaagaagacatttatgcagccaaaaaacacatgaagaaatgctcatcatcactggccatcagagaaatgcaaatcaaaaccactatgagatatcatctcacaccagttagaatggcaatcattaaaaagtcaggaaacaacaggtgctggagaggatgtggagaaataggaacacttttacactgttggtgggactgtaaactagttcaaccattgtggaagtcagtgtggcgattcctcagggatctagaactagaaataccatttgacccagccatcccattactgggtatatacccaaatgagtataaatcatgctgctataaagacacatgcacacgtatgtttattgcggcactattcacaatagcaaagacttggaaccaacccaaatgtccaacaatgatagactggattaagaaaatgtggcacatatacaccatggaatactatgcagccataaaaaatgatgagttcatatcctttgtagggacatggatgaaattggaaaccatcattctcagtaaactatcgcaagaacaaaaaaccaaacaccgcatattctcactcataggtgggaattgaacaatgagatcacatggacacaggaaggggaatatcacactctggggactgtggtggggtcgggggaggggggagggatagcattgggagatatacctaatgctagatgacacattagtgggtgcagcgcaccagcatggcacatgtatacatatgtaactaacctgcacaatgtgcacatgtaccctaaaacttagagtataataataaaaaaaaaaaaaaaaaaaaagaagtatgatgacaaatggtcattttccttaaaataaaatcatatatcactacttactgacttgcacctatatgtacttctgggaaatttagccagcatgtatttccacaatacagggatagtttttgttctgtggactgctaaatgatcacagcctaatgtattgccttctcagtaaacacacgttgacttaaatcagttgggtaaattgtaaactcaattccttactttgactttagtttgcaaattaagaatagtgtacttttcttattttcaggccttatttataattcctaatgctatacactattatgttacagcttgcacttgtattttgacactttctaattattgtcaaattataaatactactaattaatatatccttgattcttcataatattctattaaccagcacttaacacctttttcataaaacacttttcaggatatatatatagttagggcttgttgacactatttcatcttgatttcaatttatgcaatccgaattttcaagtaaaacctcatggaattatcagattcatcactaactttcaaaacttttataacacatctgctgagttttcagacattcattctggaaagaaaaaacatgctggaaagaaaaattttacttactctaatgtgttttattttaaataaaaagtcctataggttatgattttactgtcctctttttttttctgaaaaacattaaggtttctttcccaaagcttattagttaattgtcagtttttatgtaagcccatgaggttagacctatataaggcagtaatttttaattctccctctcttcccacccttccttttcttccctatctcctttattttcttccttcttctttattagtttttaaatatgcatatctctttttataggagaaaggatggataatgattgcagcattctctgaccactctaatatctcaccctagaaattttaataaatgatttactaacattctcatcagggtttttattataaaataatatcaaagaaaacctgctttttaaaaaaatatcttgatacttgtattttaccaaattcatgggtatagataactttttgatttctcattactttcaagtatcttcttcatgtaaaattttaatcaaatttcagatcccatgcttaacacataaaaattaataaattgatgttgagggactatcacattattttatactgaaaagttgttcaattattctaaagttctatatattaatccaaagccgtctctacttgggggaaaaatgtgtgtgtgtgtgtgtatgtgtgtgtataattttttggatctatctatctatgaggatgactgccttattacaagtttcagtacaatttatatatatggattatatctacatatatattttttggttatatatatttttatatatataaacgcttggccattttgtctatttacctatctacctataaacttcagcattttttgtttgggtaattaatattttgaagttttctctcttgttttccttcttgtttggaatgatctgtttgagactgtgtttttaacaaaagtatatgtaagtttgatatacttaaccttatttttcgctaaacaacaacaagaaagaccccctaattttgaaaagtgtccatcaatatcactgtttggcagtttatcataaagattcaatcagtatacagtaaatctataattgaataaataatgttagaagcaaatatcacaggctaggatcagcttaagaaatctccaaaatgtgagcctacataattgagaccaagtgacatttcatttggtgttaacatatactatgtaaaaatggtattatattttcagtgttttaatggaaattttaacatgctttctgatagtttaatatcttttaacttgtgccaatagattgttttagcaagaaatgagtgataatcttaattttattttcttttacccgattcaaacattcttgccttgatcttagaggctggagaataggcagcatgacctctcatctcttccgttctttcctcagccttagtgaagggtgtcccattcacccatttatccacaccatgagccatactgtggatcatccactcagccaccaactcctgcaggtgctgcctctttccaattttacagccactgccttcattcagaatctaaatatttctgcccttgatttctgaactgcctctgcagttagtcttctgctgccctctcctcattcctttcatctgtcattcctgcttaatactctcctagggctctccatcgtgtccagtataaaatcgtactgaaacttgtaatcaggaagacatcccctttgtaatcagatctccatcaccagtccaacttggtctttgacctcttctcactgacattttatgctcctgtcatgctggactctgcagttgctgggcagtgtacccgcatgctttcctgcaggctatcccatctgactctcttctcctaaacctcaccatatttgcatgggtaacatgtcctcaccttttaagaatttcctgaagctctccctgacatcctgattcctgaacaaccacccctttgtgctcacaaaggtctttgtagttacattatttatcatacagtgtttccactgaaagtttaagtgcctgttccccatcgtggctcctgagtagctatgcagagggcgtaggggaagcaatctggtgaaactgggccaaggagacttgtctctaagctacattggcagagcaatgttttacttagattatatctatttaagatggatttagggaggctcagggagattattggagagaggggaaatatgagagaccctaagcacctcttggcagcactgctgtgtttcctctactgtggagtgagctcctggaaaacagggactctgtctgtcatctgtgtgtttcctgagcaccacatagtgtgtgccagatagattgtatgcctgctacatagtaggctcttaataaataagaagtgaattgaggattctagatgctattcatcttcccatattaaattgctttcaaaatgtaaatcctctgtggcactgaagtctatttaaaatatgctcttctgccaaataaaatgtctcctccaggtgatttgaggaagacatgtgggctcaaataagattaaaccaaaccattgtcatgtacatgtaaatattgcatgagtaactagtcttacattttcttcactaatggggatttattctaaggaacttttttgttcagtattttctgatgaaggaatagtcagaaatatcaaaatccttcttactccattttaggctgccatttttttcctaagagctgttatacattgagcatacctaaattgcctttctgaaatacaggaacacactgtattgtcagtaaaatggtctgtgttgattagtttgtctttggggtgtacttgattcatcagatgatggagatcctgctggcgtttcatgcaacctgctatggtatgtgggctttattggcttcccagcagcgacactgacacaaattgtcagattttatgggcagttttaaacctaatgaaatacatccttgagaagcttccttcaccattttagtagctgtacaatttgaaagaaaaaagtcaatgtacaccacacagggtagttcactattgaaatcatggaggacaatgacaacacgcttattttgctcttgaacatgctgtcattaactgcacaatgggatactgatgctgcctcagaggctggtattaatctttgtgccaaaccttgcagaaactctgtgtgcatttactgacgtaagcattgctctccatctctttgatcttaagattactcctttggggatagaaggtaatataaggctgctgaacttaaaaaaaaaatgctcaaagtgagtgaaggtaagagatgttcattttcttccagtactgaaaattaagagtacagacccacatgytattatacaagagaaagtagtcctatgactgctggataatttacatacattatctaatttatcataaccctgggagagtggaaatattgctattcttattttactagtgagagactaagtgatttgctggtttttgatcccgggtctacatgaatacaaagctacatctttaattagttctctatagggtctcaaagcagtcattttactaaatttttgatctttattaaacatagatgcaaaagtaataataatatttccacaaataaagggatgttaaccaaaattaaygttcaagaatcctttcagtgtttctctacctctttaaatattccagaaatggtgatacagtcaggagcaatatattgccaggaactttggcaggacgagagattactttttggatagaatcagttgcaggaattttccaaacgattcacacagcatcaacttaatcttctggaaaacattttagggaccacaaatacatattgtacccaggatgtagtgtacttactgcagygtggtctatgatttttcttggcatgcataattcaaagacccagatagaaatgactgattttagcacttctaacaataaaacaaaagctcttctacaagagaatatcttcattcatgttaaacatatcaatatctcaagtaagtatgatgaattttgagatagggatcatgccattggggtctcatctggtggtcatggggaaatggtcctctttcttggatatctttggagagtatactatttgactctttagtcaaactgaggatcagtattttaaaagtctataaaatacttaagccatcttgtagaaataaatagtcttcccacccagaccataatctcygaaataattattaggaattttctttttctttcaaacactttggaattataatttagattctttaaaaactgagttttatgactgttttttcaaaaaagcttcaaaattttggcaaatgttgcatttttttttccaattaggataagtaattcaaaaagtcacaacatgcttcagccaaaaatccattgtgaaaatagaaattagaaatgatctttcaaaaaattaagaaatcattttttgaaaaagtgtggagtcattaattaagtgtttgaccttttgtgccttctcaaatgtccattttcaaaaagacagatgcagttagaaggaaaagactatgaatgtaggttcagggccagaggacaaaaactgttgaaattgccttgatatagattcatagattgcaaatgagcactttttaaaatttaaacccttgaatatgrtatctcaggcacagagtgagttctttatatatacaaaatgtgattcttaccgcctaccagctgtcttccgatttcaccagatgaccttccctataagtttgacacgtaactcataaaatgcatggctctggagaacaattatcatgacgggagtatgctttcttgattatatggcaggatcctctttcccacctctgcttttgaaggatattaaaggtgagattaaaaatgctccagttgttctgcttgtctgattgtaacagtgaaggagacaaaattgattctagcttatggctcagtgtttcaatgttattctgcagcacttgtttgccagcagctgttagggattattgcaggtttctttgtcaggaacagtgtggcaacaataataaatcagatttagwctggctactgaaggggtttgtttaaaagatttaaaaatctcttcagagtcaaakatgttaattctacctggtgaaccagaatgatcctgcatatatcttgggacagacttatattttctaaatctgggtaatgatcatacatgcactgaaaagaagaccatcttctcccagaaatatacaacactgaaagattctctaccaaacatgcatgaaaagatagcaaaggtacaatatttctttaatttgtttctttcctctttcgtttaggtgaaatagaggatacagctctgatcattagaatttcatatggcaaacgctcacacacatagtggatttgaggaaatcaattttcactaatctagaaaattctctcctcaagagaaaagggatttaaaaactttcatgatgtatttaaattcaacatatcttttgcctactttaaatagggaaaaggtgactctaaggtcataacgtgaaattgactttacccttcctggtatagaatggcatttcacattgagaaaaactagggagaagcactgaagaattaatgggcagtggggagagaaatgtagttcattactttattatttgtcgtggtaacacatactttatacaatctatcactcctacttgtccaaatatgtgtttctcctgaggtaaaatttcaaaaattctagatgatgttttggaggttctgtagagaaggtgaatggtatagagctaaagcaaatcttgtatgatttttttatttaatatgtttacttcctatacctatgtctttactgtgtatacatatacacccatatccctatatattcgcgtgttcacttttgatttcaaattttatttgtgaaaaaagcagatttattyttttttttctttgagatggagtctcgctctgtcaccccctggctggagtgcagtggcttgatcttggctcactgcaacctcagcctcccaggttcaagtaattctcctgcctcagcctcccgagtagctgggactagatttattcttaatcccatttatccatgtggagaatatgtcaccctgctcatttcactttgcaaaccgacttactattctttgtacctctctccttctctttttgctctgtcactaatagagctttcagctactaagacacacaggagtsctttctagagagtaactgaaattaaccacatacatcattttggtggcaaacctcacagccaccagtcatttatagtaccaagtccctgctctttgggtaacagtggataagaaatgctacacaagctccttatgtggagaaaagactgttctcctatttggaagccttgtgcccatatccatgccctttgcacatttatcaaataaccgtgacttgtcctttatgttttttcaagcatttgtatcattaggcaaggctctgcctaatggaagagatttactcttactctgtgcccaggtggctcgtccatctctgggtattttcaagcattggaggtggcaatagtgtgcttagcctcaagactgagcaaagaaatgaactttccagagattactcttaaaatatcccattctgagagcacatgtttctcttagtactgtttactccggactttcagggtcagtaggcaagcttttcaacaaatttggtttcttttaaaaactatttttggtagttttgttaaatgtgtctggtaattcattttaagtggaaaagggatggagataaagggtaggtagaattgtaaatgtcctaagcctcttttatcatcctatgtttttgataagttttatctggtaacagacaaacattgtagaagcaagaaggggtttaatgttgttaaataaagaaaatgtattaaaagagaaaaacgaggcactgggctcttctactcttgtttatattcttcacccttgtgttccttctactcaggactccattgtaaatgctcaggattaatttttttgtcatttgatgcagttctatactgtaccttgtctttctgcaaagcaaagataatattgtagtttaaaacttggctatccaccaccatgagggaatatgcttctcttatttttctgcagaaacatttaaaatttcttcagctatattttgtacttacctgaattttaaaaatagaatatagataatacatttccctatttttgtgactcactcactgttattaatagttatttttctaatttgaatattatgctttgttaagttatttagaaccacttaccccatctgtaaataaccccgaactcctatactgtcatcacctttgtttcttctaacatgttgtaatgtaaaatcaaaattattaagttataattatttatgatataagaagtattctgtggataaagtatacatttattttggatatttagaataatttttgtttgtttttggcataattcctttttcttgactatttacaggaaatagctagttataggttttacctaagtctcattcaagctaatggattatgcaaataaagtttgctcactgaaggacaagaatattctgtatcttttttctggttcttcaaggtgatagttcataaagaatatgttccattgacaaagttagttatgttttttagcttattaaactaatttaaggacaaagaagagaaaataattttcaaacccactgtgcttggccctcactaattatgtttttgcctgtgagatacggattttggaggctgtatttgcaataagtgacacatacacaatttataaatgataaaatataaaatatttgtcttaaatagggagatgctgtaatgtctctttcccctcttcaacgtatcrtattacagtgattcctcaatgagcagctgaatttccacctgttcttgacgtattacctatcaccatcaggctatgttatgaaactcacttttagagataaagcaaattrtccaaatgtcaccaattattgaatctaaatgtgggcatacaggttttatttgaagcagtctttcagcttttctatatgattacatttttatttaaaaattttgaataggctgggtgtggtggctcacgcctgtaatcccagcactttgggaggctgaggcgggcggatcacgaggtcaggagatcgagaccatcctggctaccacggtgaaaccccgtctctactaaaaatccaaaaaaaattagcccggcgtggtggcgggcgcctgtagtcccagctactcgggaggctgaggcaggagaatggcgggaacccgggaggcggagcctgcagggagccgagatcgcgccactgcagtccggcctgggcgaaagagagagactccatctcaaaaaaaaaaaaattttttttgaataaatagaataatgtgatagcaaatggctagacagctattaaggtggtcaaggaaaacccactaaaagaaaccagcatagtattttgtatgagcatagaaggtgtgggttagagaaatccaatgtctctattttagaaagaaatgtcatcaaggtggacagggaccagaacatgtagcactttgtaagccacgaaaggcattttcattttattcttgtagattttaagtagagatgcagctttcttctcacatattttagaaatatttatttggttaccatatagagccagttctcatatagagaatttattctctatatgagaatagagaataaatttggtgcaagaaataaatatcgggtgcaagatctaaaataggaagacaggttatgaggctgttggatccccattataatggcagcttggatgagataggtttcatgaaaatgggaaaaagcagacatgtgtgggatgttttaggcagctggaatcaatagtacttattaatggcccagaggtctgggtagtaaaggaaagaggagaaactttagataaggcagttagagaaggaaaatcaaggatagattctagatttttgtcttgagcaactgcatggatggtgatgtcattgaatgtgatggaatagatcgggargggtgcaagatttttcatggagggaaggccagagaagaaacagttctgctatagccatactgaattttaggcaccttttagacatctaaatagaactattgatttaatatttggatatgtaagtctcatctgtatgccatctgttctggctatcttacattcggatcctgtgtattttttacactggcctggaaaagctggcaaaacctagaactgcatttgtcccctctgcgtttataccatttcagttgacaggtctaattttaagttccaccttttcataattgattattcatttgtacacaagtatttgttgagtaccagaaatagcatttagtyatttcaagctttagtttttcatcatcctattctccagatttcagcagcatcagaagccatataaacactgccttcggatggcccttagatggccaccaagatcccctagttacattttctgtgtacaaagcagaagaaagatgtccttcattctgtacacagtgtgctacactgtggtttagtttattattaaagagcataattaaaagaaaaaatatgctatttaggtttggattactaattttaagtttaaatgcctttatatcatatttctttgaagctagacatgtattcaaacctcagctcccccaataattagatatttgaacatggtggaaatagtgaacctatcatctttaaaacaaaggatataaaatctaatagagtggataacatgattataataaagatataaagattataaaatattaaaagttcaatattgtcattagactctaatcaataatgagtatatcacgtattatattttgacatgaagaactatctagccttagagctttgaaatataactaagaaatctattaaaataaattaaatagaatatattccaaagtaactaatgttttcccatattaactcagaataactttgtctgaaattaaactgaatatatatcatttataaatacaagcatagagtttaaattcaggtaatcttatttggatgtacaaaccgtgaatagagacattaaggaaaagtagtcataattaattatatcgaatcttcagagttcacaccattcctcttcctaaaaacacatacaggtttaggctgatcaagatatcaatgtctgctctgagatcatcaaagtaatgcgtccattctaagaagcactagtggcatatatgatcacggtagaagagcaagaaaaggagccctcacttagaaccccataagacaggaaagatacagcatcaacctgtcctctccagtttatctgtgttatggattgtaagagtgttttgaaataatattttacttagtaaagtaatatccacaagcatttcaccatgaaaaacattaaacattttaagtatataatatgaaatataccatctctgatgattatttttattgaccatattcttgccaactctaaggtactctaacactagaattttaaacttgttatatttgttactttggtacgaatgtcaaagaaaggtattacctgtaagtattagagcattcctcattgttcctaaacaaagaatttctttttatgtagtctgcactaggaattggaaatgatgcacataaaatacagctttttaatctgtgagattgtttatgcatcttaggtttgcttagttttgcaaatgcgtgcatttaaaatcaccatttgtattttgaactcttctggcttttaactgtagtggaaatttggattgaagacaatggaaaccgtgaggtacaatatataaacttgcatccaaccgagaaaaaccactactcttatctgcacttcaatcagcaggaggttctttttcagtttgtttagaaaaagtagggcctgtcatctgcatggcatacaatctttacaaagaaattttcttttgccctttgtgttttaactactgagtgctgcagaaacttctgtctaactgcaaaacagtttaaggtatcatctatgacaatgttaaaagtaaaacccaatcaaagtttatattatcatgcataatagaccaagcaccattatctgaataccaaacggggccaaataattctctatgattcagatgagacataaaagtgctttaaaaacaagtatgtggtaaaaatcactttggaaaacctttggcattatctaatgaaattaatatgtgcctactctatgatgttgcaattcaacttgtaagcatatactcaagagaaataggtgcacatgtgtacaaagacatattcaagaatgctcataacagcactattaataatatctaaagctggaaataaccaaatgacatcgctattggcatgaataaatatttcatagtatcataataataggaatactataaagcagtaaaaatgaacaaacaactgttatacccaacagcacgggtgaacccttaaacataatcttaaggaaaagaaattagacataaaagagtatacagtgcctgattccattcatataacattcaaaaatagatgcaattcaactttcatgctagatagaagtcaggatactagttatctttggaaagggtagagatagggaggattcttagtatgggcaatattctctttagatctatatgatggttacataggtttttatatgtaggttattaaaataatatactgataatatgatcatacattgaggtttttatttattacaataagttgagattattcaaaggtacatttgttcatttttctatacatatatacattatatattacatatacatatatataccaatttttaaaatgttctaagagaaagaaaagctcaataaataaaaacaccccatttccttgtcactagagatgaattactattatgttcaaatcgtatatacagcatattttttatatatgtatctaaaatatgctgaataagcaaatcaacaactacatctagacttctgcatcgcaaaccagaactacatttaaatgcattttatctcacacttaaagaattaaaataaaactcttttctgaacaatcttccaatatattgaccataagtaaatgtaatatgagtcaattattttaaccgttttgtaactcaatgtctgttggatttatcttgatttttataaagttcagcaattcaatttccacattttcttttgtttctatttttgtgaggcactatagtttttatgtaataaatgttactgatatggcctcctacttagaaaatgttattcatgagagtatattgattttagcaaaatttacatatttacatatgtacatccacaggtttgcatatgtaaaaatatagattatttacttactattgaaaaagtgtattatggaagataaaaggttttcatctctgtcatacgacaggtgaactttggtaacataaggcctagcaaagttttattgatcttacatatatatatatataaaatggtttttcataatttcatgggatgcatcatccaagagaatgatcacagtgatactaattactgccattgactagccacctgccacatgccagacacatggtgacatggctgatgataacatgtgataggtgtttcccaagagagtccctttaaacaaggtttttttcctgtcttcatattgatgaagtgttttttctaaagccattatttcatttattctatgaaagacaaaattggcattttaaaagtagaacacrgtcttttgatacctgtcatctgagatacctaaaggattttttttttaagttagcatcaagggtaaataataacaaatgaagttattttatgttagatcttgtaggtctaaatatatgcacagcaatatttaacatcctgaaatcagaaattttgtttctgatggcatctctttccattatgtgatttgaaacattttagggatattttcctgtctactttgcatggaaaaaactacagactttgtcaaatctagttgccttggaagaagaatgaataagaggagatgtgttaaacaatacaaaatatttttgctatttcaagtttgaattgattttgaaataatagtttcaggctaaataataaactgtctttttaggaaacaaaagaagtattttagaaaaagacattaaaaagactttattaaaatagaggacatgatgatcttgtttgttgctttaagcagtttatgtagtaactttaaggtggtagaaagtgtcaggaaatcaatttgaaggcaaatcttcacatatgaaaagaatcagaaatgttaactcaggtcttaaataaaaaggaagaattaatatgatatattaaaagtgatacgaaagtcaaaggaaagattgatgagacttattaatatgaaatgaggtttcttcaataaatatgtaagtacaaaaaagttaaattgtattaagaaacttgagatttaaaaaaaaaaaaaagcgaagtatttaaactacccctcttgagctcccagccacattcctcttagttgtctaataataacacttcttggctatttcactggatatttctaaatgatagggtcctattcatatatctcaacttgtcaatttttaatatcatcaattgacattccttttttagaaatcatgacttagctacttatactccatcttcagtgcttatccttctaatgtaatactatcataattttatttaaatactatatgtcttttatgacgtaaatattgtctaatactaaaacatctactattccatgtttctgtgttttatcttaagaggttaattttatttgtttatttttcctgggtctttagcttttcttgtattcttgtcctatttgccattattatattattttcccactaacatttcaaaatattagttattctaaatagtctgacttttctttagagttcttcactcaaagtcctctatgttctgcctgaattaggattgattattccctatgcccactgtactgtttttctacattggatctaccttgtcagggatccacaccttcctctttcttggtttactttctcattttgctggagcacatcctcaaatggcttcttaagaaatattacatgggcagtgaattttctgagtccttccagtttaactcattgcaatatacaaaatggcaggcccattcaatttatatacttattccttcaagttttggtaatttatctgcattattattaaataatatattaatatattacttaaaatataaattaaaacataaattccttctaatttctccagtctacttttttgaaactcccatgagtcaaatttttaccttgttgtattggtgattgatattatcatttctctcatattttcagtatttttttgtttctcttttgtgggtgatgccttcaacttttttgtccaagagtcatattaaaactttattttaaaagatttgtatttttccctttttaatattattctatttttcttcttgaatctcttcaaaaatattaattagcagtttgcttttaaaaatattatcagttttttaaataagcatttgtcctccagattttttcccctgtttaatgttgattcttcttttccatgagggactatttacgcaacaatctacataatctttattccctactaacatttaactgtgatatcctaaaatggcctgattgaggaactgattgagatgattaagagctctgtagcagggcgcagtggctcacgcctgtaatcctagcacttctgtgaggctgaggcaggcagatcacctgaggtcaggagttcgagaccagcctggccaacatggcgaaaccctggtctctactaaaagtaccaaaatcagccaggtgtggtggcaggcacctgtaatcccagctactcaggaggctgaggcaggagaattgctaaaaacttgggaggcaagagttgcagtgagctgagatcgcaccactgcactccagcctgggcgacaagagcaagactccatctcaaaaagaaaaaaaaagaaaaaaaaaaaaaaagaagtctgtgtatagggcaggacgaaaggtgatttggtagaaagctagctgttttgccaggcagcattaaatgtaagaatgtgcagattttttcctctgggatcctgtcatttctccagaatggtaatctccatacttattcctggaggagaggtggttacaagtattctggggccacaactattcttggccttttgtctacccctgaagtttccatcactggaataaactggacagttagacagattaacatgagaaaaggcatacacattcattacacgcacatgtacctggaaggcaacaaagtatgagacttaaagaggggccagatggttgaaatttagatagcatctggagatacggaaggaaggaaataaggacttaaagtctcttagtaggtggtggcaacaagctgtgggagtgtgaggagaggaactgcatggcaagcaaaggttgtcatatcatgaagataaagtctctaaggtagcaatcctcagaagaacacgtgaaaaggtgtcccaggcgtggtgtcccgggagtttcctctcctgagataggatttaatcttctctagttcatgtagattccagggaaggggttcatgacaattacattccttctggaggaacttcccttagataagggggaacttcagagaaagcctctccctgtgcttgaggagaggcagaggggcgagagatgggagtggaaggcaagtcagagagaacttggttctaaggcggcttctttagtccaaagtgctcagctcctcaaagcgccatactttggagtactattttctgagccctaacagccacaaatggaagaagtattcccctgtacagaaaagtttgcattacttttgtcagattatgtctcttaatataatcacattttatgaataagttttatttcacttaacagatttatttattttttaaaaccacaactttaattcccaagtaactcttagaagtttctccyttttggattttcattttgatgtttagtaggcttaaattccagtgtttaacacaacccccagcttttgagtcacagtttatttcattatagtagacccctgattgccaaattacaatatcttatgaaccgggcaaaatgttgacttatttaggacattatgttacctatttattccaaaatatttcatttgaaaatcagctacattcccatgtagacttttctttatacaaaaattaaaataattacagaaaggtaaattattctgatgctaaaattagcctttcattgatttcaagtagattgtaattggctaggatcaaatacatgctttatgtaatacagtttatttcttaaactgatacagaaagtgcacataattctggaagtaaaaatgttcaaaagctaagaagctctcatgttatttttcttcaatttgctacaaacatatatagagtgtagttattttctagccataagaattagcagaagctttggagagaaaaggtaggagactgaatgccctgagcatccctttgaatagctcaggcaagaagaggtgctattatcccaggaggagactgtaagtgacgtttgtgtaattcaagtatgtcctgcctggataaggacttgtgggtaaggaaacagagtagtaaatagccaaagggaagaaagtcagaaaagcttgctgtgttcctccacttaaatatatgttatttctttagggactgcaggttttacaaagagatgaagactaattcggaatgctacttacctctgtttccaaaagaaaaagactcctccagaatgtggttttaagtaggccatggaccaaaagtaggccacaaggcatggcaggcagctttatgaacttcaaggttctaggaaatttcatccattggagagttctccagtgctttaaacaatattagaaagaaaacagcggtacaaatcaaccatgctagtaaaaatctctcctgcaagacattactgagtggtgaagactaagtggttttgccattgttgttgtattgttggttggatggtttgccttggatatttgcttgcttcttttttgttgatttttagcatataaataaaatttataagcccaacaaaagaaaagaaagcaatctttcaagaggctttaagataacatcatacattttcgaggtttttaaggctgagattctattttgttttacttaaaaggaatgttacaatgctgttaacgtttttgcttattctacatttttgcttattcatgaaactcgggagaaattctgtctattggcaggctctcattgtgtattcatcaccacactaaccactcatttactccgaaattaagtgctcagtgatatgcatgttataaattcattctcagttgcaaaattttcttggtgcttaagaaattgtactttaatcgcttttagccaaaaagtttagcaaaaatagtactttgacatagtactgacagcctgtgcttagattttgataaatgtggacaaaatcaatagatagatgcataaggagtgcccagataaaatcatcatacttcaaaagctttttctaacataactcacagctgtagacttttcctttcaataataagcaaaaacaattttcatagctacaaaccgccgacacaactttctattyaaagaggacttctttgcaggaggcagaataataactcaacaaaataaatagaatctctaatttcaaaatactattatccccaaaagtaatgggaattttaaaaattatttagtgtytccagtttagatatttaagaacaccactcacatctacatgccaaataaattgactccaccctccacccgttatatcagggccccactccatccattgtcttttttcttagttatatcttgatatgtcaccctattagttttttccttgcagcatttcacttgcttcttgcyttttttaaacaaaaatttatgcactaccctccctgcatccatgttcctgctgcctcatattcattcattcttcagctggtggcaatcagcattcagtttctctccataaaactgttattaaatccaataagcctttcatttctgaatcaagtgaagatttttctctatctttgctgaattctttatggcatttaacatgtcttttcactccatctttctttggggactctcttccatgacttctaagacaacactttttaattctcttccaccattttaggtttgtctttgtaggtaacctttatagattcttctgtgtaatccttacataccaatgttctgaattccattctgctcctctttttccattccatagagtctgattgtgtacttgcaaacacttccatggtatctatttcaagtgtattttgaaaagtctaacatctaggctttcaacttgatctgttgtactttctrtattctatacctgagtgtcagcaaagacgcctgggagctgtctttgagtcttccttctctcttacctccatatttaatggattaccattctcattgattttaccttcttaatttctcttaaattgattttctttctctatacctaatgttagtacctttcygccatgtttctatctggtttacattgctggaacagcacctgatttgctatcttgttcttagtcttgccatcccaacttagtccattcctctgatgtcttttcctttatacagttatcataccatttatcaatttgcattatatatctgattttatttacttataagtcatgttctttgttagctcattaggtaccaattttatatcaatattatttttctgtttgtcattcagtccatttttgttgttgttgttttgttttggttttagagacgaggcaggtgaataggtatagactgaatgctcctaagctagatgataatgaccaaatgattactgagacagggatgagcgatggtcagtgaaattgaaaggatattttagcagctgctttaacaagtatctgggaaaagtccggtctcttccttgcatttctgaacgttaatttgtattaaaagcagcatgactcagaaattttatataaaactcaaataaaccttagaattggatcttatcgagtattgtgttatacagagaatatggagaatatgtgggataaatgagtcaaatggtatgttaaaaaaaaaagtaggaagcatgatagactcaattcttaattcctagaggaaacagagttatgtccaaggaacatattcaacccaatcactgtacagctgtagctttttcttttctttcttttttttttttttttttgagacagtctcagtccattgcccaggctggtgtgcaatggcatgatctcagctcactgcaacctctgcctcccaggttaaaacaattctcctgcctcagcctcccaagtagctgggattacaggcacctgccaccatgccagctaatttttattttatttttttgtatttttagtagagacgggacttcaccatgttggccagcctggtctcaaacccctgacctcaggtgatcctcccaccttggcctcccaaagtgctgggattacaggcatgagccaccgtgcctggccaatttttctaaataaattaatatgatgatgataatggtatatccaaatagctacccagtttttgattaggcagaagtatgcttatggtcagtcagagtaaaaagtgagaccagcatggtggcatgcacatgtaatcccagctacttgggaggcggagacaggaggaccctttgagcttaggagtctgaggttatagcacactatgcttatgcctatgaatagccactgcactccagcctgggcagtgtagcaagaccctatctctgaaaaaagaatcaaaggccttaagaaatattttatttttacctcagaaaatttaaaaattaacttagagctaaatagtttgggtttcattatgtgtagaaatgaatcttgcaacagtaacagtttcccattacacattataagtgtctgttttgagtaaatttgttgaggagtctaatttagtttgaatcactgggaaaagacacaattgaggttttataaaatgtaaaaaatcaaatgaactctgtactttcacttttttacataaagtacatcttccacttctagttacaaaaaattttttttttctcacttgagtcgtttatctgtagtaagtaaatttgggaaaagtgcaagtattcatatacattgttttgcatttaaaagaaaagtgataatgttcaaacccatgctatttacaaaaatcaaaagctcaaatcatgaattctgtttgtgttaaggatttaaaaaaatagtggcgtgagaatggttattgctcttcaataaagatagagataccacgttttgctttaacatatctagaggcacctttttcatcgatagctttattagtaggtcaaggagaaatcatacctaagtagaaaggtccgtggagaaaagagacaaaccatatcagagttaaaattaaattgaaaaaatttaaatcaaggaaaccattttcacttctttcgatatgatgtgcaaaatcatgcattttaaatgggaaatgggaaatttcatagcttcttagcaatgatgtgagctctgtggtttgggtggatgcagggcatgtgggtgcttttgctcatttaaggaaattgcatttgaaacattctcaatacattatgtagccacaagaaaatttatagtgatttctttttggtggaacaaagtatatgctcttttccagctcaggatccttttccagtcttcctacacttaacagccagtacaaacttagtccatagaacgtatttgttgtgcacagacctgcacaaacacacacacatgcaaggttgcacgaatcaggtatgtattttgtgtatgtgtcaaacttagccatcaactggaatttgtgttttagtttggatgctgatttacctcatcagtaaaatgcccttcacttactctccctagacatagactattttccgtaaaatatgttagtgatttcatatttaatgtgatatggaatagaatgagaggttgtgtgaaattaaaatcatgatatcaattatctttctgtcatgcagaataaaataagtgttttgacagatataaaaaatatttatggtaattaagtacattcatactgtatcagctaaatttgtagaatattgatttctgtattaaattatgtaacattttaattaaaataaatatattgtcgagttgtgagcagcacagtggtaagaatattttgcatgaagatggttacataaatatgcactaaaattgagtctaactgcaaaaaaatgaatgcagtagctacacatttagaaagaagttctaagaataaagcagtttacaaacaaatagtatatatacatgtatatgctttgttagaagaaagagaatttattgtgagtgggatactttaaatctttcagatgttaaggattctatttcccaaataacttcattcatgtaagaagtatacttcatgtgagtcaggttttattctctaggtgttttctaatgtgggaaagtgaaatacaagggtttgaaatggttctggggatgcagtctttcctgtcagattccagcagatgctgatataatttaatattcgtggaagacagggcaaatatagaatagcatcaaattgattttgcagagttttcaagccagatgtcccttggcatttacatggaagaagtctactgtgtaccaagttgcatatttttgtgtgtaagttctcagccatggtatgtagtcattggtgttttgacagccatctgctcagacctttatttctctgttcagccataactaaaattgaacatttttcaaatgttccaggtagtttcaattttaagataacagaaaactagtattcaatggttaaaaagaaaaaaagcaatacctatctttggcttagtaataacccctaaattgaaagttaatttcttataaatagcagtgcaaaatgaacaaactttgagaacagaggcctcaccttattatcaaatgagtttgttttaatcatgtggaaggctctcagctagacactgaggaagttatagaaatgggtaattccaaggtgaatgttccaaggatagctatgtcttatacataacaagcacttcatcattatttgctgaatgaatgcatatgttagaatccatatgtaatagcttgtccatttgcacatattttcaccccactgatagtttttaatatgtggaggtacacatacatatctctgtgttttttgtgggtgagatatgtaggctaacatgtcgtaagtgaatgaaactgtgtttgataagaactgtcaagtgttgactatgcacctattggtgtgctagacattctgaagattcagaagaagtatacaacattatttctaatgttatgattacatctacagacaaagaatcaaacaatgattctttttaatggtaacttgtgttttttaatgttaaagatatgggccaaatgataaagaacaggaaaagatgagtttttttctctatcagaaggatagattttgagctaatcttgaaagaaatactaaatttagacttatggagaataatttaggaaagcaattgaacactacccaggggaggtgggaagtgagatgctgtgttcagagtgagataaggaaataatttgaccagagcatgggattttaattgagaatattaagagataaaattataataaatgtagggaaggtgtatcagagtgagattatgrtatactatacttgaaatatctaaatgaagtatttatgtttactctaaaagtcaagtgagagagattctggagtgagacaagaatgtgaggaatggggacttctgtggagtttaatctatagtaatgcacatgaatctgataaattattataatctttgcttttagtagaaatggggatttagagtayatcagtacaggtggcgaaaaatgtgaatttaaaacatattttgaaaaacaaggataagaattagtgtttaaaagctaaaagagaagaatttgtgtcagctgcaaaataaagtaaatacacatacacatacactacatacatgctcataatttaaattatgaactattttatcacactctgctgtgtaagtttttctaactcatattgtatatcagccatgttgtattcttgcattaattaatgtattcattaaatatgtcttcagtactttttttgggtccagcattacattaggcagatatattattcagcaagttttcaayttagttcagggaaagagggatgataaatattattatgagtgtttagaaatattaagaacccgaatccatttatcagtttcataacaatgattttcaagcttgtttcatttctcacagggtagacaaagacaaaatatatatctcataaaagtaataatctaccagkcatgtttgttgtagccaagcaaatatatagaattctaaaaatattgtttatagctcttgtttcaacatgcttgggacaagttaatgtttacagttttgtgagtgaatgaatctatatactgaaaacatttcattcaataagttgaccttcttgaggtttgaataaattttggagcctgagggaatcaatatggtttttaagttgatctcctaggtatgtctaagtttaagttcttaatataattatcaaccctttattattttaatatttcattacattaattatcttttggaatattttcactgatcagtaacttctagtcataagccgttctggtaccaatcatcaaatttcatatttgtaagaaaaaatgactagcctttggctgtcttgacatgcccaaatccaccaagtatatatctcacttccaaaatagtctcaggatatgttttctagatatgatcttagatgatggagtgtattgttaaattaacaagtagtataaaaatagacaaaatattattaaaaatacaaggagaaaggaatatgttagaaacaagtaagaagttccatatggaaaactgataagcaattttttagaagcaaaaatctcatgacgctaaaacaagatgatgaagaaattactctgtgtgcaagtgtggagaaaaatagcttgtgataccatagtgatcttagagctcattatacatcagcaatgaagagctttaacwaccatgcaattaaaatactagagagtataaataagattgtaccatgtgtatgtggcagcatataaaaactcagaagtggaaggaattttagtcaagtgttactcttgaaaaagcaaacggattaggaatatttaattggagaacaacatagacaccttctgtaatattattcaagtaagaatgtctcattttggacatcttacttatagtcagattgattctcaaaacactttttaaatgtctagaaatatttacaatggtatttatcctgagaaatgctaaaaaaaattagaaaatgtaaaggtgactgaagttaggaaataacataaaattggtaatgatgagcaattttcttaatggctgttcataactggaaaaaaacagatatgctccgaaatatatgaattgtgagataaactgcagtaaaagaccccaagaaattgagggaaactatggaaatgattgtagcaagtggtagcaagctatttttgtttgcattttgaaagcagtttttagaaatttctaattttgaaaatcttaaattgatttttaggaattctggggctacttttttctcagacctctagggcaaccaattgtagagacttcccccttctgttaattgactcagatctgcttacatattaaaggccacctctggttctcagctggaaaaaagagttcctcccttttgaaacagttgactcagaatcagttccttcctttcagatccttatctttaattactttgtcttctaacctggggtcctaatctttgcctaggaatttaaagtaaagrttggccgaatcttatttctcttgacttgtatctacctttactttagctcaccctctgggcgtggcctctagccagtctcactttgagtatctttgaaactctctccttattgtcaaccccttactttgattattttttttaatttaatgtttccaatgtagaaatacatctcaaaaattatgcagaagttctatcatataatgttcttgcatgggtctgaagctctttgaaggcaagggtccttgactrtgttgttcattgttgtgtaattactgcctagatgagtacttggaaaggtggagtgattcaatgaatatgtgttgcatatagtttaagaagaactgggactggaattagaaacacatgttccgtctttagcaaatcacccatcattactaatcttccattattttatctatgatattgagcaagtaatgcctatcccatctatattatagctttgttggaagactcaagggataaagtgaaaatgctttgtagagttcagtgctacacatttattatggtcaatgaactgcattacccaaaccaacattaattgtacataacatgtgacaaagaaaggcttatggttttggagtttgtttattttagaagaccagataaactagaacaaatattttccatgaagaagttttttttcgtgttagaactcatgtgattaaattgattcacaaaatttgaggtcatttattaattttatgaatattttactgagcacctatatgatgtcagtgactctaattgtctctgaaaataaaaagattaataaatcatggcttctgccttcaaggaacttagagtttagtggttatagaatgttggtttaaaaaaaatggcaaaaataaaattctgacaaaaactcataatatctgagagtttatatgtgcttgctaaatgaaaagaattattagcaatactatgctgaatgactgtaaaatgctgactttttacttgaaatatttacaagaggaaacagaatatttgtgggtttccctgcatatttatgtgtgtgttcaaacagctgctagagaacaaagtgttttgctataaacactgtcaaatctcactgtgaaaaaaatttgtctataaaacaagtattttcatagatacactaaagctgcatagaatttgcttttatagcataaaacagaattagatgcttgagtcagctatgaaatactttttcatgcaacactcattctaattctttacactatgcattaggctgaggcctggtgtaatttgaaagtgataatgcaatagagaaattccagaagctgggggtggggggaatagactggatattgcaaaatgcatcagttagtcaatcaaactcctaatttatcaaccaaaccaacctaatcccatagagaattcaaagtgactcacgaaaagacacacaaaagaagaaatgttttgtttattttccaagatggaaaatgtaaactatccagaggacagtggtatgggtttagaaagacaattcacacaataaattttaaggaaataatggttttagtctttgatgctaacattatttctgggcttccaagtcactaaaacaatacatacatctttttaaaatgttatttttgttgtgttgtttggttttgtgttttagtctttttattttctgacaaaagaaagtttgccatgtctccagaacaggcacacaatttatgtactaaatcctgatatgaatttcttttcttttcttttcttttctttttttttgaaatggagtcttactctgttgcccaggctggagtacagtggcacgatctctgcaacctctacctcctgggttcaaaatgattctcctgccttatcctcccgagtagctgggattacaggcatacactaccatgcctggccaatttttgtatttttagtagagacagggtttggccatgttggccaggctggtcttgaactcctactcaggtgatcctcctgcctcggcctcccaaagtgctgggattacaggcatgagccaccaggcccatcctctgatatgaatttcttattggagaatccctttatgtgtccagccctgtggtaggctctgagaatatagtaatgaacaaggtaaacaaaacatacatagtctctcccatcatgaagcttacgttccagcaaggaagctagaccttcaatagataattatcatttaaaattataccttgtaatcagtgctatgcaagaaaaataaggcagaattaggggctgtaatgaaggacctgtttacaaagcattaggaaagccctcatggaggaaataagacaaggaagaaacacttgtgaacaataggaaggtatgtgaagtgaaggagcgttaaggaacagagatttctagacaagccctaagcaaggaaaaagcagagctttattctagaatcggactaaaggcagtattctttgaatgtgatcagaggacattgtaagccaggataatcattttgaattttaacctaggtacaattatgatctatttttaagaagactgacttgatcagatttgaatcttaagaaaactcattatgtaaaaaaagggctaaagaaaggataagggtagtcagcaggccattcaggaggctattgcagatgtccagatgttacaaatgcttgtgacttggccccaagtattggcaatgaccctggagagaagcagatggatctgatatttatttcggagttagcataatatgaaatgatgcaatggcatcaataacgactcccggttttctctatgagacactgggtgggtaaactaagatgtgttgagcttgagagaattcaggagtagctaaatctgggtgtcccttcgggtggggattagaacgctgaaaaccacgaactctactttggagagtaatattaaatttgtgatgttcctgagacgtctaaaaaaatggagatttaaccaggcatttggatatatagctctatactttcagaaagatacctggtctggagatataacttgggagttattgactctacagatggtgtgtaaatgggttggaagtgggtaagatttggggaagagaagaatgaaataagaaaatgatccaggattaagccctgaggaacgataatagttactgataaaaaaaaaaaaagaaaagaatgaagtaaatgaatgtgacttttctgtttcattttgtctaagtcttttaagccagagaaaacataatgtgraacagtgtttttatgtgtgttttatcactagagataagaaattgtcaagctgtccttaaggaccagggagggcccatggggaacagcatctttcctgatgctgttgtattcatcaaagcatagatgagtctcttctgatatttttgtttgaggaacatgaatataagctcatgctcctagcatagcaattagtttagagatttatcattgttttatttttattttttgaattattaactgcagacaaagccctaaattttttttgttttctatatcacaagtacctttttttggtttaaggttctaaatttcattttccgtgacttgaaactgttttgcacttcctctccttgctttatattttgagtttacacactaacctgccaaagagacatctagtttataggcttgattttggaagaaagacagaagagagcagatactgaacatatgttccgctgatattgatgaagtgaggttggaagaagcttggaagcagtctatttctctccaactgccaccccctctatgaatattttgggtacccttatgctggaacattccaaataagtgccccagctatgggttttttttttttttctcataatgattctgaaagcctttgggatgatttaggattgttctacaagtggaacataaaccaaaacaaagcagttcgtggactctaattttaaatgggtgatggatgagatttcaatgcaaattgtaaagactgaaaatgatgtgaccagagaagggacccctagatagtaagtactcaataaatgacagaagcagagtatagtatgaacctgtttcttgggaaaatagacttgaagttagacaagaatctatttaatcaaactctagatatgatgttttgctaacttttgttttttgttgctttggttttttggagtttttttgcacttcaagaagtctttttgatctgaggtagggtagtcaactctaatttattaagcatgaagtgattggttacaggtattttaacaagtatttggaggagtttggggaagttgaagtacgaacacattatttgaagtcactgttacagaggtgcactattttgtccttcctgatgtagccattagtgttcctacaagaaatctggattatcatgacagtttttttttcttttttcctttttctttttttaattttagatttaggggatacatgtgtgggtttgtgacatgggtatattgtgtaatggtgaggtttgggcttctactgaacccatcacccaaatggtgaacattgtattcagtcagtaatttttcagtcctcattcctctcccagcctcttcccttttgtattcctgggtgtctattatttccatctttgtttccatgtgtatccattgtttagctcccacttagaagtgaaaatgtcatattcaattttctgcttctgagttatttcacttaggataatggcctccagctccatccatgttgctgcaaaggacatgatttcattattttttatggctgcacagtattccatggtgttcatataccacaccacattttctttgtccaaccaacacatagattgttgagcacatagattgagtccatgactttgctattgtgaatagtgctgcaacaaacacacaaatgtaggtgtctttttgatatagttagttcttttcctttgggtagatacccagtaatgggattgctatatcaaatagtagttctcttttttgttctttaagaactctccatattgatttccataggggttgaactaatttacattcccaccagcagcgtataagcattcccttttctctgcaacctcaccgatatctaatattttttgactttttaatactagctattctaatttgtatgacttggtatctcattgtggttttaatttgcatctccctgatgattagtgatactgagcattttttcatttgctttttggccacttrtatgtctttttcttttcttttcttttcttttttttttttttagaagtgtctgttaatttcctttgcccacttttaatggagctatttgtttttttcttgttgatttaagtttcttatagtttctggatattagtcatttgtcagatgcacagttagcaaatattttctgtcattctgcagttgtctgtttattttgttaattgtttattttgctgtgcaaacgccgtttagtttaattaagtcccatttgttcatttttttttttttttttgcatttgcttttgcaattagtcttagtcattaattctttacctaggccaatgtcgagaataatttttcctaggttttctttttatggtttcaggtcttgcatttaagtctttaattgatcttgagttaatttttgtatatggtgacacatagggtccagtttcattcttccgctagccagttattaaatagggtgtcctttccccattgcttatttttattgactttgtcgaagattagttgtaggaatatggatttatttttgcattctctattttgtctcattgccttatgtgccatttttataccattaccatgctgttttagttactatagcctcatagtctcagagcatagtgtgaagtcaggtgatgtgatgcccccagcgttgatctttttgcttagaattgctttggttatttgggctcctttttgtttccatattaattttagaattgttttttctaattctgtgaaaaatgacattggtaatttgatagggattgcactgaatctgtagattgttttgggtagcatagtcattttaatgatattgattctttctatccatgagcatggaatgtttttccatttgtccatgtcatttatgatttctttcctcagtgttttgaagaaatcataatcaattcctggtagagatcttttacctccttggttaaatgtattcctaggtatttcacttttaatagttattttcttatgtatgtctaaattttaatcacagcaaatttatggtgtaatcctatcttaattagatggatgatgtcctttgttgggaatttaataaaatctaatactgcttagctggaccaagtggataagatgacatttgaatccatagtggaccttgtagcccttcttttatttgggtatctactatatagagaaaacattggtattctataaacatgcctaagatccattggagtatgtatggttagctctgtttattttctttttggttacaataaaaatacttaacattttcactgtaacctgtttggaaggaagagagtaagcaattttaaaaattaattcaacagagaaacatgtactactttttctgattaaaaaaaaaaagaagaagaagaaaagagcccacagcagctcagaagcctccaaaaatactcttttattttagaagctgaaaagggcagatctaactaatggtacaagacaaattgaaagtcctataaacaggaatagaatacttactctctttggttttgtttgcttctgaacaactggattcaaccttctttctttccccccagctcttaggcattgttgtgtcaggacagctatggttcaaattgggctgattttccagttctattaaacccttcatctgcatcgtggatcaaatacattaactagctgtctgcagtgcacagctggaaatcattctcttccacattttgctttgtgccatttttgttttataccaatatgctctgacacacccacatagctcaggatttcagcagtcaattatctccttttcttccttgataggtcttagaacattttaaattggtgtattctcttttgtcttttaaatattgaatcacttgcaaacatctctgcttgcatgaatatttttcaaaatgctccatagacctagaagctgaaatggaaagttagaatcattcaaacacaaattttgattttattcctttgagagatggtaggtgattggcatgaaatagcaggataaatattgtctaccaaaagtaagatgagagagagaggaagacagagagacagagacagaaaggataaggatcagccatgtattattgtaaacagtatatgatatcttagagattattttaaaatgaatatattgaagtgaattgttgcattgactgaatggcttttccatagaaagactccagctatcatcagttatcaattacattattggtggtctttacaaacttgactataaatgttgagacatttttcgagaaatacatacacatgtgtgtgtatgtgtgtgtataagtatctattggtatctccgyatgttagttaaaaatataataatatgccaagtacggacaatgaagacagctactccacaatattcatttaatttaatttttttttttttttttgagacggagtctcgctctgtcgcccaggctggatggagtgcagtggcgcgatctctgctcactgcaagctccgcctcccaggttcaygccattctcccgcctcagcctcccgagtagctgcaactacaggtgcttgccaccacacctggctaattttttgtatttttagtagagacagggtttcaccgtgttagccaggatggtcttgatctcctgacctcgtgatctgcccaccttggcctcccaaagtgtagtttaatatttaagctgataaaacaagaaaatatatttaaaaaatttttgctagactacattagaaagattttctttaaagatgtgagctagatagaggtcattttaaaatgatgatttatcaaattttacacagttaaagatagtgaaaataaagagcacattaaaaaataactagatggaaattttcactgtgaaacagaatttctgaagtgacactgtgttcacttctgatcatggtcattgtacaaccattgagtctttgtataattgctgtgagtagtgtcactaccattttcccttcactttttttctatagatatttaaatgaagcaactgtatacatatttattcattttgtcagttataatcaagttattctatcctaatctttctatcttcactctgtgtgtgagtctgtgtgtacataacatgtgatatttatatccatcttccttcttgatcatgagcaacaggaaccaccaatactattttacttaagctgaaatacatttgaaatataccatataacttgcagagttgatgggaaaatttgaaaaccagggtgagaagatggcaggcatcaaggtcatccctaggttttgatacctgtacagaatagtcattgcttactgctgccgccatcactactttctctttcattcctctgatatgactatctctactcctatcattatctgattttccttatctctctagtctgtgcttcacatgcttaatattcaaattcctaggccaaagtcacatgtacatgccctaactgctatagggtagggagaagaaaggtctcctctatttacatttccttggcaggaggtaggacactgcataccctcaatagtagacacaatgccaattactcaagaaaagaaatggaggatgaatgttggacagccaagaaatgatgaaggtctgccacatttttcatataggttggctttttctttgaatgttttcacttagctagtgtaccaaaacagttctacatttccaccaaattaaaggtctgattagtttaatgyccttcatttgccatatttttctcaagaaagattatacagtgcatgaactcattcttattcagtaaatttaaatttgagtggcattatattccaactagtgctatccatgccctcagtaattttatagacttgagagccaccgtaaaaaatactaaagttacagtatgatgagggttctactaaatatcaactaagtaatatacggacaccaagaaagaaacagaaaattctgtgtggcaaagtcagaaaacactttcacagagcagggaatatttgagctatgaaagatgaacatgcaacaaaaagggagaacattctttgttgaagggacaagataatgtcatcacaaagcattttcaaaatgcctgctatatttgtaaataggaagagatcagttcactagatgtataagaaggcatgaaggaggatagcaacagwtgagttcagacaggtagaaagcaggcctgattataaatgtttagatcaccaaggagtttgtctacgacactacaggtgacaggcaactcacaaaagtctttaaaaaagaaagtgagttttagggaagataatttcaacaacaatggggaagattaatgggagtagagtcacgcaggaagactaggaagggcwgtggtgctcaacctgtttggcaccagggaccagttttgtggaagacaatttttccattgacagggataggggtggatggtttcaggatgaaactgttccacctcagatcatcagccattagattcttataagtagctcacaacctagatccctcgcatgcacagttcacaatatggttcacattcctgtgagagtctaatgctgttgcttatctgacaggaggcagagctcaggtggtaatgcttgtttgccagccactcacttcctgctgtgcagccctgttcctaacaggccacaggctggtactggtctgcagccctggggttggggaccccgggttaggatgctactgtaataaatgtaaagtaaggttaggatatctgaatataaatgttgatgtgtktgtgtggcggggagcggtgtgtgtagctgaatttgagrtagagacaaaaagtaattaaactggaagcagaaatcttagaatggggaaaagtmagrcatatttgttcacaaagtatcttttaacattttctggtttctgtggagtcacattttattaatgctggttgacatttatctacctagaaaaaaatgacagaaatttcaggaacaaaggtgactatgaattaggtaccaatatttttgtggatgatcttcatgaagtcagccaataatggagatgagtatgtggaaaggatggattatttggactttttgaaaagaagttattgggtgaacatgatggctcatgcctgtaatctcaacagtttgggaggttgaggtgggaggatcacttgaggccaggagtttgagatmaacttgggcaacagagcaagatccatctttacaataattaaaaaaaaaatagaaattagctgtatgtgatggcttgcacctgtagttctagctactcaggatgctcaggcaagaggatcacttgagcctaggaggcagaggcttcagtgtgccatgatcatgccactgcactccagcctgggcaacaagagtgagaccctgtcttaaaaaaattaaacaaattaaaaagaaatgaagttattgagtgacagttaaagaaactgatttgcaagtggccttcaggaggcagaagraggctacttgtctttccccagtgattttatgaatccattgaggagatctgcagaagtgttgtcactgctggagaaaaccaaggcttcacttgcaaaaaggagtactttcttayaaytgagaaatttggaaatatatcataggacttgtaaagctatgatggaagttagcccatgagtgtgtttacagaaggcagagctagatggcataagactcagggatgatgcaggaggtgataaatrtttttgtttagagtagtgagaagagtgaaacacagtagatctttaataataaaattttcactcatttggaattatgaaaattgtgtttgaaaaccagctgtgccatttaaattctgggtatatgtttcttcatttgtaaaattcaagtttgaactaggcttctttgaactaaattcttcttgccaccagacaacaaccttcttcttcatcacctagaggaacattgcctgaagcctaaggaagcagccttccctgtgccacacagaagaccccttaattgttcaatgaatttctcattgacttgtgtagtgcttcaaaagaaaacacttacacatcaaacatgattctaagtcaaagttcttcatttatatgagattaaagaactggaaaactgtacaagagaaatagtcacctgctgattgcaggcctgtgggtttcttggaaaaactcagcaattttgcttatccaggactatctttttgcccagttcctctgattctgaaggaagttgaaaagatagttttcctttgctgtatccaacatccttttctacatttgatttaagaaatgtcaatttaactttttattgatactgatattgaaaatacataaaatccaaagaatgagataaatcttacatatgtgtcatatttctatagatttttttgaccaacattttattttgaaaattttcatgcacttggtaaggttgaaagaatcatacagtgaacactatgtactcgaaatctagattctaaaattaggccaagcatagtggctgatgcctgtaatcccagggatttgggaggctgaggtgggagcattgcctgagggcaggattttaagaccagcatgggcaacatagtgagaccatgtctctaccaaaaaaaagtaaggccagcacggtgctgcatgcctgtagttacagctactcaggaagctgaggcaggaggattgcttgagcccaggagttcaaggttacagtgaagtattataatcatgctattgcactccaacctgggcaacagaatgagaccctgtctcaaaaaaaaaaaaaaatagttaatgccaggcgtggtgactcatgcctgtaatcctaacactttcagaggctgaggcaggtggatcagttgaggtcaggagttcaaaaccagcctggctgatatggcaaaaccccgtctctactaaaaatacaaaaattagctgggcgtggtggcaggctcctgtaatcccagctactcgggaggctgaggcaggagaatcacttgaacctgagaggcggaggttgcagtgagttgggatcatactactgcactccatcctgggcaacagagcgagactccatgtcaataatagtaataataataatgataaattaatttaacatgtttgagtagggaggagatatgtgctttatcacatatctatccatctgaacatatctacccataaatccattttatcttttaatatactgcaaacctcattcctatacacatgatcatgaatatcattaactggagttaaatactgctaatttttttcaagctcaaatttatctacattgaaatgcataaattatcaccccgtgtaacattcactcactgaatgtaatatttaattaacaaatacatacaccattataatacaaactgctatcaagaatattatcatcatcccagaaattttctttatgcctcttcccagtcagtctctgcccccaagctcccaaaggcaaccatttttcctgttttattttcctaaaagattaggtatgtttaaaaagatcatataaatgaataatagagtatccactctttggtgtaaacttatattatgtggcataatcctttttggagtcatcagcattgttgtgtgtatcagtaatttgttccatttttatgttgaatagtatttcattgtttaaatacaccacagtttttgtatcatttcccccattcatggaaacctaaggtgtttccaggtttggctattatgataaaaacttctatgaacatttttgtttaggtctttttaaggacatgtaatgtcatttatcttggatatgtacctaacaggggaaaatttgaaggacttttatatttattaaaaactacctgttttctaaaagggttgtgctaatttacattcccaacagcaatgcagcagacttttgattgttttacaaactttttaatatttgatgttgtcaatctttttaatataatgccatttaatctaaaacatgagaactttgtcaatatataggtccagttactgtgatctctcacccaccatttctttattatagttgtcatatatattctatttacaaacatatgcaatgatgtgattttttgccttaaatattaatatgcatttaaaagaatttaacagggaaaaagtctattgacatcaaatgtacttatactgtcttttatcatctccaattttctattaatcacatgtagtggatttttttttcattctagatactgtgttacatttttcagtcacagaatttatattcaatattttttgttgttaccatttcttttttgctacaagaattttcgtatgtgtgtatgtccttgagtatagtttaaaagctgcttgaagatgcttgtttgcttattccaacatctggttgatctcagtacaatctccgttgattgctttttctcataagtatgagttactttttattgcttccttgtatgtctagtatttttttttaattgcaacctggatgtcatgaataatagcacattgtagaaactctgggttttgttatgttcctctgaagagcactcacccattcttttttgttgtcgcatcagttggttaacttgactgggctcaaagtcccaacttttttctttcctgtagagtgcagaacctaaaatctctgttcagtttttcagccctagctgggctacttggaatctgactagggcaggtgtaggtctggcatcagtgagcaatttggacagagtttatgcacagattgaggctccctttctgtggacctctctttacacctgctgtggctatttttagttttgttcactagttcttcaagccagtaaaactgtgggtttctatttgagttttagccattctggagctcatccagtgccttttccttctaagtattcatagtcttcctggcttacctgttcttaggtgcactccagatatctggtgtttgctgtgtgtatatatatatatatacacacacatatacatacacacaccaaatatatacacagaatttatagctgttatctctgggagctttgctccaataaaagctacttcacaattattaaaaatagaacctccataagtagattttaaaatgtttctgccatttgaaaccaaaaagtgggattttgagaatgtagatcatcaaaatcatgccaacatgtgtgaacatactacattatttgagaaagcaaatatggtataaacacatccaaataaaaacagtggaagttaggtgatttttttcaaatgtttgccatattgtagcagaatttcagtttttcaaattttcacatgatatacacttagcctttttctagatatcctattaccatatatatatatatacactatagaacagaatatattattctatatataatatgaatattctaatctctaataaaatacatagtataaacagaatattgtttgatttttgttcagacattgttccttataaccagaactccaactaaacttatttagtctagtgctattcagaaaaaaaatgtcaatcatagttgtatggataatgatcactggcttttatgtcattaacattacaggaccttaagttgagttaagaagatgtaagtcaatactctctaaaggttcatcagctatttatagttaatttacactcctaatgtttacataatcttaaccaagtaacacatattgaatatggaaataaatattgccctggtgcttttgaatgggaataagtaggcacagcataatagatttaacatataatgaaaatgggttgcaatctataataagacatgctgaagattcaataaaagctcagatattgattcattcttcaaattggtcattcattagcaactaattggagacctttgctgaccaatatgcttaacygatttttaaaaataaacagcaaaatagcaatgaaatttcatawagcaactattccctgaccataaaacaaggcaattaaattgtgcaaaggttaattttgagcacataatcagtaactgtaatagaaacaaatcaaagaaaagaattgaaagatcctaaatgtaaattttattagtgtctttagttttatggttagaaaactctatgaagcaacaatggcatggtgagggataagttatttgttttattaaagatttaaataagctttaccaaggaccagattttggttctactttaggccctgacaagaagtcttgtaagctttttaaagagctcacttcaaatcatagttatcaatcttactaattcataactttgtacatatcatttatcttctctgagctgcacttccttcatttttataaagtggaaagaattaataaaatttatacaatgggttatatgggaattaaataatatgaagaatatagaatagcttcagaatcaatgtttcttgtactctgtaatccctttgtagctgtatgcttttgctctctttatttatttaattatgtgggataattggtacataatccaattctatattttctgaacatacaacataaagaaaatactttatccctsgtctcttttcttggcttcctcccatgattgctgaggcctgggaaagtacaggcctggcctgctccaatcaggtctttcagggcagaccaaagcagggcacagggagtcttacccatacctgcaaaacaggaatgaggccatggtcagggtcagaactagtcagtgctgagggaggaggcaaaaatccgagagaaaaagtgacaatgccctggtgaagttttagaaatgttagcacctgcctgagatggcttttgtgtaagtaagctggctgtctttgaagggggcagatggagctagactgcttaaactcatcatataagcgagcaagagaagtataattttgctctcctttaaacagaattcccagcatgtctctttgttcttactacttatttttctatactgtaaattaaatttttaaagaactggagaaaagtccactaaaacaaattactaacagtgacaaataagcagtgctttatgttaatatgtaagtgcaccattgtattagtccattctcatgctactaataaagacatacccaagactggataatttatagagaaaaataggtttaatagactcacagttccacatggctggggaggtctcacaatcatggtggaaggcaaagaagtaacaaaggcaggtcttacatggtggcaggcaagagagcatgtgcaggggaactgcactttataaaatcgccagatattatgagacttatttactatcacgagaacagcatgagaaaaacctgccctcatgattcaaatacctcccaacgtgtccctcccacaacacatggggattacaggcgctacaattcaagatgagatttgggtagggacacagccaaaccatatccaccattatgtttattcaatgtgtaacctatatgtatctgtatctatagccacatctatatccagacaattacataatcttatatgttgaaacaattacagattcaagtactctgactcactcatcatttacataagctttcagcagagagaccatacttatatgccattccctctgcctgatacgtttgttttttctttcttcattttccctaacagataaacttctatttctccttgaaaattcagcwcaagattacttcccatgataagcccatcttagtaatatttttattctcagatcctttactgtctggcataatatgtgctcaaaacatatttgatgaaggaatagttgtaccrttaaatgcaaaatggtgatgaatgacaaaatagaaagatatacagacaaactttatttaatcgcatatcatttattaacctagaaaataaaatgtctaagatagataatggcgtggagaccatctaattatttttaaatttgtaacctgacaaacgtcacaaaattgttaggaagttttcactaaggcttatatcatggaaaagataaaaaaaaataaggtaaaaacttttaaatggtactctactttttataaaacattacattttctaatgaaataaataatactttatgaatgtttaatatttctctaaccaacaattacattagctttccttatgtcacattgacagaatgtctcattgtgttggggccagagagcacagagatgaggggggaataaatgtatcaggaacaataaatgagatagtgattaagtgaaaaagtaagtaccattggcaaatcaggaaaaattgggaacctcaactttcagctgaagaaaaacacaaggcaggaggccagatgagagttgggggtcactattttggaggaacaggattaagggatttttaaagacatatgtataaggagggagaaaagaaagaaaagattctttgggggcagctctttgggagatcttaagaatgactgagacaagaactgagttgtcacttgatcttttgaattcatttacctgtggaattttttggagtgattacaacaaagatttaaactatttataattgcaatttttactgtactattatctttttttaacagaaaagaaaacttaatagtcaatacatactctaataatcaaatattataaaaatcttcctaatttactttcttttttaattttttgtttctttcaatgcaattctaaggccaaccaggtccgcaaggtagcactagatctatgctggtttcataaaacattgtagatgccattcagtagagtgattaagaggatagactctggagccagattgctttggttcaaatcatagctctgctacttgctagctgtaatcaggrgcgagttacttaacacctctctgccttcttaataaaatagagataatagtggtatgaagctcrtgtggatgttttgtgtagcaaatcattgtaggaacagtgtctgacaatagtgcttggcacattgcaaacattcaacgatgctggctattatgattataattattattattatatgcagatgatacagacaaacatttatgagtccaatatttataatctaattattcgtttattttacaaatacattgagtgcctactctgtccctactatgtgccaagctttgaggataaggcagaaaatacaaattcaagatctagagatcttggtaaaaaaggcagaaaacacaaactcaagatctagggatctcagtaaaatatcaagccatgagatttagtcaggaaggtttcttttttcttttctttctttctttctttctttctttctttctttctttctttctttctttccttccttccttccttccttccttccttccttccttcctttctttctttctctctctctctctctttctttctccttccttctttgcttccttccttcctttctctctctctctctctctctctttcttgacagagtcttcctctgtctcccaggctggagtgcagtgatgtgatctcagctcactgcaacctccacctcccgggctcaagcaattctcctgcctcaggtttccaagtagctgggattacagatgcccaccaccacgccctgctaatttttgtatttttagtagagacagggtttcaccatgttggccagactggtcttgaactcctgacctcaagtgatccgcccacctcagcctcccaaagtgctgggattacaggcgtgagtcaccacacccggcgaggaatgactttctatcagaagttgaattgatatagacctacttggcacatatatagagctgaaacaacctagatggtcggcatattttctccataaatagagtcaaattatctgtaatttcaaatgtactttctccaagaacagatttttcagttaaagagtggcttttgatgagtgactttgctatactgttattgaaaaagggtctataatatgcaaatgctagacatgtatgaagcacaattgacattaacttacaggaagaaaagagactgaatttggttctcagagggaataaaaaaatctccccagccctacacttagatggacctctgagatcgtatctatgaaagttaaaaacttctattatatctaagacataattactggtgtatgatcatggaccactataatggcttgtttctggcaatatattgctttattatattgctggatggcatggaaagcagtaaaaattggtattccaaagtaaacattatctatcttctctagtctgggataaagaagttttaataattatttacactgaaggataattagagcatgaaatgaccatgaaaaaatatatttgcatagttgtgcagaaacattaacatgcaattatgtcttgatactagatacaaaatatctgaaatggaagatggaagatttagtgggatcttttaccaataacttcaacagaagatttgtgttttagaatgtgtcctagagacaggaccttcttcctagctaaatattagagataaaaaattaaaaagaggcttaaagtccatacttaagacccagaaagaaaaatagtattcttttgataacacatagtatttatgtagtatactgaattgtcaggtatttatcattaattatctcatgttgggttactttaatgctccgaaraatattttatctcaattgcttttaaaatgtatcaaaatcctaactttgtttctggtctacacaccttcatttgtccatctttttcaggtttattccctgctgtcctgaatcttgcttctaatgctcttatyacgaccaatgcaacatgtggagaaaaaggacctgaaatgtactgcaaattggtagaacatgtccctgggcagcctgtgaggaacccgcagtgtcgaatctgcaatcaaaacagcagcaatccaaaccgtatgtattttagtgtgtaggtgtgtggcgctgggtaggatctataattgtgagatgttgaggccaagttgcattaaattcaagggtttgtaatactaagaattcctagaattctttttaccattaagagcttcttcctggcccctctctgtcattcagcaaacattattggagttcctgctatgtgctaagtacagtgattggagatgattcgccagctgaaggcctgtggcagtcattgggtttactaactccagataccaaagtggtttctgagggtgtggttattaactcaggctatcatcattcattggtaatttatgtgccagatattgtgcctgagatccaggaggaataaggtaggatatcgtctttgagctactgatatatagtgtggtaagtacaaaggaaagaatgagcacagcgttctgcagaagagagaggatggccacaaaggcttggtgtaagtaaaggcttgccagaaggagcgatatccaagctgatgaccaaggacatgagctaaacaagggtatgagataaacaggtaaagaggtgagggaggggaagaggagaagtcatgccaggaagagaaatcagaattagacagaaaatcctagttactcggggagctacaagtaggaatgactagaactgamagtgccaaagggcagagagtagagatgagactagagcaaaaggctggagccagattatgaaggcatttaacaaccacaggagaagtgatttagggagaggcaccatgtaaagccctctttccagcctctatgaaccacagtgatacctcagactcattgatgtatttattcaacaggcctttgaacacctcctactagcaaagcattgtattggagcataatgttaaattacacataacccctgattcagaggacctagaggggaaatagaggcaaaagaaaagtaaattcagtgctaaaataacatgaatgctccatgtagatgctaaagtcatctaaagatttctggctaagaaatctttatatctatatatctctatctgtatctatctttctgacatgccttcttctcttctcctcgcttacctctctctctctgtatatatataatatatatataaaatatatatagcaggtagatatatacttatatgtaatctacataaaggtaaaaatatatattatttatatttatttatattatttttaatgaacagatatattattttatttttattttgtttttgaggcagaatctcactctgtcacccaggctggagtgcagtggtgcgatctcagctcactgcaaccgccatctcccgggttcaagcrattctcctgcctcagcctcccgagtagctgggattacaggcacgtgacaccatgcctggctattttttgtatttcaagtagaaatggggttttaccatgttggccaggctggtctcaaactcctgacctcaagtgatccacccgcttcagcctcccaatagatatattttttgttaatattatttcatatataatatattaaaaggtagatatatattatatgtagagagakatattttacatatctatagatcgatctatagatatctatatctatagatcgatctatagatatctatatctatagatagatatatagaggccagaaagtaaatgaattgatggattattagtttcaggttcattaggcaagatgataaagcctgatggagggaaaccaccattggttcagagactggtggccttgaaaatttcatgaagaatatgagaaagcccaggggcatgaacggagttgtggggaggaggtgcgagtgtgtagatgtgtgtttaggatgggctgtgcagacggggagaattagagagataaaatatgtaaaaccataagtgtgtgtatatgtatacaggtatatatatatatgtagagagagagagagaaaggaggtaataacgtgaatacttaatgccaagtgaggtgaactatgatgggggtaaagcttcacaattatattattttaaaatttgcttagtatttcttctcctttttttttttttttttttaggcagagtttcgctctgtcgcccaggctgcagtgcagtggcgcgatctcggctcactgcaagctccgcctcccgggttcacgccattctcttgcctcagcctccccagcagctgggactgcaggcgcacgttgccacgcccggctaattcttttttttttttttttgtatttttagttgagacggggtttcaccgtgttagctagcacggtctcaatctcctgatctcgtgatatgcccgcctcggcctcccaaagtgctgggattacaggcgtgagccaccgcgcccggccttttctctgtctttttaaatagaccttatttttagagcagtttgaggttcacagcaaaattaagaggaaagtacagaaattccccatatttcccccrccccaacacatgcgtggacttctccattaccaaaatccccctccagagtgctacatttgttacagtccatgaacctacattgacaacagcatcacccaaacttcatagactgcattagggtttacttttggtggtgtaccttttatgggtttggacaaacttataatgatatatatctaccattagagtatcacgcaaagtagtttcattgctcttttttttttaaattataaaatgtataaaatgagagctttttctcacaatttacattttttatcccaaaaagaaaattgaaaggcgttgtgccttttttcttggagctggttaaagagaggcatgcatagtcccctcattatataatttaggaatgcagaaaacattagtatatttcagcaattgacacttgtttgattaaaattagtggtcgtgtgtatcacagaatatcagaaaacatgttaagacaccaaagaaggcaaccaccagaaacctttcctattaatgactctggttaatttctttcttttttgttttgttttgttttgttttattttgagacggagttttgctcttgttgcccaggctggagtgcaatggcacgacctcggctcaccgcaacctccgcctcccgggttcaagagattcttctgcctcagcctcctgagaggcatgcgccaccatgcccggctaattttgtatttttagtagagacgaggtttctccatgttggttaggctggtcccgaactccagacctcagttgatccaactgcctcggcctcccaragtgctgggattacagacatgagccactgcgcccggccgactctggtgaatttctcggatgtaagttgttatggtatgtgtgtaggagtggggagtatagttgcatacccatgtgtttgctagctcttgtatagaatgtaagaggaaaggacatatgtcagagccctttgcttttatgtaaaagccaagggagttcaggtaaatggagtcaagrcaataaagggaaacagatttcaagggaaaaaaatcaggaaaatgaggcattaggtatgtgatgaaggaaagaatttttaggaagaaaaagtaacagttttaaatgcttcgaagataattgagtaagaaaagcataaaataggtttcccttgcttttgacaacatggccatccattgaacacctttstaaagtactcagcagattcatagtggcaagaggcacactgaagaggtaataaatgartgatgaagaagaagaggggactatagaaatattctgtcaagtatccttgatgtgaaagagaatgaaggacagaggaggttgtggagttgcaaaggttttcaaagayaagagacatttgagttggtttagatgcttgkggggaaaggcagggaagttgaagaccaagtggtggtgggcatggtgtctctctagaagtaaaaacatatgggtcattaagcataggcaaaaaccttatattagaagatacatacttttaactcaccaaatcagaaagaagaaagaatgaatagcagcagtcagcagaaagtgttgggagaaatttcttatttgatgatcttgatttcttcattaagatgtaaatctgggttacctgctgaggaaagaagcaaacatttagattatgagcctctcaggggaataggaggggatcactgagccgtaatcagaataaagyggcaattccatatggagtaaaataaagaatcaaacgtgtggactgatactcttggagcattacagggaaagtagaatggaaagagaagatggcaagaaaattgaagaaaaggtcagaaagtaaatgaattgatggattattagtttcaggttcattaggcaagatgacaaagcctgatggagggaaactaccattggttcagggactggtggccttgaaaatttcatagagaatgtgagaaagcccaggggcatgaacggagttgtggggaggaggtgcgagtgtgtagacgtgtatttaggatggactgtgcagacagggagaattagagagataaaatatgtaaaaccataagtgtgtgtatatgtatgcaggtatatacatatacttatgtatttattaaatatttaaattaaacatgaaatatatgatatgtaatataatatacttatataatattaaataaatttatataaataatatacacatataagtataaatattatgtatatataataatatgtacctatgtgtatataatatttacactagaaaggcaagaaataagaaaatgtatccaatcataaaaatgggatggaggaatgatacaaagattggggtagaaaataatttagttctccactcaattatttttattcttggctggaaaaatggatgagatgcattgtcagattgagtccaaaagctattctgtctttcaccctcttgaaagttctacattcagagtatcttttgtctcgtggaagataaatatattcagccaatactatccatgttttcacattgaaaccaaaaatgaatcaattatttcagtaaagcaaggtgtatataagttatgatttgtatttccccatttttatttacctgtagtgttttctaaaccagtcacagtctggatttactttacattattattatttattattatttwttattattattattattattattattatttgagatggagtctcactctgtcacccgggctggagtgcagtggcacaatcttggctcactgcaaccttcgcctcccaggttcaagcgattctcaagcctcagcctcctgagtagctgggactacacgcgtgtgccactgcgtctggctaatttttttgtatttttagtagagatggagtttcaccgtgttggccaggctggtcttgaactctcgacttcacatgatctacctgccttggcctcccaaagtgctgggattacaggtgtgagccaccgcgcctggcctgcatgattatttttaaatgaccagattcattccacatttccagattatgctttgatactagaaatttagaaagaataaaaccccacaagaataaaaatctagcaatcaactgcatgaatatattttagtaaaagttggagcaacagatgataaaattccacaaattcagtgaactctgagaataaatatggaaggtccgcagttaattaycctgcaaagaaaacgaaccttgaactttctgttaatagactttgcttcccaattaaaagctagcagtttgaaaggtttacctcatcagcgattccctatccagttttcagatgcagttagcccttggattgacttgcatatttatccctgttgaggatgttatacgtttctatctccttttaaataagggaactttgccaacaattcgtcagtatttgcaaattaattatgattaaactttcataatagggattatggttaattgttgattcatctcccagtcctcctttttgtgactaattctcttatcagtttgacctgaggtggcagataccacaatttcctattagacaacttctctcacaattacytaagagccatgaatttgatttagaaatggggttgtatgtgtgtktttttctatcacatattaaacgcacaatctgtaaaaaagattcaggaggatgtttgggaaatgttttctgtgatatttatttttcttcagaagaagtgccaacaatatttcatttatggttttgattccccatatgccaatttcagcaccctcttatttcaccagggtcatttatttggtatttagttatgcttctgatatttgctgtcatcataaagacctgacatcttccctagcttcaaaagaacaatttgactaatgctaacatttaaatatattcagaaattttacttttcattaatgagacaggaagcctcatctctatggactgctaacatgatgatttggtggaaaataaagtccagccagctgttaagttgaattaaaaaatttaccaataataatggaatatttttgccctgtcttgtacagtcatattaagatttgcaatatgaatatccatatctggaataggactataataccataaatagcttaaaacatagtcttcatgttttcagtaaatgttatgacagtgtattatatattaattataaattaatatgtaatacaaatcttcacaaatctgaaaatgccaaatttagtgaatattcagctttttaaattttgaaatggagtctcactctgtcacctaggctggagtgcaatggcgtgatcttggctcactgcaacctctacctcctgggttcaagtgattctcctgcctcagcctcccaagtagctgggaatacaggcaccygccaccatgcctgtgctattttttttttttttcatagagatggggtttcactgtgttggccaggctggtcttgaactcctgacctcaggtgatctgcccacctcagcctcccaaagtgctgggattacaggtgtgagccactgcacctggccaatattcagcttttaataaaatttttcttttaaagatgattttactttctatcagattcctattgcattgaggacttagttttgctttatttttattgktttttcaaatgttttaccaagtacaacttgtctctaagattcaaaacagtgtacattttgaatagatgtatcatttattttatgtatatgcataataatggttagaatgctcacagttatactgttcatcagtaaccctgtgaatacagggttcacatccaagatgttctcactggtccgtggcaaagtaagaaaatgagaacaactttccacatttttcataaaaatagaaaggatacaatttaaataattgtcckccawtttgatattatgggttttaaaaactaatgatggtttttaaatgccctttgtttcatgaaataataatgatgctttattaaatgatagaaatatattggaggttattattacttggaaaaactaagagctagaactcctatatcaatttcacaaatcgatcacacatttatttttaatttcatattttttctctgaaaattatgaatctggaaaccactgctgtgagcggaattttgttattcctagatcagagatgacacataatgttgaatgatttgtctgtggtcagttacgtactaagtggtggagccaggaggaatatcagctacccgtgtgccagcacctcatggtccccctctcatcaccattattattagaatacatggctagattgcaatattaggtaggcaaattgagagtccatgtttgttcctcatagcaatgtgatttgttcmttatgtgaggtattccttcaaatttaaaaaggattgtgttctaatctaaaaggtcattcataagccactcattcgaaacatcttcccagatacttagttttatgaaattctcaagactgacaccccaaagcatccttaatctataataaacacmggagtacagggaagctcacctccactttgtttacatttctatgggcaaatgtgccgwctttctagtgagatgtgaggaatttaagtgcccttactgcagccttgggaatagaaacaggatcatcaacagcctccactcctgccatcctcacccatgcatgagcaaggcctgtttagagagggagaaagaaaaagaccttatattacttggaaaatgagaagcaaagattttagacaagaaccaatgactgggaaccaaaatgcaatgagggcttggcagcccaggagtagtggctgctgttgtgagacacatggagctaaaatgggagagatgagaaactgtgagctttgaggattgtaagaaggaagggagctgcaacaaaggtcacaggtctgtggggttgccacgcctcctattttctatctctaatctcccttttgattttcacaattggtcctgttcttatatgtctgggtgaaagtaagggaagatctgtggtttttggtaggatagagtttcatgtgccatcatctccttccttgccattattgtaaagattcctccactagagttagtgatgatggcaacagacaaatgccggatgagaggtttgggttatctctcatattattaaatagtgatagaaaattggcaagttaaagactggccgcaaaaagcttctgtaagggccaagggaaaacttctcttttgccctctgaaggtttgctgaaaaatcaactgaaaaaagttagcttggtaggtgaaaggcatacaaaatgtattttaacatgcatagcatggaagaatcacaggaggatgattacccaataacccaataggagcatagatgtagatatacccttcttcaygggggagggaagatggggaaaatatggcaatttggaaaatagtaaatgattttttaggggaattcaagaacctacaatggcctgggacaaagtctgttgggcccacagagcagatagtggtttgtaacaaaagtctgttcaggtgtgccgacagacttcagtctctcttcatgtgaaatgagttaaattaatgaaaacttaagcaagagggccagaggaaacttttcctcctggtgggatcagactgtaagtagatacgggagtatcagagtaaaacttatttcagcatttgctggtctccaagagcctttaatttaaaataatcagcataccagcatgctatattttcgggtattggtttctgagcctcaatatctcatagaatgaatttaacagcattttatgttaaaaccagatatatattggactccctacgtcttaataataatgaatgtgtcagaagggcaagtgttcaagtgtatttcaaccacaagtcaggattttatgtttctgttaacaaggttgatggcatactagagctgtctcaatagttagttgttgcttttttgaatgattgacaagtcaattagattttaacattatatctttacacttaatttctgtagttacctttaaaattgcccattttggttaatggccagagtgctgaccagctcattcccctgcagcctaagcatttaaacatttcctgctaccttgtatggtgctatgagacagctgtcattgaagaaattctgttgagaatctgaattactctccttytgtattattttaatgtttgatattcacatgatggttgttttaaccrtttttttttactttaaagaaaaagctataaactagttatatgatcttttcttcttcctttcatatgatgctgctaactcaatagagagmcacccgattacaaatgctattgatggaaagaacacttggtggcagagtcccagtattaagaatggaatcgaataccattatgtgacaattacmctggatttacagcaggtatagttcctctttttttgtcatttccacttttgaaattgcattttacatttgctatttgtttagttagtggtttgtgggtgaaaggatactctttcttatcactctccattgttttcttgataagatgaacaaagggtcctattcatatagcgtattgttatttacgagtattcagcatttaattataaagcacaattcaaatggaagcacgtgaagagcttagaaatgaattaggtgctaactctgttttagctagctggacttaatgatgaaaatatggatcaataaaattttacataacaaaaatataatagtatcatttttaacttttaaaataatacattgctcccactgtgctgatggtgtgtgcacttaaaggttcttggataacaaggctcttgagcaaattgcctctcattactgagagctgagaaagttttgacagttgctttcaagttaaacttgggtgactaaatgaagtaacaagctttgtagttatacaaaattgatgccggaagttgttcaagtttgtcttgcataggcctgggtgccttctatgcttaatctctttcttccttctcttcacaatattcaggtcaggctgaagttattaatcaggaatcgccagcacctcaaattatttaggcttgcaattaggatggaaagtggacaaatgccacattccatcctatttgtatgcctaaataatgtgcaggggtgatggtcaggatagttaatgacagacacyatacactgtaaaggtcatggtttttataagttatcactgtgtggggaagcccccagccagtgggccagatcagcacaagacattttcctaatggatgccatttgccaccagcatgagtacaatctccctcctccagtgtctaggttcattttggtgagggctgcatatattcaagagccacagaaagctggctggagcaaacaagctggyggattgcacggtagacctgccttccacccatatgggcctcctcgggatatgaggaactggtggcggcaggggctcagtgctgcagcttatatcaccaaatggcatggacttatttctaccctcactaatatacagcagctgaatgtcagtcctgagttaataatatttctcaggaagtctcagagcactatcagagaatggcagggcaagctaccacactgatcaatcatgctttaggaaaattaatcctgtgcatgaatcccctggggatcttagcctcaaaatggactgcataccactcctgataaagacaactttgtcctttattggtcacaagagttctcccccttcatgtgatcattgaaagtctagtctcccaatcaagagtgagtctgctgtgcattgactcaggtcatctccagggacaggcaatcaataaataatgatgctttattgttctggtttattctccatttattcttttagattgcacatagaacaatggggtcaattattaatataatttgcacaaatcacttatagtactctttgagctgaacagcaatattatttacctgttatcaaacatggcagcaattttcccctcctaatttacaactggatggcgcaaccacaagtttttactaaatcatttctaacttgcctgtttttatcaattcagcaagtcaaagagtttacctgaaagcctatttttcagtgatgtcattgatattttcctaaatttactttgcatactcactcatccattcccacacagtatcttaagaattatgtggatttgtcgttctgttttctcttcctcccatttagtttaatggaggtaagatgagtgaatatgccaagacatattttatgcttcattcatcataacaaagtgccagaattctgtatataacccaggtctacctgactccaaagtctgaaattcaccaagtggaattggtacagagcatatgtgttcaaattgtcccatattccaggatggtgtccatccatatccttatttattccagctttctatttcctgaaaatcaacctactgtgtgtgtagaagaaggggaattcaagtaatctctaaaaatgtaataaatccttatttctacttgactcaagattttaatttagtcagttatttagtgatgtgaaaagttaaacaggttttgtaatcaagtttcgtgatggaacttctcagacaagaaagagcttcagacttccaatttggcctcaggctttggaataacaaactgtgagacatgtttataatacttattcagctatggatggtatattgtactgcactggcaacagagaaaatgtggacattcttattatgtaactcctcacaataatcctgaataaaccagctaatattaatattcctattgcatagttgaagaacactgtgctttagaaaagttcagtgacttggccttctttctaaagcttattatgggcagggctggggcaacatgaatagtctgaatccagacccaaatacactatcttttctaatgggtatctgaagacataatcctagggagctcaggataatttttattatatattttcaagggctccaaatgtagttcaggttcaagaaatattgcactatcttctcctggcttctatgggataatatagccaacaacctgtttcgttataaagcaggggactagaaccctcattttctagtatactctagtgtgcctctaaaatggcaaagcttctgtcttttctacctaccgcatgaaggattaataggttattcaaaataagatgagctattatccaactgggattaaaaggcagtaaaattataatgaataggtaaatatcactaaatgtttgtttgtcatttattcagcaagagacttgaccatttattagttcttcttttgtataaatttcaacaagtgccagtattgttgttgataaatgcttggctcctctgtgacacattttcataaattagtatcttaaacataacagaaacgattgcatttatttgattaaatcactatagattacagtgggtttttttttttttttttttacattttaacattcaagataagcactagaaaaaataccaatttgtttggaagaaagtagctacttattttataagtagattgttcttagatacgtattactaagggattattaacttttctcattctatttactcatagcatattttgagcaagtgatttaatcatgctgtgcctcaacttctagattagcagactaaatattacaatatcttggcaagaaaattaaagtaatgataatggcaatatagcaactaaattccatctcacaattacagctattaaaaggatcyagagtcagcatgaacttaaagaaaagcttaactgttccagtgacgtgtatataaaaactcaatataattgcgaacaaaaatatacaacaatttaaaggagacagtaatagggactcaaacgttaataagatgtctaaaacattctattttagtctttttcctaccagatttcaccagaatatgtcattatgtctgattttatttatttcttttaaaatctagccattatctccgtcatgccctttgatttgtttcagaagaaagctgattggcaggcggggtaaaacagagggrggcagcttttcagtagacttttcaaacacatattgaggtgatactcactcctggctaatccaggaatgccattaattagttaagctcatgtcttaactaggagtcttctcctcaataagcaattcacttctcttcctggtctatccctcaaaactaagaatgcgtttaccaaacaagattatcttacagctacagagatcacactccacatattcttaacctaaatattttattcactgatcttgcagagaaaaatttgtttggacaagttaacagttttaactggaatttatgttttaggaggaggataaactactatttctatgcaaatattactatacttttagaatccatgtgaatagtataaaatgatttttctctaaagcctagaatcattaatgtaatggttaaacatttctgcaataataaaacataaaatacgtggaaatactttatatattcaagttttaacaatcatttaaacatattaaaggtgatccaattttcagtcttgaaggaaggtcattattctttcatgtcaattctttcctcatgctcttcttactgattcctgattactgattaaaggatgtgttgtacaaggagggaattttggaaaattcacaaatacatggaaattaaacaacatactcccaaacaaccaatggataaagaaaaaattaaaagagaaatttaaaaataacttgagacaaatgagaatggacacactaacactgataagaagaagcaaaagcagttctaagaagaaaggctatagtaataaatacctacgtcaaaaagaagaaagatctaaaattaacaacctaaggttacatttcaagaaagcaaaaaaaaaaaaaatgaagaaaagataaaagaaagaacaaactaggcctagaagtagcagaaagaaggaaataataaaggtctgggtagaaataaatgaaatagagactagggaaacaatggaagagattagcaaaactgtcacttgggttttggaaaatataagctaaattgacaaaagtttagctaaactttctaagaaaaaagatcagaattgaaagaggagacattactactgatacttcagaaatacaaaggatcataagtgactactctcaacaattatatgccaacaaactggataacctagaaaaaatggaaaaattcctagacctactaacactgaatcatgaagaaatagataacatgagcagatcaatgaagagtaaggagattgaatcaggaataagaaataccctatcaaagaaaagcccagaacctgatggttttactgctgaattctaccaaacatttaaggaactaataccaatccttctcaaaatcctccaaataactgaagatgagggagtacttccaaacttattttatgaggccagccattagcctgataccaaagccaaagrcactgcaagaaaagtacattacagatcaatatttttgatgaacatagatgcaaaactcctcaagaaaatactaacaaaccaaattcagcagcacattaaaaggatcattcactgtgatcaagtgggatcactaccagggatgccatggtttaacctttgcaaatctataaatgtgataccttacattagtagaatgaaggacaaaaatcatatgatcatctcaatagatgcagaaaaagcatttgacaaaattcaacattgtttaatgataaaagctgtcaacaaattagctatagaaggaatgtacgtcaacataataaagactgtatatgacacatcctcagctaacatcatactcaatagtgaaaagctgaaaggtttttctctaagatcaggaataagacaaggatacccacttgcaccacttctatttggcataatactggaagacctagccagagaaatcaggcaaaaaaagaaataaaattgtcatcaaaattgaaaaagaaaaaggtaaagtgtctctttttgcagatgacataatcttacatatagaaaaccctgactccaccaaaataactgttagaactaataaacaaattctgtaaattagcaggatacaaaatcaatatactaaaattagcaacatttccataaactaacgaggaactatctttaaaaaaatcaataaaataatcccattcaccatagctaaaagaaaaataaaaaatttggtaataaatttaaccaagaggattgctatgatttggctctgtgtccccacccaaatttcatcttgaattgtactccaataattcccatgtgttgtgggagggacctggtgggagatggttgaatcatgggagtgttttcccccatgctgttgtcgtggtagtgaaaagtctcatgagatctggtagttttatcaggggtttccgcttttgcattttcctcattctctccttgcctgctgccatccatgtaagacaggactcctccttaccttccaccatgattgtgaggcttccccagccacatggaactataagtccaattaaacctctttcttttgtaaattgcccagtctcaggtatgtctttttttttttttttttttttcttttttttttttttttgagacgcagtctcgctctgtcgcccaggctggagtgcagtggcgggatctcggctcactgcaagctccgcctcccaggttcatgccattctcctgcctcagcctcccaagtagctgggactacaggcgcccgccactacgcccggctaattttttgtatttttagtagagacggggtttcaccgttttagccgggatggtctcgatctcctgacctcgtgatccgcccgcctcggcctcccaaagtgctgggattacaggcgtgagccaccgcacccggcctcaggtatgtctttatcagcagtgtaaaaacagactaatacagagatgaaagactggtacactgaaaactgtaaaacagtgatgaaataaattgaagacacaaataaatgggaaaacatcctgtgttttgtggaataactaatattattaaaatgtccatactactcaatgtgatccacagattcagtgcaattcttgtcaaaattccaatgacgtttttcacagaaataaaaataaatcctaaatattttatggaaccacaaaaggtgctgaatagctaaagcaatcttgagcaaaaagaacaaagctggaagcatcacactatctgactttaaaatatactacaaagctgtagtaatcaaaacagtatgctgctaacttaaaaacagatacgtagaccaacagaatagaataggagcccagaaataaatctaagcatttatggtcaattgatttttgacaaagatgccaagaacacacaatgggattgaactgtctgtccagtgaagggtgtttggagcagtagatgtccacatgcagaagaatgagtatagacccttatctcaygccatataaaaaatccattcaaattctaaatgaattaaagactgaaactgtaaaactactgaaagaaaacacaggggaaaagttccatgacattggtctgggcaatgattttttaaagatataaaccccaaagcacaggaaacacaataaaacatagacaaatgagattacattaaactgaaacacatctggataaccagggaaacaatcaacatggctgctcttcaaatcactgaatttattttgttggtactatttgggtcactgctaaattggtgaataccaaactaacacagaagagattataatatacatgttccaaatgtagattataccttacctgagtataccttgtttaagtacaacagaatatagttaaaatcacagttctttacctgytttagttgtatataratttttaagatcatttgttcagtatcacaagtagaatctgtggttaattagaaaatatattttccctttaaawgaatttgtgctgacttttaaaattattaataaaggtgacagctagctttggtgtctatattgaagaaaatgttcatcctaattggtttccgtttgtctaccctttggtctgctttcaacacagcagtcacagcaatctcattagtacagatcacataacactttccactaaaagtggaaatcttattagtacagatcacacaacactttccactaaaagtctctactggttttccatcacattcagtgggaaaagcacaatgacccacaaggccttaaggaccttttcctcacctcttttcatctctggcctcatctgatctctcttcctcagttgcccagctggtcatcccgctatgtcttgaacactcacacctgcctcagggcctttgcacttgatatttcttatgtctagaattattttcttcaatttcaatgtagcttgtttcctcacctccttttggtttttattcaagtgttaccttctcaacaagggcctccttgacaactctatttaaaattgcagctcccagcctgtccacttcctaaaccactttcctgctttatttttctccataaaatatatcaccatctaacttactatgtacatgttactgttcagttgaatatttatctttctaaatgcaatttttttgtgcgtggagctatttgttgttgtaatcattgctttctaagcacttagaatagtgcmcaacatataggaagcattcaatgygtttgtattaagttaataaatgactgaatgaataactagtacaaaccaccaatccataatttaagaatcttattgaatctgagaattaaaggattaagtgatttcactgtgcttcttatgataaaacacactgcactttttctaattatgaaatttcctttaaggttgaatggcattgttttagtctatttgggctattataacaaagtaccagatgaggtggcttataaactgcagcaatttatttctcatagttctggaggcttgacgtccaagatcaaagcactggcagattcaatgtctggtgagggtctgcttcctggttcatagatggccttcttcttgctgtagcctcacatggcagaaggggcaaataagctttctggggtttcatttataagggtactaattccattcttgggggctctgtcctcatgacctaattacctccccaatccccatcacctaataccatcacattaggggttaggatttcaacatatgaattttaggggaacagaaacattcagtctatagaaagcgtgaagtaaattttcttccagttcctatgcatgttcttactctgcttttaagcgtattctaaatttcagttgtatctgtcactatgtgactttaccacacttacagctttatttaggaaaagagatgttaattattttaactcttcttttgtaacagagaagtctgggactgtcattttttgttttttgcttgacattgtattttttcctcatagaacaaaagttagtataaaagaaagggaaaaaaggccatacaatgatgctgtttaaacaagagtgtaaatgtaggatatgtattttgatctaaaatgttgataaaccaaattctagcaatatcatgaaaatgtaaacattttggagacccagatcctatttcaaatagagtcaagatgactgccctagaaaatgcttcttgaagtcatggaataaattakatgattgtttatttaaaaaaaaagaacaataatacataggagatctgttaaaaaatctgtgaggaaagagctgttaaaatgttgaaaccacatgaattctgttatggaaagtctgaacaagactttctaaaatagattgaatgtgggcagttttcacagctgcctgatgacttccacacacaaaacatccacatttcatccttttggtggaatactgtgtattttccaattttattcttagagtttaattttttacttacatattatgcttatgtatatcatatttgttatatatattatatataactaatatacaattatattatttatttaaaaataaggaattaaaaacaattatattatttgtttttaaataaggaattacaaaataatgaagagaccgtatttattatagatcttgaaactgtgactaaaaaccccatgcacagagaaaattcttgagtcaaatggcttcattgatgaatagaagttagaatactggttattgttacaaggagagggaagataatgactgggagagggtatgtggaaagtttcatttcttatttttgattatataattgtacaataataatgtgttagtacatagaactaatataattgtaaataagtgtgtttatatataataaaatatacaaaatatagataatatattgtataatgtataattatatacaatataataaaaatgtgataaataatattgtataatatataattatatacaattatattatatgtactaatgtattagctatatgtatttatatgtacctatatataagactttttctagaaattgactacatatttgaattgtgagacagcatgtatgttttgattcatagataagatatgtttccaatattacccatatctctaaaatacaaacatggcaaaaaaaggctggagtgagactaaggagaaaggaggagctataagtgtgcccagattccatttctttacctatgacttatgcgttggtacatttaccttaggtaacttgtcccacttttatgctcttcaatttggtctagtgtaaaatggagcaaataggcccacttccttattacgaagcatattataaggataaagtgatgtgttataggcaaagagcatagcacactgctgcactttaggtgatactcagaaaatattacttttggtcttccacattgaaaataatggtgaatggagaataaatgggctaagttgtaatgtgaaaaatggaaaataacaaaacaaaagctcaaaaatgctttaattactggatattgaaatgatacctatgaggttcactttgtatatcacctaagaatattattttactcaatatatttttagcactttatggacattaatatttctatggagaaagcttaaaaagtgtcacttgtgcattgaaactcttttgtaacagcttctttactcttctgttgttgtyatgatatcctccagattacttaaatttttaaccaagaagtaaccttacttattactagtatgctctttccttaaaagcttttctgatttatgttattttaattatatcaatcttgttattatktacagtttttaattattttaataatttcaacctttctgcaactttccattttagatatgtctcattaatggcatatagtgaagttttgacgttttgtctagtttggcagtgttggtcttttaatgaaacatgcattttcagtggatctgtgtgtatctaagtgaagcatgtacacagaaaaggtgacaaataaaagtctgagagaatttttgctaaatgaaccttcccaagtaactactactgagacaaaaataaccagcaacccagaaacttccctcatgccttttccaatcactatcttgccttctcccctaatagtaaccagtattctaacttgtattcaccagtgaagccatttgatctaggagttttctctgtgcatgggttttagtcacagattccatatctataataaatgtgggactcactggagttttcatttcttatattttcagtttagttgagttgggcttttcaagaaattgatccacttacctaatttttcaaatatatcgacatgagttgttagtgatattatcatcttttaatttacaatgatctgtagtgatgccctttttttattccagatattgttgtgtaacctttgtttttcctttacagctttaataggtcttcataatttcattagtctttttcaaatagccagttttgggcttgattgattttctctatcgtgaaattgttatattgtattgaatcctgctcttatatgtcttgttttttacttctcgttattttttattttagtttactacattttcttagcttcttgaaatsgatacctatgttattaatatttcagttcttttttcctaatatatttattaacgcctacaatttgcctctacatagggctttagttgcctcctacaagtttgatatattgtatttttcattatcatttattttaaaatatattctaattttcatagtaaatttttctgtggcctctgagttatatagaagtgaartgcttaatttctgaacaattgagtatttttctaatcgttttgtttttgttgttattcctttcctcactaattccactatggtcagtgtattttcaattctttgagactaaactttttgagacttgtttttatccaacatatggcagtgacttgaaaacaatgtggaccagttgccctggctcactcctgtaatcccagcactttgggaggccaaggcaggcggatggcttgagcccagaagttcaagaccagtgtgggcaacgtggtgaaacctcatctctaccaaacaaaacaaaacaaaacaaaacaaaaccccaaaacaaattagctgggtgtgtgcctgtagtcccagctattctggagtctgaggtgggagaatcacttcaacccaggaggtagaggttgtggtgagccgagattacaccactgcactccagcctgggtgacagagctggacatcagaccctgtctaaaaaaaagcaaagaaaagaatgcagattctatagttgttggttgcagtactacaaatatatcagtgagttatatttatatatattgatacttttaaattagagacatacaaatttaggattattaaatttaataatttaaattttgtattaactcttttgtattaaccacctttttaatactactgccagcagtacttctatctttagagtgtacttttgtatgtagattcactagcttccttttttctctgtgtttgcgtgatataggttttctcatatgttgagtgtacttatatttaaggtgtatcttctgtgagcagcataaatttgaattgtttatttaactaatctgataatcttttcctttaaattggatacttaattcatttacatttagtgttactatactgatatatgggttcaaattaccatattctcatctgttttctgtttgtcttatcttttgctaatttttcttcctcataactttcttacttttggaatactgaaggtttttccctatttaattattccatttcttctttcattagcttgtcttctgtgaagtcttttattactcatactaattaccataaatatggtaacttgcgtccttcatttatcagaactttgtaatattttacctcagtcccacctccccatcagatttaattctatagttctcatatgtttaattctatgtatatattaaactccataggaagtaattgttaccatcataaacatgcagttttcatctaattttaaacacctttaacttttttgtttattttttgttagtatactttgtttatttatttatttctgttagtaaacttccatcaagaaagtatccyatttcttttctgccttttttaaatgaaagcctgctagtgataaatctctcatcttttgtttgttttttcacttttctttacttttgagacttattttccaccaagtataaagtagaatttcttgcctggttggaattttgttttgttttgtttttttccagcactctaaatatatcctatcattattacttgtttttcattatttctatcatgaagtaagcggaaagtcttattgttggttcttggaaacaagatcatttttcctttcactccattgaaggctattttttttaattttgcttttggtgttcaggggtttaccacaatgtacttaggaatgattttattggtattaatactatttgggattcaaaagcttctagattctgtggatcaatgtctttcaccaatttggtaaaattcttagccgatattttctcgaatgttgttactgtccattctttctctccactctccctgagacttcagtcacatccctgctagactgtttgccgtgctcattatgtattctatggcttcttttcatttgtcttctcttcttttgaggtttctcagtctgtacattttctgggtgacctgttgtttggtataaataatcccttttttctgctggattcaatcttttattacatacatttactggatttttaatttttgtatttttattttttagttttagaatatccaattgatactttaaaaaaattagactccaaatatctctccacttagtcatctggaacatattaataacagttattttaaattatatgtctgataactctgacgttggaaacaactgggagtctgtttctattgtcttttcatgcattcctgttttatgacaagcttggtcgtttttgattaaataatgtatgtgtctgaaaatgtataaaaattctggaagatgttatttttctcttaaaatgatttattttcattctgtcaagagttagtgtagaggcaagttgctttgcttcagtcagcaactcaaatgttttgtagcttagttagagattctgatggttgtttctagtttactcttagttctagggatagactttcaggactccagtggaaaccccgacttgtttaccacactctttccttcttggctgactcttaactccaaagtttgtcttcccaactctgggagacttcccaaggatcttcttagtttttcacttctcatgagttcatttttgcatgatgtttatcttctggctccttcaccacttagaaattggcaaatctcttgaaggcaaaagctgtgaagaatgtaggtctcatttctctatgaattatggtccctcacatcctagctgacttcatagccctgaattctaatgtttatcttcttatcctgtgagattgctgaacacactaagatgtagctttctctataacctcctattcaactgtcagcaaatcartaaaagtaccctgagaggaaaatggctagcttaccttawtttgcttccctttacttaagtctggctgccttggttgcttgctgatgccttcaaactgctgtttttagtattttatccagcttttatggttgttgtctttgagagaaaatggaaagggaaaaaatatttattttatttacagttttaaaaacaaaaatcagcatattatctgataaaattattattgctttttgtgaatttaaggaatgttctgaattattgcttcaatattaaaacagtaattattggaacattttgatggattatgaagaaagaatatgtaaaattgggatcgtgtggaaaatctggtatgcatgaaattggcatataaagtaggcctaaacaaagcaggtgctattcttagtaagaagcttcatgccccttatggcatatctgccctgaataatacataaagaaaataatttaacaatatgcgtttgaaaaatatttgttgagcaactactgttttttaagcagtgttctaagcctgtaggtctgtccatgaaggagacaggagtccttgcattccagggttttcaagtaaacaatttagaatagtgcaagttcatgaaaaaaaaagcataagattataataagattatagacggtgatgaaagagctaatttacatgtatgttctatgtatgcatttttcaggaagtgatatttgagctgagaattaaaaaccagaaaataccagtcatagaaaaatctgggtagagtttattaccagcaggaataaatgtggggtgctgaggaaaggaaagaaggccaatgtggctggaacctagtgatcaagagcaaaggtggcatgagatgctgtcacggaggtctccaggtcttcttagctcctgaagggagtagtcagtcatgataaacagtttatattgaattctgggtataatgagaaacccgcagtggtatttaagcaggtgtaacatgatttcctttatctcattagaagtaacattctgctaaatggagaatgattatagtgagataagtgtgaaaactaggtggcagtcaggaaaccatagtacttttttagcaaagagatgatggtaacttggaatagagtggtagtagcagagagaagtggcaggctgagatttatctggagttcggcatcacccgaattgatggtggaacaaatgtggagagtggggccaaaatgttgactcctaggagtttggcctgaagaaattttcctgaaatagtatggattaaaggaggagcagaatggagatactgggtggcaattaagggtctgttttaacatgttatctttgaagcattcgagtggtgccaggcatggtggctcactcctgtaagcccagcactttgggaggttgaggtgggaggattgcttaagcccaggtattcgagaccagcaaccagcccgggcaacaaagtgagacccctatctctacaaaaagaagcaaaaaattagccaggcatagtagtcccagctactcaggaggttgaggcaggagaatcacttgggtccaggaggtcaaggctgcagtgagccatattcatgtctctgcactccagcctgggagacagagcaagacgctgtctcaaaacaaaacaaaaaaattattcaagtggaaatattaaagggacaattggatttatgagtctggagttgagtgatgtgcactgggaaagagactgtacttaacagtaaaggcctgtttaagatcatttagaaagcaggtatagagataaaaagagggcctataattgaatcctaggcacttcaaatttaaaggtggtaagatcaaatacatcaagaaagagggaatcttcagctatggcaatgcagatgctgtgaggtacaaattaaaccactcaggtcttggaaatacctaaacatagggggaaaaaacacctaaattgtaatgagtatatgtgtgtatatatatataaatatatataatatattatatataatatataatacatatataatatatcttatatatattatatatatatattatatatataatatatataaaattagagaatctttaataagaggtgaatggctccaaacacagatttaatttggaagctcccaccctagcaatacctactggtgttcattttatttatgtaaacacacaaatgttgactatgtaatttttcaattaaggaaatagccaataaaattgtgtggaaaaaagatagcggtagcagataataacatcttttacttactaaagagattgtgtctaaatattaaaagtaatacattcccttgtcaaaacacttcatttttgtttgttttcacaaatattttaatgtggattttgagtcaaattttctgtaggaaggtcatggtagattaatgtcaaattagctgaaacaataaacacratgaaaagaaaaatcagccttgtaagacagtacaactaaggagatcagtttaaaacactaatgaggagttgcctctcagcactgggtcattatgattatactaatataataagttaggttcaggttagaaagcaaagatgaataatcttcaaaaggcacagtaaatagtcaatttagttgtctaccttcataatatttactatttccatactaaaagcttacagttgtgggctagaatatatgatattcacgtaataatatttaaattgaatttcatttttttgcttcttcattatccttacctctaccctcctcaataaattcatctcaaatgataagattttccatccatcattgtgaagaataatttatttacttaatgattctggaaatatgggaatgtttataaaacgaaatacaaaaattaagaaatggagtgggcaagtaaaaagacattttcccactgattttagaatatactcaagaaaattaaactagtgacaaaatagatttatttaacttataagctaattcataaattaatggcaaaatttatcacagtatacataactgagaytttgcagatttttttgtaaatagataacattctgatacaattaacagatctccatcagctgcattagatttcaagttgccctgctaccactgtatatatgcacatagataaatatgtatatgtagtgcaacacagatgagaagatataaagttgttttattttgttcgaatatgtattacagagaaccctatgtgctgtatagcaccttatatatctttcttttaagagaacctcataggacttccaaattcttcactgaaatagctcctacttcttatattacctttcgatatgtcagaaagattctttttctggaagctgttgttctcatccacatcattgcacaggctgacaatcaagacactatttctcactttctttaaaactaaatcaggatttgagggagtggagggatgactaggcagagcaaaaggatttttaaggcagtgaaaatactctgtaggatagtataatgatgggtacatgtccaaacccgcaggacgtgcaaggccaagagtgaagccgaatgtaaactataggctttgggtaattttgacgtgtcaatgtcatttcatcagtcattacaaatgtactactctactgggggatagtgataataggggaggttatacgtttatgggggcagtgagcgtatgggaaatctctgtattttttttttttcttttttgagacaaagtcttgctgtgtcgctcagactggagtgcagtggcacaatgtcggctcactgcagcctccgcctctagcattcaagcgattctcctgcctcggcttcctgagtacctggaactacaggtgcgcgccactataccccgctaatttttgtgtttttagtagagacaaggtttcaccatgttgcccaggctggtcttgaactcctgaccttaagtggtctgcccatgtcagcctcccaaagtgctaggattacaggtatgagccactgcacctggccaaaatctctgtatcttcctttcaattttgctttgaacctaaaattctccctaaaaaataaaatattaaaaaataaaagaaactctatgtaccctactgactctttgtcaaagattatctattttttttctcaactcatgcaatgtttaacactttggaccatattatcacttatggttagcctcttataatatggtatggctatttttttaaaaagtcatggtaaaatgacataacaaacaattttttatcttagccacttttaagtgtacattgttgtgcaaccatcatcaccattcagctctacaatgcttttcatcttgtaaaatttgaaatactgcacccattaaataataactccccattctctctcccccagtccctggcaaacactattctaccttctgtctctataaatttgatcattctgggcacgtcatataagtggaaccacacagtatttgtccttttgtaactggcttatttcattcaacatagtgtcttcgagattcttccacgttgtagcatatatcagagtttccttcatttttaaggctgaataatattccaatgtctatgtataagtagactcacacacacgtacatatatggcacattttttgtccattaatccattgatgaacacaggttaattccaccttctggctattgttcttaatgctatgaacatgggcatatgggcttcaatctttaaggtttcagttactcatggtaaactgaagtctgaaaatattacatacaaaaacattttaagagagagagagggagaagctacattcacataacttttattatattatattgttctattttttattagttattgttgttaaatctcttactgtgcctattttataaattaaacttcatcaaagatgtgtgtgtatagaaaaatacattgtatatatgggcttcatgcattgaatgagggtcttaggatgtatccccctgaggataaggagggactactataattctactgttaattctttgaggaaccactatattgttttccatagtggctgcaccattttacattcccatcggccatacacaaggattctaatttctccacacccttgccaacacttctttttctgtttttttttttttctttttaaatagttagcatcaaatgcgtatgaagtggtggcggttcatattttcagtcatcgtttcccagtatttcttgagacaattttgaaatattgtaagagatataaaataactttgatgttggaaagaatagcagtgaagaatgcccatgtaaaatttgagaatcttgaaacatgacagatacaacattgcattaaaggaaattaaatcctggacaattttgcttagcttgtaagtacatatacaacacatatacaaatacatgtacctataagtacatataaaatatatcctttctaaatttggctatattgtcagatacctgagaaaattattatctttatagcctctgtgatatgtcgccaatgcaaggcccatgaaaactcaaaaagagtcagttagtaaatgaactcttttattatttgtataaattatagtttttataatataaatgtaacatatgaatacttgtgtctggaattacaatagacacatttttatctccagggagttactactggcactttttgaaatcctgttttgtcctagacactggacaaaatattttacataaattatcttatagaacttttcaactccgtaagaaagatactattataattagtacattttgtatcacagaaattaaacaacttcctcaaaatgacacagttagaaaacaatagagcacaagatgaatccagttctttctgatgtcaaagcctgccgtgtatactccagatgacctgaaccttagagtaactaaaagcatcagggcttctctgatatataattgtgagaatctcactaaaaacaagattaaattactacagaggagtcttagaatttaaaactctaaaaagtgaaacttaggatttaccaaaaatgtttctaacttctcatatacatgtatggatgtaacctgaaatgctgggttgattattgaaatgtccatatgaacttacaaatttaccagaaaaaaatcaaactaccccatcaaaaagtgggcaaaggatatgaagagacacttctcaaaagaagacatttatgcagccaacagacacatgaaaaaatgctcgtcatcactggccttcagagaaatgcaaatcaaaaccacaaagagataccatcccacaccagttagaatggcgatcattaaaaagtcaggaaacaacaggtgctggagaggatgtggagaaataggaatgcttttacaccgttggcgggactgtaaactagttaaaccattgtggaagacagtgtggcgattcctcaaggatctagaactagaaataccatttgacccagccatcccattactgggtgtatacccaaaggattataaatcatgctgctataaagacacatgcacacatatgtttattgtggcactattcacaatagcaaagacttggaaccaacccaaatgtccatcaatgatagactggtttaagaaaatgtggcacatatataccatggaatactatgtagccataaaaaatgaagagttcatgtcctttgtagggatatggatgaagctggaaaccatcattctcagcaaactatagcaaggacaggaaaccaaacaccgcatgttctcactcataggwgggaaacgaacaatgagaacacttggacacagggtgggtaacatcacacaccggggcctgttgtggggtggggtgaggggggagggatagcattaggagatacacctaatgtaaatgacgagttaatggatgcagcacaccaacatggcacatgtatacatatgtaacaaacctgcacattgtgcacatgtatcctataacttaaagcatamcaataaaaaaagaaacttaaaaaaaatgaaatgtccgtatattttcttgattttttccaaatgttttgaagaaagtttttgtattattaaatgctattcattggtcaatttaagtaatcttcttttaagaaatcattcagarattgtaggtccttgatcgtaattctttttgggtaatttcaatttcaataggttaaacactgtgctggaagatttgagaaagattatcattggtccattttgtcaaaatcatttccagaagtttaagtccttttttcttcatttttagtgtgattcattgattttcctaaggaagaacatttaacttctctcagtattcacaaggaatacctgcttgaatgtttaagtaccaacagaggatttaaagttcttattacttatgagcattaaatgaattcaatactccaaattttatagaagaagcatttctgaagatagaaaataaggataatttttaaacacaagaaatcacatgcttttcatatcattatcaatgtggaaaatgctraaacaacttgctattaaaaaccatttatcagaaacttgtttaattaatatgtcaaatatctgggtttttaaatcatgtataacaatgaaaatattcctaaaaacatattgagaactttaacaaaacattttacagttggaatgaaattagtactggatgattggattaaaagccagtagaaattatatattatcctatttaaatgtaggactatataagttattggtaatcctttttcrtaattttattactttttccagtacctaagtggatactggtgactggtatataataagtaaccaatgaatagatattgaataatgcattgctttgctcaattttctcatctctgagctttcctgtctgtgctactgcaacattactttcttaattatattctctcactccactgcaataatattacagatgttattccctgattaagaatagtataaattgacaatccaacccctcaaatgaaattttttggtgatccaaacgttttaaacatccaataaagatataacatgctagttctctagtaggcacccatttccaggtttccaaacgtttcaacaaaaacatttatatatttctctattgattgcataatgtggagattctgttttgagaatgcacataaagtatattatattctgaactgtaacaaaatgagactctaatttattcacagtcctttttaaatttgtctgtatttttgttttcctgagaaaaatcttatctttatagcctctctggatattgaatatcttgagactagctttaattctcttgatttttattaaaacttctaattccaactttattcgtgaactacatgcttatataaaagtacgtttcatcaaacagctttctctttatctctttaaaatcattaccttttattattttcagtatgctttaatgctttaaaattttattcttgaaacatttggtttttccattgctactttcctattgattgttttcctcatatgtatcttgagattttagtctaggttttataacaagcatagctatatttacagatattttttctataaagttttcaatatagattctgatttttttatcttataaaaaatagttaacaccattaacatttggatttatttctgtctagttctcctctgctcacacacacacacacacacacacgtgtacacacaaatacatatatataaaatgggcagcacactaataaagataaaaataaactttataaagttttacattttgtaactggatattatattgtgaacatccccatgtaactgtgtagtatttgaaacttagttatttaaaaattaaattgcaaatgtatgatcttatagactattttcctgcttccaagacttctttggaactgtggactccctgaaatgccagggtaacataagcgagacagaacagctagcagaacctcagggaataccactgactttatggtgtcagccagtatcatgagagcccacaatgttgcctttcaaaccaagtgatacatttctatcaataattaaataaatttgaaagtacactgccattgcatttgcaatcttctttctttgttctttattcattgcaataataaaaacaaacaaacaaaaaacaacaccaaatcaaatgactgttgatgggggaattataagaatagatgggagtgaagacccaagctgactttacctccaactcaaagatttttgtccactaatctaatttctctttctctctgtgtttgttaaaagtttcaaagtagatgtaggttctcttgccaagttgatactcgtgttctttccttttcaagattacataaaaagtatagcttagatccaacgtatcaacctggaataggtgaaaatatcactattgattataactagtatttaacgaggcttaatatggaccaaacactgatctaggtatttcacatgtattatgttttgtaatcctcacaactttatgaaggaagtatatgtgtgagaaaagatacacacgattagattttgagagccagtgcaaactgcaccgcaggtgtattgcctgtkcaaatttttctttaccactctatattaacacctaagttaaaggccggcacaataarcaatgtgttgcttgataatatttgtaaaacaaatggattagtgaacaagttaatatgtcactctgtggtctttaaaatatatatggaaatgcagaatattaaaatctgcaatacatattttgaaaaacaaaggtgagagtaatgctagccaaagcaggtttgactgcaggcacaactgtccttcccactcttcttaattgaagagtcacctcaatccccatttgaatgttctcttttcaacctcctaaaaagattactgagaatgtagatatttaaatgtattctgttcatctttaaataatttcatttatgtttaagctgcaaaaattgatctgaagttagtctggtatattgtgtactttaagcatgtgatacrtttctaaaatgttcatgtcaagaatatctacaattcaaatcatgaccttcttttggcttgtattctaattttgaagtttctgacctagacacaaaaatgattaactgaagaattttaatagttgtactgttgttcttcacttctatcagtgatgatatttgatagtgtaatatgctgagcaggcaaacaatgaaaaagtcccctccatgcaaaatgtatgtaaaatcagctttcaataagtgaacagtatttactacctgctgttccttttcacyatttgcagtaccattcttagactcactgcaggcataaaccctgggataaggaaaagttaagcctccrttcttcatacctctaataaggctttgccaatggctgcaatcattttacaaccatccacttatgtttaggtttaacagagtcttggcttcataatgaaatacttcattaaagtatttttatgatatctgtttacacatatgttcatagtagaattgcatggtgttctgttatccagtctttgccattcacatggactcagtttatagtgtctggttatgctactgaagatcttcccgctttaccatttgctgttaagtaattgtagtcagacagactgcccaggaagccccatggactcagttttatcccttgggtatcacaaatgaggaagagtttgattccatattggtgaaatactacttctgtttcctaaagatatgttgttttctaagatttgcttctagattttgtgattaaatgttttattggacagggatttaagaatcagaatttcatgacattttgtcctactttaaatggaaatgtctatagacttttctagtgaaggcttttacaaatgttaagggatgattgaatgctcacagcaggacacatggcattacagaaagtctccaaaattattcatccttttggggacaactataaccatgattttttgtgacactcataacctgttgaattggaaaaatattaatgttagaaatcygttctcatgtcacttttaaaattcttctccttttttgcctcctgtagcatgagtcctagtttgattaaactagacacttgattttctccaatggtaacatgtttttaaaaaaggacttttactctgttggaaccaattaggccaatgtgaggaactttggaaggamcatgagcagccaaacttgctaacagcaaaacrtatttttctgaaggcagcatgaaaaggacggaggagttctctaaggactgtgagttccacgggtccttttgagcttcagaaatccagctctcagcacttcataaatcatttctgacctgatgtcactgaagttgtattattatgtggttagtatmaaattcagaaaaattgggagaaaatacaaggagaagaatttgcagggtgattgttgtaagatttttatcatgtcctcttaaaaatggtagcttttcagaaacttktgttaactgctttgcattccatcttgagaaaatgtctgtatagttagatgagcatcatctcctctccttgtttttaaatcacatccaaaatgacatcaggcttgcagccgtctcattttttccttttatttacactcttcacacttcattggcaattgaggtcaccactttaaaatttagggtgaaggctaaagaccagcttgacaaactgttggcggaatgctctcttttgcaagtcttcgttttgaagaaagaatgtgtgatttagaaatatttaagattgtcattttggtagaacttctcatctatcaatgcagggtgcagcatccctatttattaatgttgtgttggttagatatgttcacccattaggtacgtgcagaggtacctgaaaccatctgagaggtggtatcccatttttcataatctattcaattgaactttaaaaataactgagcatcttttatatacaagacattaacagacatttatattctatggtatctactgctagcaacttataacagttttggtggtaaaataaaggcaaacttgcttcataacaaaacaaaattaaattatcaaaaagaaatgctcagttgttaatttaaaatataaaatgagacatgagaataaccttaggttagaaattcagatgtagaaaatatctgtataaagaagttagttgaaatactcataggcatgaaaggtattttgcaaaaagcaaaagtaggcaaaactggatctatgaagttgctccataatgtactagtcaggtgaagtagcacaaattacctagtgtatcagttttcttttgttaacacaacatattaccacaaacttaatggcttaaaacctcacaaatttatctcacagtttaataggttagtagtctgacacaagtctcactgagctaaagtccaggtgtgggtagtattgcatttctttctggaggctctaaggtagaattcattttctaaaattcattcatttaggatagaagctgaaagaatcagtttctacaggctacctgcatcctttggctcatgaccccttcctccatcttcaaagccaggaacaggttgaatccttcgttgtaccaccctaacctcttcttttgcctccctcttatacttttcaggacccttatgattacattgagcccagtggattatccagggtgatcctttcatctcaaggtctttaactgaatcatatctacaaagttccctttgccataaaaagggtcatattcacaggttccaagaattaaatatagacgtctttgagggaccactgtttactctaccataactagcctatctcatttcaattttctaatcagttactacctgtctcttagagttcttgttagcagaaacaaatttctgtgtaataaagtgcctggcaaaaagtaggtcctaaataaaatgttattttccccaaggraaagattattaggaattataacattgggacacacctttgtttaaaaagctctaattaacaagaaccacagcaggggcgcrcatacaggggttggagagaaattcagttagtgctgtcttctggacactccttctatcttcattctctcctctgccattgttaaccttccattttaggcaaggagctgtattaggaaaatgtggtttccttttattaaaagaaaatctctaaattattaatagatattacttttccaaagaaaatttcagaaaggagaagaacaacataatcaaaatctgtggacactttaaagataaggatgatggagaaagactgaattttgcaagcaggttataataactcctgagagtgattgtaatagggtgattaggtcatgcatggactacaagggatcaartagaaaaggagtggtaaagtagtaaacagcagagggtacaggctactcttaagaaagtccctagagaaggataagaaaatggggcaatacataagcttggaaatagatgatgatatttcttttttttttaatttaattttatttatttatttwttttattaatcattcttgggtgtttctcacagagggggatttggcagggtcacaggacaatagtggagggaaggtcagcagataaacatgtgaacaaaggyctctggttttcctaggcagaggaccctgcggccttccgcagtgtttgtgtccctgggtacttgagatcagggagtggtgatgactcttaacgagcatgctgccttcaagcatctgtttaacaaagcacatcttgcacggcccttaatccattcaaccctgagtggacacagcacatgtttcagagagcacggggttgggagtaaggtcatagatcaacagcatcccaaggcagaagaatctttcttagtacagaacaaaatggagtctcctatgtctacttctttctacacagacacagcaacaatctgatttctctatcttttccccacatttcccccttttctattccacaaaaccaccatcatcatcatggcccgttctcaatgagctgctgggtacacctcccagatggggtggcggctgggcagaggggctcctcacttcccagaaggggtggccggtagaggcgccccccacctccctcccagacggggcggctggccaggcgggggctgccccctacctccctcctggacggggcggctggcagggtgggggctgcccccacctccctcccggacggggtggctgccgggcggagacgctcctcacttcccagatggggtagctgccgggcggaggggctcctcacttctcagacggggcggctgccgggcggaggggttcctcacttctcagatggggcggctgccgggcagaggggctcctcacttctcagacgcagcggccgggcagagacgctcctcacttcctagacgggatggcggtccggaagaggcactcctcacttcccagactgggtagccaggcagaggggctccttacatcccagacgatgggcggccaggcagagacgctcctcacttcccagacggggtggcggccgggcagaggctgcaaactcggcactttgggaggccaaggcaggcggctgggaggtggaggttgtagctagccgagatcacacactgcactccagcctgggcaacattgagcactgagtgaacgagactccatctgcaatctcggcacctcgggaggccgaggctggcagatcactcgcggttaggagctggagaccagcccggtagatgatgatatttcatttgcaatagctaaaattgactaagtgttaagtgactctgatctgttgaaagaattcatgaaccaagatcagaaactttcttctgtctttgatttgttattctactctgttaacattatacttctaacacttcccatcactacaaatctttgctattagtccccaaatgctttgaactagagtgattcatttatgtgtgtaatgtcataaattggagaatgtgtaggttcatcttaccttggtaaatacagaagcacaaaaaacaaaggcaatgccaggtatttctccagggtgaataaattttagaaggcaaatttaaactgtcatatttctgattgcctgtgattcacaccattgttgtactctgtgacagtttcmttgaaaggactgtcatgttccatgaggaactcagcctacctgctcttttaccagtagctggtgggaaagccatrctgtgccaatgacttattcacaggaggcaggtcaatcttttgaaaccacagattgtttcaaatgagagaaaaatatgtgagaagagaatagatgtcaagggtagtgctaaagacaaggaaaatgcttgcctgggttttccctgcagctgacgttgttaaaaatgatagcaacttaatgaagcatggcgtactaaatgcattaataagctgagggaggaccttattcattccaatttggactctgctcactcgtgttactcgttttcttaagactggactaaaattgtgagaccttatgggccaacgataccctttagagctgataattaatttgaaagaattattaaagcatatttcttgagctaagaatgcagtgtattcacagtaagaggcagagttaaccatttatcaagataattaagaaaatgcattaaatgtttgctccgtaagagcaagcactaaattaccagtagtagtaatattattatgtgaaagggaatcaatagtttgtttactaaaatgagatgcattagcaagcttttttattctgatataaaaattttcaaatatacacaaaagtatagagaataccgtggactcaaatgtacccaacacccatccataagtattaactcaggacccctcttgtatcagttttcaacccatccacatcctactccacccctccagattattgggaagcaaattccatatgtattactcgcttygtaactacttcattatgtatctctgaaggataagactcttttataaaggaaaccattgtcacatctaaaaattaatactattatactgattctttaatattaacaaatatttactcagtattcaaattcatcacacctgcttccaagttttttaaaaacagttgaatcaggattcacaagaagtcacatactgcatttgttcgatatatctaggtctctcaatcaataacattttaacttccttgcaacttatttttttgaagaaaccacgttgtgtgtccagtagtgtttcttacatcctgcattttgctacttagggttcctgtagtactgtttgcatatttctctactactatatttcctgaaaactgatagataaatttagagagttactctgattcagggttcatatttttggcacaaccactttatagattgtgctatgtgcttccatcacactgcagaaaatatctgggtgtctcttttttggggatgtttctggtcattgatcagcattaatggccacaggtccatcattttatgggggctcccttcatagtaaactgcacagtaaactatacacagtgaaccttgtggtaaactgtagcatcctgtgtactatagcaatttactccatgttgcttttttcatttaacaataaatcccgccattcattgctcttccatctcagggttttcttgcttattattgcttgttaaaattcttccaaatcacatttataatcaagtcgttcagcactaaggaaaaaaaataacattttcatgaaaaaatgaaattgcattacatttatatattctcttagggacattgaaaataagtcttgctatttttcagagctagactttgagatttgcttttttgcagagtgagatagagaagtccttcaaatactgtcccttgaagagttaggcattgatttaaacccttttgaaaaacaatttcaacaaataattgaaaatgttctcttcaaagtattatcattagtcatccagttagattattattattaggaattctgaggtggtggaataattcattttccaatgtgttaacttctcatgagtttaatgtgagtataaaaagtctgttttaactgagrgcagagtattcctttttctcttataatacaggagccagttacaacacaggaggtgaaatggcctgtttgcttacctgcaacttcaggaatttcatgcttagcaattaattgcagtacacacttgtgggggtaggggtaggaggttggataagtgggttgcacttaataattcagtgacaattacaaatcgtttcactatatgtgaaagtatttgaagtaaatttacctgaagatagaaaatatgggtgggcaagctcctcctgaactccccaccacattattctaggtttattgaagtaaatgtaaacttataaggggacataaaactcacacagaaaataataattagacatatttccacattaatgtttttaagtttaaaacatcatttaaaaattttatcactgatgcttgacttaaacaagtccacttatagcattgtcagaatctgtataagtatctcttcagggaatttttaagatgagagtgaacaattttctgagattgcctacacatttttgttacacagtaagagccaggttctatgtggcttaggtggggatggggctttgagtgaatcctctgttgtacacagacttaatacattctccatttcagcccacttttcacctctgttttcatcagacctacctcggtgaggttctagacttctgccctgctgcagctactcagtactttaggccatgacctccgctctccttcctcagcaactcaccacagaccttccrgaaaaatgttaaacccttctcatccttttcttgttattggtttctattttctttctttcttttttctttagcgtcacaggggaagagctgataattgtattggctatatgtatcaactcaaacagagagacattacctgcagttctataaagattcccagattattccaatgggtattaagcttgaaaacatgatgtctatgatcctttctggttctgatattgtataactctcatcacttaatgaaagccaccgttcctatttggataaataagagaattgaaaaacgyactattagaactgagagtacagatgagctttccaaatatattagagatggcatcacagtacatggaaatgttaaaatccataacatgggcaagagcacatactagaaaagtgcagaacctctttagaagtgaagcattttcgttccatgcacatcaatttgctataggagttcagggacaaatagcaatatgggaaggaggcggagctcaacattgagcagaaattagacacatgctgttctcttgagagattaagaaagaataaatagaagagagtaagtcaggtcctatgagaaggataaagcattgtcttccatagagagtgaccttcattaatattttttacggcttttgtggagatcagcctaaggaaacagaagtcctatggccttattacatcattacagaatcacactttggctgggtctcttaactgtgtaacagtggtgctcaaaagtctctgtaaatctccaaaacacaatactctttagtagcatttcttagatttgtgattcttctggggacaaaggatctgggatacaatgggttcccgagtgcagtggtgtgatctcggctcactgcaacctccgccttccgattttcaagcgattctcctgcctcagcttcyggagtagctgggattacaggcgcccaccaccacccccgactaattttttttttttgtattttttagtagagacggagtttcaccatattggccaggctggtctcgaactcctgacatcgtgatccgcctgccccagcctcccaaagtgctgggattacaggcgtgagccaccgtgcccggccgaggattttttttttttttaaatcaagacttagcaatgcatgttctagaaactgattctggttttcagacttaactaacatgggtataggtgagctaagatattaagctgcagggaagggtctagagtagctagagttcctgggctgctcacttcaagctatgaggtctcctgaacactggtaaaaaccccagtgctgtacaaatatcattttatcttagccatgatgttcaagattggaaagcataactctatgtgatgatcattgtccgttgcttattattttgagactaaaggattcttaagaaagaccctattctccatttccacactaaatgagatcaagttcttaatactcttcttattataggaggaacatctaattcaatgctacatcagtaattaaatgatattttgttaggtgacatgcaaatgagtaacaaatggaatatgaaatagaaagttccctttgttatgtaaattgtcaaacacttgatattgtttttaaagttatttgggatttttttaagacaccaagtttgtaacaagtgcccttcaacagaaaagacacttggatatcatgagatgttctcttaggttcctcaaagcctagcagtcatagcattttaatacttactagtggggagtctgccttccctgctgcacaccagaacagactggggtgggggttaatcatctggaaatgaggtattataactactgattttgaagagtctttataatgaaaacaagacacagttaataaaagtagcatagaaaacattagagagttattttattagggccattaaatatttggagtacagtacttagaaaatcactgttaaaattgttacagttactctctgaagcctgctaagaatactgctatttattacatttttaataatgctattcactacattttaaaagtttactcaaaaactacatgactttcaagtcatttaagaagtccaaaagaaattccatgccaacaaatttaattaattttgcatggaatgtgaaagaacccatagaaaataaatgaaagagggatattgttttgaaatgggactcattcagtcttctgtaaggcggtgactgcttttccgtgtcactgctggcagttatgttgaattatagaaagagtctgtggggtctctagtagaacttctcttcgtggattatttttatctattattccagagccaacacaggagctatgaagtcataaatccacattgtagctgcatgagaacttggccttatcacatatttgcatactcagtgctttctaagcaaagttctttatccataaccttagtgtagtcttatttttcttagtgggtacctgtgatctctaatatgctttgctatctctctttttgttttatatctttaaaaaaatctctatgtttttattttttctggaaggaaacaggctcacttggaatatttacctagattctctctttcacaagaacacgcagtattttgtattcattatctcattatctcttccctggttgtgtctttagaaaagaaacaatggataacagagggtaaaagagtttcagtaattttctcagctcacagagacctaataggacaaatactccaggaacgtatgccttagttcctgcagatgacaatatatgctaactgggattcaagctctaacaaacaggcaagaccaatgtcaaactaataaccataacgtggaagcacattacagtgattttggctatccaactaaatgtaataaatatcaaatgcccaccatttcagaagaattataataaggaatatagcatctttaacccatttctcatttgcctgaagaatacttgcagacagcatttgtggcttaatgtttacccygagataacttgtggcttactgtcctaaccttatccccaaagtttgccatgaaatatctcacttttattattatttttgcataggtctagcatattgactttggaaacaaaagacatcattctatttgtagcattctgtgtttgatagtagtatttccatatacaaaatatagtaattattgattgctgaaatcaaatcctagaaaatacagcattcctatataaaaaattattaaattctgatcatcatatacatttctgttacattaggattagagataagttttatttagaaataactctaagaaacgtttttatattttattttcacattgaaaataagtcagatttgcttcagcctcaaaaaatgtgtttatgtaaaattaaatgagagctggcagtgagctgtacattttttttcctaatgggacatgggttatgggttaaagatgtacaagctggccgggcacggtggctcatgcctgtaatcccaacactttgtgaggctgaggcaagtggatcacctgaggttaggagtttgagaccagccttaccaatatggtgaaactccatctctactaaatacaaaaaaaaaaaaaaaaaaaattagccaggcgcagtggcacctgcctgtaatccagctacttgggaggctgaggcaggagaattgcttgaacctgggaggcagaggttgcagtgagccaagcttgcgccattgcactccatcctggacaacagagcaggacgcagtctggaaaaaaaaaaaaagtgtaaaagctagaggccctggcctccacaagcccacaatttagttattcttcttctttatgattttaagaccttgtcaggaatactttgggattatcagtagttaggaccaagatatttcatattttatagcagagacaactctatctgtgcattttataagattaatccattggtatgtttcttgttgaatttctatataaagacattctacgtgatgagttgttcaatatgaactgtctaaaaaacaattccttatgaataatacctaaaaatgcataagtagcaaatatcttttatagtggttgatgtaacatattctatgttgttcctacttttgccctttctctgttacttattttactttgtctttattttaaagataattttatttaaaagtaaaacatttatgttcatacaaaaaatatagcagaatacgggatggaaaataaaagtcctcctcttttcttgactcctaaaggtggcagctttaatatgttcacataattcctctcccaaaatgtcttggcatattcaagcagttacaggcacatacatagatatgtgtgtctatctgcagttatacctatctatatgcctttgtaaatataaattcatcagtatttctcacctgcagtgatactcaataaaacagaatgctcaaagcccagacccctcaggacaaatatcttggctgtccttgctatgctggggtcaatcagatggtctcaggggagaggaggcatttgggaggttgggcagcagtgatttgtcaacaagtacagaagcatttcagtattttatccactagttgttccacaactgtgcctaaaaggctaatactaaccctactttgactcattcgatgggtgatttcccctccatggctctcaagcatgcatgcattcaagtaaacatcttgaaggaatagcatcagagccacctgtattaccgcattccataccaaatttttatatttttaaatctagtcccttagggtataccatagatcctatacacgtatgcatgagttaccatgtcaaaactatgaagcagataaaatttgtttctagagcatccctttcaggattccctctgtagctcagcagtcctgttaatcacattgtagtgagcctgtcctcccaattgtgccccaccagtgacctcatccacttagagcttagagctgccaagctctcatacctcatagcatttactagtcaagaacatatcatactgttttattattatagcacttttcatttgtctcattattacaatatattaacaacacattgatggtggaatagtaatttaaactaattcatatctgtctttctacctagaacattgtacataaatgtcattccataatgtttcttcactattcttttggactacattggtaaagacacagatatgcactaccacaaaacatctagaatatttctttttttacgtcttcaaattctatataaatttgtaaatagagcattgccacattcctctccattgtcactctgttaacagtaacaatacctctttatttcaccccttttcttgcatgtttaccttttgtaaagagaaggtacagaaacccttcatttaatgtgtttcaggttcaatccrttgtcttcataacactggaatttctcctccattattttctatttggggatgtaaaggaatggacatttattgaggatttactgccacaatgctagaaccacaatctgaacataggaatgtgtttatgttgtttttgctgtaccatactaactgcctctaaatggcacttttttgaggattatgtgatataagtaaacaagttttctaaactatcaagcactattcacactgggaatttctagcttgtattttacagtctttaacacagtaaggtgagtaaattggtatgtactattaataaatgttttaggtggtaataattataatggaactttaaacatcaggtgaaatgttgccaatgagttgttactaaaatccagtcttaatccatttcttttaaagccatggttgtcaaaacaaaacatcacttcttagcaaaaaattattagatatgaacctgtaatagtaaaatcatttcagagaacattataagattatagaataaaatctgaaataaaatctactgtagcatttagacttatatttgacataaaatgatgagaatatttgggaattcaatgttattgttgttgttatacttccctaggtgttccagatcgcgtatgtgattgtgaaggcagctaactccccccggcctggaaactggattttggaacgctctcttgatgatgttgaatacaagccctgrcagtatcatgctgtgacagacacggagtgcctaacgctttacaatatttatccccgcactgggccaccgtcatatgccaaagatgatgaggtcatctgcacttcattttactccaagatacaccccttagaaaatggagaggtaagatgagaaaactcaccatttaagcacatttgatacggtgaaataggcctgtcagaaagacctgaatatatcagtaattaatgtcagggagattttaaaataggatttagcaaaagtacatttaaatgagttattaaataaaaaagaaaaacctgaggtgattagaattttaactaccttcatgtgtctcccatctccagtaaagatcagagaagaggaaataggtttaatctggaaagtcaatgattaattttacatataaagagactttctcaacaatgaggattgctaatgattagagaaggattggagaccttaaaggtggccttacatttgagggtactttggtctgaagatggagacaaaagaaatgaatttgtgaagaaatgtaatccacatgaaagacccaaatgaaaagtaattctttcaatcttttgatgtttttctgctgtcaccacatagggctacagtggggtttcttccctgggtcaggctttgtggaacagtaatgtgcaggaagtcttaggttctcagtgatgtgcaagctaggttacgtgcttagttcaaatatgttcttctccagtgtctgtcatcctgtggttaagattttagattcattcattgattttaagccacatattctaaccatggcttcagttgttattagtttattagttgtatgtgggggcggggaggttttttttttgtttttttttttttttgttttctggcttagttgtgtgttcttgatccagttacttaaattctctgcacctcagtttcatcgcccataaatcaggaataataatagttcttacctcatataattgtcaagaggattaaatgcattattgtatttaaagcattagaacaatgctgaaatgcacactaagtactctgtgctatttttattgttttgttgccattaaggaaataataaccattactactattatttttattattatccttagtcttctctcaaatacccaaactttgacttagtgactctcttgaattattcaatatttctttagtatgtttccctgacttgtctccctttagtatatgtgacccacctcctttcatgctacctaattatgtatatctccattgatactcatgtctgatattctctcccacatagtccacacatctgaagctagtatcatcatttatatttacattttcagaaaacccatattcacattctatcatgcccaccccagccaatctagggttatctctcaacacttctagggaaaattagggttttggcataaatctgtcagaccctcattaggcactatttttatattaatgtataccagtgcttcactatattttaaattccatgttcaaaaataccagttttggggaaaaacattccaaatggtactctcagcagaaatctcaatctgccaaatgacaaggactcaaatgcagtgagtcaaacagctgttcaacctgctttgtgcctagaggcatccaattcctggccagtttggcctgaggatatgggagtagggagtgcagaaagagttttgagttgaatttttattattttttatcctagattcagtttacataagactaataattctcaaacaatttaagactattctatacctttaaaaatgattcaattcagaaatttattaagcaatataaaatacacttcggcaggtatgtaacatgcgtgtcacaagcatataccctacccattctctcccttcattaataatggttctccattccttaaaccaagtcagcctgccaatatgaaacaaaagacatgtttattagttaattagttagtttctttaattggctatattgttttcactcctaaacaacacttactaaaaactgcttattgatggtaactattaggagcaactgactgaactgtctctgtgacatgtttccttacgtctatttgtcactcatggggaagtgaatgaaataaggaacagaaagtaattcaaaatatttgccatagaatgataagactgaagaataagaattaaattcagacctctcctaggctatctattcattttatatagcttactttgtggaatatgttacttttttgaatagacaggtgatatcctccaagactctcagctcaatgataatataactgaaataataattgaggtctctgattctcaggtaaatatttcatccataatctggtaaggattaaaagttgacttttaaaagttgacaatcgctaaacttaaaaatggttcagaggagatacaatattgctggatctaatgtaagtagaaagaatcctaattctgakatatcatggcatagaaaaagacacaaggaattagaagacctggattctggtactggttccagttatttgtgggaccttggtcaaatgatttaatctctctgggattaaatttctttaatagatgaattagttcaatgcccagattgttctaaggcagcatggtattttctaaaataatatagctttggctatcatacaacatttgaggatattctaaaagttttggatacttttctctaacattatccagacaaagtagctgtggaataaatctcactcgtcagctttagttttaaaattatgtactttcacataatccctggaatacaattattaattgtttatgttcaaaactttacagagaagtgacagtcaaataagagaaacaaacatataaaccagtaaataaaacatgattgcataagtactgtaacagtagtgtatacagagagcaataaatctccccctgcttgagtggaaggaggcacattgagaagataacttctcagaatatgggaaaaccagcaacaactcttatctcaaaagtctcaaagccaatatgcaaattcatctccaataatgcctatgtgttaaactcggtacatacagaatttacctccattgttgagggatattgttatcagatgtagaattctaggtttgcagttattttcttttggcacattttattgttttctgatttccattgcttatgtagagaatgcagctatccgattactatcttttggagtgacttttctctgatttatttaaatatttttttctttgttcttcagtagttttactatgatgcttcagatcttcactgcccactacaatagccactagccatatgtggtaattcaaatttaaatttcagttaatcaaaattaaattaaaattccatttccccattacactagccacatttcaagtactcagtagccacatgggactagcagccaccacactggattgggcagaaagcaacactgccattattgcacaaagttctgttgggcaatgctactttagattgtacctttttattttctacatatctgcaaagtgatgtctttcatcagttcagaaaactgttcagtcattacctctctaaatattgcttcttccgcattccctctgctctatgattctaattaaaaatgacttggaactttttactgtatacactatgtattttaaactctcttctttagttttcatccttttgtctttctgtatcttcattctaggtattttcttctggattacttctagttcattaattctcttctcagctatgtaaatattgctattaaagttattcataggattcttaatttcatatatttttcagtttctaaatttctctggttcattttctttttttctttctttcttttttttttttttttgagaccgagtctcgctctgtcacccaggctggagtgcagtggcgccatctcagctcactgtaacctccgcctcccgggttcccgggttcaagtggttctcctgcctcagcctcctgagtagctgggattacaggcgcgtgccaccatgtccacttgatttttgtgttttcagtacagacagggtttcaccatgttggtcaggatggtctcgatctcttgacctcatgatctgcccaccttggcctcccaaagtgctaggattacaggcatgagccactgtgcccagcctggttcattttcaaatagaagttgtttctcattttacattgaaattttatatttatagtaaaattttaatttaataatatgatttattctaaaattttcaatattctatttttaatctccttgagcataaagtaaaaattatctttaaaagtttttgtctgataattctaatatatggcctttttggatatattttattttctgtttcatctgctgattctttttatgctgtcttacattcttgtgtgcctgattatctttgtataacagaagttgtatttgaaagagaatgtgtagaaataatttgagagctagtatattgtcttcatcctgtgtgaactttctgatgctactgccaggcaatggaaatctggatcatcttaattcaattttagggattcaaatttctgggacattcagatgattcaaagcattgctataacccagtgacagctgctttaattccagtatacgctcattcccatgctgcttatctttggagtccaagccagcgtgtgtgggaattacgaaagtcccacccatgcagtcctggaatccaacttttgtcctcctaatacagcagggctgtcaaaagagctgctcagtctctcagccatgtgtctggacaggaaaatgctcacaggacaaaagctgtcacaacgtaccaatcacctgtctagacatctcttttgtccttgatgttgagaaggttatcttcactctcttgatagctctcacatggctttaaacatatgtttttgtatatttatccagtttgtctagttgttgtcattgagagtgttgactcttactgtataatctaccataaatagaagcgaagttgcacatgcatttaattttttttattttggaattatgttaagtttacacacatgtrtgaagattatagagaatcctcacattccctcatccagctatccctaggaataatatcttaaataatgacaatgcacatgttaaaactaagaagttagcattgatacattattgttatctaaaccacagaccttattcaggtttcattcattttaccaatttcattttttctcttctgggatccaattcaggtactattttgcatttagtcactgatctgtgacagttttaagagatattttaagaaatattttaagagatatttagagatattttatagactattattcagtttgggtttgcctgatgttttttcatggttaaactgggcttctggattttgggaaccaatactacagaggaaacagtttctcattgcatcaatcattttttattaatatatgcatatttttttcttttttattggtttatggggcttgtgcttctattaataggtagatttttaaaatgtttttaatttttatggttacatagtaggtatatatattttagatagatttttaacgtggacagcagtatctaaatatttactgtgatttgtaatgtatattttttactaagcattgaatggtcattttcttccagaccttcaaaatattccttaaatatgtcagaaataagaaaaacaagtccctccctctctgccttcctcccttccttccttccttccttttttttctttcttctttacaaacaggttctcattgtgttgatcaggctagagtccagtggcatgattatagctcactgcaggctcaaactcctaggctcaagaaatcttcctacctaaaaaatcagcctccagctaattttttaaaatttttttgtagagacagggtcttgctatgttgcccaggccgttctcaaactcctggcctcaagtgatctttccaccttagtcttctaaagttacagtcttctgagattacagacatgaaccaccatgcctggcccagaggaatttttaaggcccacccatgtaacaaggcattatgaaataaacatgtctcaattgttacacactagttagacaacaatgttcatgttttaggcttagaacattaatcggaaatagttttcttgtgactaatgccaaatccactgagtctaaagtttattacatttccacttgtctaaagaatttttgagacatgtgccaaaatctttagaacattagagctgaaagataccttaggtaaatttctcatcaatctattaaaggatattcaagcccccaatttcagcctctgtatccaaacttcaatactgccctatgttcatatcatcactggagaggtctggcctttccttatggcctctttaatcttaattgcatcatctctgatgttttatttggctttgtttgttactccagttactcccacctgtttcccttcatggtttggtttggccccttctctgccctccactccacattgatttcaagagatcaacaaatgttagagaactgggttcaactactaccaagaaagagcttaaccctgaaacctagcatcctaggcctgcacccaaagggagaagagaagctyattctgagctatgagataatcgtaaggtatcaagtctcagggcctggcaaaggagggataatggaggatataggcaagataataatatgactgggtatgtcgttatccaggctgcaaatagaaggaggctttgagcaaaagccttaaaacagttttattttagaagggcaattttctatcatcaatgccaagagaaggctcagcagggaccctactttgtcctgctttgagcaaatgatactgagctccctaataggagttgcagggtatgaagcaacagactgcaggggcctccattactttgaggccaaccacagggtagagctcttgtgggaacagctacataacatgcatgtccagcagtgccccagggaaccaagccatcgagagctactatcacagcccaagtgctgcctctgcagaaagcagtagcccagatgctattgagaactgcttacaagaactgccacttggaagcaccctgagaacttggctttacttggaaatcacctaggagcatttgaaaaatagctactcctgagaccagaacttttaattcattatatttgtcagaggctcattaagccctatgtatattttaaacaagtactcttggtgattcttatgtctgtattcctggcttaatgttcagctatttccagccttttaaaccctgtaggagaacagggcaccagttatttagggaaagaatattggtcattctaactacttccaactgaagaaagagactaactttttctgtcaacaaatgtgataggttttggtggactgagtctcttggcaggtttgagttgagcaaataaacttcgaactaaaactaggttattgatggtcaaaggggtatctgagagaagaatcacagtaataatattgaggaggacgaactttctagatggcactgctttagagatcctagaattaaaattataatatttttctgttgtatgagacttttccctttctttgactcacattattgcttttaatttatttggattgtcactagactgctagctaaatattcgtggttaccatagtgattttgcttccatttcctcatacagaggcctttaagttatttacatatgatttcctttccttcttaccaccaccttctcactctcctggactgcagctcaatggaacttagattcactttgattctgctttgaaacatggcaggcttgtataaaaatccctggagaaaccatcattaaatcttgaagacacttttttttttttttgtaaactgtatgtagagctttgatattattttgatttcctatgtgacagaattttatatatacagacagaatatttttcttcctcttttcatcatctgacattatggtggtccttagaattgcaaatacaggagaaggaagacacaaacccaagactgtattaaaaaatgtttcagaaattctcctttgatataacattgttaaggttataacatgattttgcatgtgagtttgtatggaaatgagggaatggaaatgaagacctagcctttctcaattacccttgcaattgttcctttagggagaaacagcggagtattactaatttgtattggttttcaatagaaatttaggtaaataattatttggggtttcaggcttcctttctctaaaaataattctttttagaccaatgtggggccaatcagtacctggagcaacaatattaaagtacctccttacagtgaggtttatatggagtcctctaaaaaatgaaatgtttcaactctggttggaatacacagagcagctgaaatattttgaaatgacacacacataaaatacataatttatttaaggtaatttattgttatattttaaaaatacatctttttaataaaataaagataaaattaagaggattatattcctcctttttctttgttgatcagttactagactcccttactcctccaaaaaaaaaaaaaaatatatatatatatacaatgcccagaaagtatccacaaatccctgttaaattaatgcagtattgttgaaaaacaaagatggccagagaaactgaatgagaatggaatcctgaggagaaaacaccaatatttaagagacctggttctctcagtgttgtggaacaggatccactgatatggaacagaagggtaagcttctgttaagctaggtaaggaagcttagggttgtgaaagaaggtacaaagacactgcacactgacttytggggaattacctggatttggctttcaggtagctctgccaaggattaacaatagggttcagaaagaagagtaaaccatctaatatgtgccccagccagtttacgtggttataataacgatcaaattagatttttatggcaaaactctctttaacctctacgatatgatagtatttccagcctttttattctcaaggttcagtagctaacattggcttaagcccactcctaactatgaaatgactgagctggctcagcctggaatgagagtggggagcatgagagggacacagccataccacatgaggccatggctagggaaggcagaggctactgaacaagactgaaggaataagcaaagcaaaaaaccacaagcttgctgaagttggaggaccagaaggaataggtgagggtctcagtgctaatgtagggttaatccagggccargtagacaaaaataataataaaaccacaacaataataataataayaaatgatggctagcatttgttgcacatttattttatggagggtgttaatctaagaaatttcccatgtataaattcatatatactaatacttgtcgcattttacagttgagaaacaggtattacagagaggtcaaataactttcccagggttccacagctagtaatttttggagctgtgatttgaattcagtgtattctcagagcaccagaaaggtacaaagctaaaagtttccttctgtgtctggggtttcctggaaaatctgctctgccctataagctcaggagtcccccctcctagcagttcctgctgaagctctatgtgagattgcacagacctgagtttgagctgctgcttattttttattttggggttttagtattttcatgttttaggttaaaaaaattctttaccttttagctttgatgaattacttcatttttatatctaataggtttttttaaccttcactttaattgatttcttaamctctttatcttgctcattttttaatctttttaatgattttaaaatgctgattttaataattttatcttggcatatttatatttatcagtttttctgcttcaagctttattctggcaaatgatgtatatttatatttcttttgtgttgttttttaaatattttttatttttgtttctggaatttaatgtatgtcagttgtgcaatagacttgttagaattttgtttgctttaataatttttaaagtgactttttgcattacttttgatcattttactcttagcttattttgagcttttgatgtctaaatataactttgtttgtctagtgttttagtgtctttagtcattgcttctacatggcaataggaaatatgaccataaaaacctcagtgaaagtaacccacatttagagaaggcttgtattccttaatcccrcccctctacacaccccacccattcracccatctgtagcctccctttcagctgttcttaaaagaccttcccttttaagggaacttacattttcccttcaatactaaatcccaaaagctaatagcaatacagaagatccactgaccaacatttcttcccaagacaataatagtaacttatatgcataattgttaaagcaattttaagattttgttttgttttttgctatccaagttcctaagacatgttattcctctaaaagtttactatatgaaatgattgactaatggttgaacaaatactataaacacataaggaaggtgatatgggttttactcacagaagattcctcaaaacgcatacctgatttggttttaataaggatcacattacaggagatccaatagaagctacttaaaaagtgttttagaaaatgtttttaaatattaatttgcatccattataacattactatttgaatttaacttccttccaatatacctgtagaatgagctattgagtttaacttctttccaggcatggttatggagcctgctagtgtgtgggtgtcccggggccacaccgtattaaataggctagtgataaaatggataggacaagatttctcatcaggaacatttttaaacacagaatctgttgattctgtgttgggggcagaggctgggagaaatagggagatattagtcaatgcattacttttataagtgggcaacagaacccatgttgtgtggtcaaagtactgcagaacttctcaagcattgtacacgtttcagtttttgactacgactttaatggtccacaagaaaggcctctaagaatctttttcgtgtccatttctataagagagaacataatgctgtgttagacatagttgagatccattataataatgtcactacattttgaaataaaattctgaaatgccttaatacataaatccttttatgaagtctttaaaattggctgctaaaaccaataaaattatatttttggaacatagttaaccactttgtgcacataagtgaggctgtagaaactagggttttaaatgacttaaaagatatatatttctccaaactataggtaattatatcaatattactttgacagagatatagtaattctccatcttatagtaaaatttatgaaaacattaagtaaaccaacaggtaaatacatttttggtcaaacaaaactttaaaaattatgtttttcttttatttggctcaagctaattctttctgttatttttattattaattgactactcaggtaaaattctatctgaattgaattgacatcattgatcccattgtcagaaaagacagccctctatcccattcaatttattaaactgctaatcttctggacttttcttcaaagcttgtcagttttgatccaaaaaaacttcagatttcattgtgtggacctgttacttcttgtgtgaaaaacagtatggtttcatggaatccactcttggccattgttaatattgtacagataggcacacaagcatttaaatatgctagcaccttattgcaaaaaaaaaaaagttctacttatattcattgcaatttattatagaaaatgttttctgaactgaaaattataaactgttgtcaataattcaggtcccaattctgaagtgtattgagattaccaaactgtgaagcaggaacaatatttattctctacataaagaaagaaaagaactattaaatgaacttgatattataagaagcacttcaggttgtcaaaactcatattatgacatctataatctggcctaaaatcacaagcaaacattccatgatggaatggcagatcatgctagatttgctggttattatcagttttattttacgttacctaagtagartttaagcctttcagttaaaatatgactcccaagcaaaaggaagaggattaatggattaactrttgtttgtgttatcaataatattggcaataactatttgtctatggtgctgtgtcagttacaaggcactctgccatgcattcttccatctgatcctcaccaaagccttggagatgcttcaagccaaaattgttattattctcattttacagatggaggtgaaggaactgatttgaggtcacactgtggtaaatgttcaacactaatctctggtccaggtccagtccagatcttctgatggcaaaccttataatcattccacttcataaatggaacacttaggtccaatcagtcattttctaaatgtgtatttactgttggtcacaagagtttgtgtgacactgtgtggataattaaatgccatccaccatctctactcggaaaaacccaagggtgtgtcagttaatcagtcttaacaggaaagataatgtactattatcattatggcaaaagtacacttgaaaatacaacaaaggatattgaagctattaaaataagcttcttatccttagggaaactatttcaacactagagctatcatcaaaagtccttgagacaagtaacccaggagtggaatggttrtgattacactttataagcaaacttaaaaagatatcaggagctgctttactaggcccctgctatgaagtgaaaactggagaaaaatctacagcaaagcattctagcctgaggatgtgtactattttgcaacacagcagactgactacagccaaatattttcattggaaaaatgtaaatgaaaaatgttgctcaattctgctacctgggtagtacataagacatgtaatttaaattctaatcagggataacaaaaatcctatgatacttattttgcaaaggaaaatggcagtcctggcaaggttataagttagaaaattatattttctttgtgtaaatttgttctttagcttcattcagtaatcagaattatttatttccttattcaaattgtaagtgccttctaaacccgagcctactactattatgttgagccatgggaaattgccaatatttgactattttagtccattaaaatgcagtttcatatggtttaaactaatatgtgccaaagcatgaatagaaatacttgcaggaatactgtcctaagtataacctcagatgcacacagtattttagcaaaagtatcaatgggaaatcaggcaagtcctttcactgaaacaatttataagtataataatttattttgtgaaggccttttctttaccaaattagtaatatggtgaatattaaactaaacctgagtcatactacatttgtttttaaattttgtagggaagggggraatagcaaataatattttatgctagtaatcaggcattatatcagttgttgtaaggaactacatgaaagttggtggtatacaggttaccagtagtaagtttgggaactgtgttgttttggctcacagaatataaagcgtgtatgtatatacctgtgtttccacatagacacactctgttacccttatatgtattgtataatcacatgtgtagatgttcattgtatctggagtgacagttgacaccttttaggggcattttacatgttttaaaacctgacatccacttacagcacttatctactactctcttcaggataaactacctttattgcaagacttttgctaaaaattcttagattatgtcaagggaaaaaaatcctctattgctttttaaagaaaaaattatcagaatgatttaattttgtgttattttttatctccacattagtttgttatttcagtggttatttcagttaaagacatttttctcttccattatttcaatttgttacattgtatccatttatctcatagaaagataaacttttgtgttgaattagctgtggaagaccagctcacacattaatcactactaagcaaatgcgttacaaaaaagagaggacaacaaaaatgagctggaatacagtttcagttcaaccaccaaacgatttgatatcatgaataaatttcttgggtatatgtagccagtaagtagacctcaacatttagctatttttttcaataaataaatattgagcactgtctttatggcaaacactgtcttaggtgcaggggataatggacattatgcttttgggggattagataagagaggaaataagtcagagaaaagatctctagcacagaaaagtctggttacaagattacagagagagagagaaaaaaaaaactgtagtgacttgtctagggaactgtgtggttgccacataraaaatgtggaagggagtgatgggagacaggctatgttcctagcaattgccttgactcaccataattatttcacctactgaataactgaataaattgagtagagaggctgcttgtaccaaactgtaaaacagtttcaggatgagaaaattacattttaaacatacacttagggaaaacaaaaacaaaaacaaaacacctgccttgcagaaacatgtcatagaaacagattttaggcagaattatttccctgtacaacaattgtgattaagtaaatgttaaaataaaaagaaggatgtttagcagcataaggaatagaaacatttggagttttagctttagcttatacaatgcatcctgttttataattgttttccaacaatgtttacataatgkgagggtcactctttaacatgaggggctctgtcactagaattgcagtgtgttagcccctcattttctccagtgtttttgtaaatctttccattgacaatcttttaataatttccaaaacaatcgggggtaatgttcgaattctaagttcttgtcataaatgaatcaatccagttggcaggagatggatgtagtctttttgctggtgttccgtgctaagaaaagcacacacatttttcttgagagtatggctagccgaaaagcatctgagaattgatggaatcctaaggcagacagaaacgccaaaagtcaagtaactggttttgtctccagcacttacagtttgttgtctgggtgccatgacataccctctactagttaattccattaagcaacatgggccatttaaatataggcaaaacaacaacaaaacaaagcaaacaagtaaaaactctgtgaccacagaaagagcctgtaacatagacagaagactacaaatagtgttcttagaagataaatcattaagacagtagcaaaatgagaaggaatagtgtcctgggcaacataaagtgtgtgtacccttctacctgcacaaacactcaactgaaatttgccaaggctcactagtgtctttgaggcaccctagagaggggaggctagaaataaccatcatcctcagctgttccatggtaaggccctacactaggactcagaggagagatagtttggaacattttatccctatcagtggaaaatagcacagttggtgcctaacttcctttcgttgaaaataacacaggtaattttttagccaaatgagatttttatcaaaaaagcaagcaaaggcagaatgtgaaaaggagctgatatcagtaattccaaggatactaaaatttgttttaaataataaagaaatagcatcttcaggccctttagactttggactccaaaattggatgcagatcaaataggatatttatatattaaaaaatcccaagagaacttgtacagcataaggtaaatacaaatcaaggttgaacaggtataaaataattaggtcaagagcaatcagcaaaatatatgcagaaccaaacaatactttgatattctggtctggaaagagaatttggggttattctgaaaaatactgtcactacaactctgtccagaacccacagctgcagaaatgagtaaacaagtcatcttattagaagactgcaaggttaaagaacagctaaagattcaaaactaaatgacattcttgttagttcccattgatacgattataactcacacaattccctaaaggaaaactacaaaaaggatgtttcttgagataggaatacaaataaacttttgcttgtttgtttgttttgttttaaatccagtrataagaatgaatgttttctgtatttgctttttttaaaaaaactctatattttatgtgcagacatttaacataaaatcttttcccaatgtctttcttagatgattaggtagttgaaagacgctactgtttacgaggcattgctaaaagcttttgggttccatgagggagagggccatgacmtactcctttgtacatttccccactcctccgtttacatcacataaacatatatgtatggtcttccatgcagtcagccaaatcagacaaatcatgcctaggagttgaaagtgggaactgatttgtctagtttgaatattctgattagtgaactagctagcttagaattttgtggtatttgcatatgtcattcatttatgtactacagctacacctaaatcccagaaaaatcggtaacaaaataacctattattctagatttaaattttaaaatccacataagaatattaataacacaaattatttgtatgacaatgacttctatttttttcatttcaccctcagagatctatatacttcctctatccaaaaacaacacagaagcaaaatgttacagagacaccagaatgttgcccagaaaaccatgcattaattactcaagccaggaaattcccaattttgcaactctattttatcatttaagagagatctttccacatgtgtgttctaaaaaagaacagagaaataaccagtcctctgtaacttagcaaaaatacaaattggtgtttccactttgatttctctttttgaaataaattttcagcttgactttcttttgcctcgggtattctggatkatcattttgtagcatctggataattttacattaacatctggagttgagggtctttttatttgtcggatgcatatagaatacttctgtaagaaatgtattttcccagctgctgtttattcattttaaagagacatggttaagtaagtctaacagcctccttaggaaattcaattcctaaattccttaggaaacacaaaccatgtttaatctgaagtcctgccagtctgttttctctcctaccagcttttcccatggcagaaatggttgagatctgtacagaaggaggactttagtctggtaacaggtggtgttgctgagtgcaagggcctttgaaatcaggcctggtttggaatcttggtccagcaatcaatagctgtgtaatcttaggtaactctttgaagtttagtttccgcatcyaagaatgaggaagtataaatacatatctgcccacgttggttgtattaaatgagatamtttacataacacatccgactaaggtgcagatgtaataaatgacagctgttattatcatttatttcagcacgttgcagaaagcaacttacaatttcttcttttcctgacctcctagggcttttatgcatgcaattagcaatttgggatttgcacaaggtttttccagagtacaagatttttgagagctgtgactgaatcttattctttagaaacttgctctttgagtggaggaaaaggaagaaactaagttgactaatgacattataaaagcaggtagagaatcatttctttctgagcttctgtagcacaggctatgaagtgtgctagtaaagtaaatacaattttaagcaaagtttcagaaatcaccataataaaataaagtctgtaagtcccagctattaaactggcagggacctacattcattaaattaaatgcaatgtgcaatgttgttcgaaagttgttcaaaatgtttttagaatttttcttggagttgattgcttttataatgatgacttcacgtcttgactctcagtgattttgtttgtctccttagccccaaaattattcaccttaaaagatgaaatttggtaatattaagacagtcaaaggaatgtcctgaagttctgatcacagctatgaatagttctaaaatcttctaaatatttttgggatatgtatagaaccaagatgatttgtgtgaagggtttttccattcacttagttgtattatattttaatataattgtttaaaaaagattcatgttatagtcacagattaaaaggcagtttttaaaggagatgaattaacagtttcagagaaacaattttaataacatgcattttatacatttatttattctgaaaacagtaattttcaatatactattttcttataaccactttaaagaaattaaggacttgcaggttgtctggttttttactatttttcttatscatagcaaggttggtgctcaataatactagatgagcaactgaatgaagagatgayaaaaataaatgaatttattaccactgcatgttaaagaagtgtacttttttatgcttgtctttgagaaaagtgtcaaggtggcatacatgacaaaacacaactttaaaatgacaacaaaaaattaaaatttcactgaacaaaataaaataaaagaaaaatgcatactagctgctcatctgggatgagttagttattgcaattcaacttgtaatttaatgcagaattttcagacaattagggccaaaaaagaaaatgttaaattagctagtgtctgacaaagaagaaagctttcaaactttcaagacgaacattttattagcaatgaattctcagagcaaatttaatgcagtccttatgtaaggatgtcagatagaaaaaagtaaaaggatttcaagcatcactagtgcaaaggacaatattacttgcttatttctgcagtgtaacaaagatgaagatattctcttaaattttttactcaatgatgattcatgtgtctctgagaaactaagataatatgatttaattctgtgcttttgggatagtctaacttaattcatgaaggagtacaggggatgggcgctttgtgtgtccactttgtttgtcactctcaaatgtcagatgtgcaggcaaattctcagagttaaattacttgacaggaacttaagcatccgtatttgttgccaggtagtcttctgtgtggttaaagtacagaatgtactcctacaaaagcagagaggcggcccgttgccacacaaaagtgttttttcagatggcttatggttagaaccaatatatttttctagcatacagtttgagtgataatagctcacattccccgatcacatgccttgtgccaagtaccattctaaatgccttgcatcttgtaactcattaaacctttacagtaacctcatgcaatgtacactcttgttgttcccattttgcaaataagaaaactgatgggcaatattaccttgcccaagtttatacagctggtaagtggcagagtcaggatttgaacccaggctgatggtatagtctgcgtgctcagccacaatcatgaacttaccctcaaactgcctgtgtttgcataatcatgtggatactacaggatagattctttagactcatcttatgtaggaggaatagtgacatgaaccatcawaagaggagcattaactaaactttgcttgtcttacccatgaaagaacatcagtgtgactccctgccaaatatctgataatgaaaagaaatgcattgtgatcagcaagataaaatgaagaaaataaaaatgtacactgaaatagctgaacgaatgaattaacaacctattttatagcattgtgctggagaagaatgctcatcttacagaggtgattgtgtctaataaaaactgcactggatttgaagtaaaaaataaaaaacaaaaactggatctaatttccaattctatcactcgtagtctctgtaacctcctagtctctttcactgggatcttagatgtgccttcttagaagctaaattttcttatctgtgagttggtttacgattccttcttcctctatccactcactttattgtgatatcaaaataagatagcatatgtgcatatccttggagattttaaagctatctgaaaatgtgccatatttaaacatactgwacatagttaaaagacatgcatctgattaatgtaaaaactataccaatttattgtagtccacttggaaagacaagtagcttacttaaagatctattttgttgcatttaaagttggaaatgaacctgatataaatctcttcccaactactgtgatcctgtctttaatacaactttaatagactggaacatatgccaagagtatacagtcagaatctctctaagaatcaaagactgatgagaaacctctgaaagctgtgaaaagtgtgttattgtttttaattgcttccctaaagaatgagagaaggcraagctgggaccctagtggtattgatgggctgttgctccttatccatgatgygtaagagtgaggaactaagtctgaaaactttttaaggggaaaatagcagtatagcatactgaaagttttgttgtaatatttaaaaatgccaattaaaaaatagtgcaaaattgtataacgcaattatatgagaattgttttgggatcagcggtccaaagacaaagaaagtcccctcttctctccatgttcttttcactgctagcagcaattaacatttggcatatatcctcctagatttcattttttatgcataagtgaagacatatcaataaaatgtgttcttgttatattacatagttcttgttttaacacaagtggaattatcctctacatggtgtttatgatttgtttttgcacttatgaggttgtgtttaaaatgttgtacatttttttaattttagcattggtaaatttactttgtttttattttaacatagtattccactgaaatgtaattatactgcaaattatttatcatatctccactgacggtccttcaggttatttctaacttttcttgattataagcaatgttgtaatgactatcttgtacaagtatgtttatactcttccattaatacttatgtaaataaatctgataagggaaattgtaggctaaagcatatattatacattttattttattttttattaattaattaattaattatttatttatttttgagacggagtctcgatctgtcgcccaggctggactgcagtggctcgatcttggctcactgcaagctccgcctcccgggttcacgccattctcctgcctcagcctcctgagtagctggaactacaggcgcccgccaccacgcctggctaatttttttgtatttttagtacagacggggtttcaccgtgttagccaggatggtctcgatcttctgacctcgtgatctgcccacctcggcctcttaaagtgctgagattacaggcgtgagccactgctcccggcccacattttatttttgatatgcactggcacaaaattgtgtgaagaaccaattaataaatatgtctaaggaatatagtttccattgttttaattatcaaaaaattatcacttacatgggctctagttatacccatgatatgaccaatttaagaaacttgaaaatataatttctagcacgtgtatactaatgcgagatagagaagttttatttacaaccagaaattgttgggtccataaaagaaacaaatatgtctagaacattttaaagttgccagagcagatttcaagatattccagcctgagtccctcagatatgtattttggtgattgtaaaaatatcaaaagaaattatttgtgtccgaaagtcacaatatgcgtgagtcatcaacacaataagataaggctaaaattgagtttcagatattttgggatttctgaaaaaaatttataaaaatccataatgtaatcatttgtaaaattttaaagtttatcattacgaaaaggaaagtcaaaatcaaatgaaataaaacaagctttgttccatgggatagtgtcagtcataaagacttactagttaggtgctaattcattttgagcttacagggttttatcaggatcagactaagtaaaaatgtataattattttataaataaaaatgttttggggtttcagatttaaaaatcaagagtaasaagttttacaatatttactaaagattacgattagtataccacaaaacatctgaactttagatattatttatrtgaccttaaaagtcagacctttccctgccaatgacttaacttctgtctttagtgctattttgtttgaaggcttatttatctgctatgaagtgatttttctacgactttctacatgtctcttcacattgggttaggaaatcttcaaggaaattaatatcctcgggtatacacaaccttttgctgtggtatttgctctgacatggaacaaaggcaaaagatacgggaaaatgtagaagtgggcattatagaagaatccaaatgtgtctaatgtcttcttcatactaattccttctagcctttatttaaaaaatagcttctgaattgcaaggatatttttaagccacatgaatcagtatgccccttcagctggacttttcaaggagcctgtgaatgctgaaatgattaacattatgtgaagctaaattgcactgaaccgtggaaccatgtggtgtggcaatagtgggtggggagacatattagtctagaggtccctgctgagcaaaagacaaagacctccttctccattgtcccgcactgatggtgggcttgggatgtattttcagaaataattatttgcagggaacttayaaaaacaaatgaatcaccctcatcactgtgcttgttccgttttgggatgtttgtctactagactttctaaattgggagatttagaaattcagtaagaaagatatttaaaaaaattttttgaggtcctcagtgtcttctgcaagtacactttcaatttttattacagacagactctcttgatgctgttgtttaccattgcatttttatttaacttgaatattttaatttagcatgagtcattcccatggattagcaactttgtatgctagcatatctagttgtatcttctgtgtgttttcaatggtgtgtctgctactccaaagatcttcctgaattttacatattagaagtggcatagcctcatgacactttatatcaagcaggaagttctggaagatgatgctaacaaatacctcaaatctggaaattgtaggctttagaaaaataaagtcatcttgttagtgaatctctatattagactttctaataccttataaacaggttttcagaaattaattatatttatagcctcgagaaactagggaaaaagctggatctcaaagacattattacaaagcagtagtaaattataaacaatatattttgaattcataattaaaattaacgagtcaattttctgaggcattgacctattaaagatttatgagttacctaaaaycccaaatcttccctgaggtaatagcttcagttgagataaagggaaggtatcttatttgtcgcttcactgcaggaaaaaataaaatttgtgattatgactcattatcatgatgcctattgcaaaattacagctcactcttaaaattatgtgaaaaaagatcattaaatgttttagacatttcttaaaacttataagcaaaactttcaagttttttaaactgatttactggttgtatatgtagctaattgactatgaaaacttgaagcttaactctttgtagaccttccatcataccattgctttataaattattaccagaatattgaaggaaataaacttttttctaaccatatttatgcaatcaatatttattaggtagtttttgagaaaatcttatatgagaacttattccttgtatacmaaatgtttcatggaacaccaccagcatagacatttttgtttactctgtgcaactggatttcgttctggggagcttcaatttgtacatgagctcattttcacaaaccatcttaccgatacttagagtccaaagtgaaattcaggaactatggcccagcaagctttcatgtgctattctttgcttcatgactttggaaatctatgggagaccctgtatcactagacagaatactgaaaagcaggattacatatgaagtttaccatctgatttttttcctaagggtttttacatgaacgtttattccttgtctttttgtgtggattcagcaatctccaggtttactgaacaggggttgtgaagggcagttgttcacaactgagctcattcccactgtgttgatatactccggttcccccacatagctccaccccgctaactcccaacctcatgcatagctccaccacactattgggcttgaatctaggctctgccactttctagctggttcctgagcaagttctttaacctctctgagcctgtttcctcatccacaaaaaggatgaagaacaaaaaggacgaggcaataccttcttaacactgataattaaataagataagcttaaattataaaatcagcacagagggaatgtaaattggttcaaccrttatggaaggaaaaaagtaggaaggttcctcaaaaaattcaaaatgggactgcgaggccgggtgtggtggctcaagcctgtaatctcagcactttgggaggctgaggcaggcagagcattttgaggtcaggagttcgagagcagcctggccaacatggtgaaaccctgtctctactaaaaaacatccaaaaattagccaggcatagtggtgcacgtctgtaatcccagctacttgggaggctgaggcagaagaattgtgtgaaccgggcaggcagaggttgcagtgaactgagatggtgccactgcacttcagcctgagcgatagagtaagactctgtctcaaaaaaaaaaaaaaaggaactaccatatgatccagccttctcacacatatatatatgtgtgtgagatatatatatatatatattcaaagcaattgaaatcaggatctcaaagagatatctgcatttccgtattcattttagcattattcacaatagtcaagatatggaagcaacctaaatatctgttgacagatgaataaataaggaaaatgtggtatatacatacaataggatattacttagccttagaaaaagaaggaaatcctgccatttcaggcaatgtggacaacatgaaggacattatgttaagtgaagtaagccaggagtggaaggacaaatattacatgatatcatttatataaggaaactaaaatagtcaaaactcagaaacatgagagtagaatggtagttaccagggtctgggttggagggggaaacaggaaagtattagtgaaaggataaaaagttttatttatacaagatgaattaagtcctcgagatctactgtaccgcatagtgcctagacttaacattactgtatcgtatgcttgaaattttcctaacaaagtcaatcttacaaatgttcttatcacaaaataataataataaagagagtgagagaaaacttttggaggttattgatatatatgtggcagagacggtggtgatggtttcgctggtgcatacttatctccaaactcattaggttgtatacatcaaatacgtaaggctttttgtatgtcaatcaacctcaacatgttttttttaaagcagtatagaaatacctattttttaaaattattacaactgaaagccttctaacttgtggtgttttcttgaaataataatcgtatcttggttaatagttgagatctaaaagcttaggcctaaattcagatagaaagcttggcacatctgttgtaagttttgaaaccaggtgcacagaccatctttgttccagacgatcttctcagggatgtttgtaaagtgaacagccttggaaggtagagatgatgtccccctgggaagcaaagggtaggtttactcatagcttgggaagagagagatggtgtctccctccagatgaggggaatatatttaccacccataagaaaagatttgaacccattaagctgagggttcctcttctgtaacaccacccactgtgagtggaggcatcagctggcctgctttctatctctctgcaggaagtagagcccaggcaactggcaccaaatatgccaaagcttatgctgcttcctgggctgtgagtaataaagtcccttttccctcttttagaagtctcatatgttctgtcagcagccaccaagctgtgtcaggctaaattgctgtcttgcaagtagaataaaatcccagaccctttgcaatctttttcataaaaaaaattttaaataccatatatttaccgcatacagttcagaattatttattaatagtatattcacagagttgtgcaaccaccaccacaatccaattttagatcatttcaacaactcaaaaagaaaccttgtacacgttaagtgtcattcctgtacccactccctgaaaatctgcttgctctagctgtgttggattgatgtcagaacacaggagggaagggcaaatgcaagggagcaggtaagaggctttcacagcaactcgggacaaatgatagtggcttggagcagggtagcagcatgaaagtagtgagaagtggcggaatagaagatacattttcaaagtggaaccaatagtatttcctgaccaattggctctgccaagaggatgtgctgatcaattttccgtgaggtgtgagaatgagatggctgagggatgagtccatggttttggcatgagcaaagggaaggattgagttgctttgaaatgagttggggaagactgtgggcatagcaggttttgacagagaagaataggagttcagcattgcatatgttaactgaaaatgtctattagacattttggtgaagctgaatagatagtgtatagtattctggaattcagatgagaaatgctgcttaaagatacgaattagagaatttaaaatcatgagactgcataatatcacccaggaagtacaagaagacctagaaaagtaacagtctgagaactgagctctaaggaacatctacctttagaggtcagagagatgaagtagagcttgtaaaaccaaggagcaagcacacacagttttggacacagagatttcccataagagcattgcaaacgttacatattctctttgttggatgtgaaaataatcttttgggaaatgtgtgcttagaccttgatgtgatgcatagggacaaatttctaattctatttgcttcctaagaaaatgaaatgttactaaataaacagcgtcagggcaaggagtccaggtccataaagaaaaacttgcacagcatggtgaataaaattaataatggtgtattgcagattttaaaattgctaaaagagtaaatttcaaatgctctcatcataaaaaatattagtatttgagggaatgggtatgttactagcttaattgaattattccacattgcattcatatattataacatcactttgtaccccataaatttacataattagaaattgtcaatttacaataaaaaataaaaagccatcaaaaaacgccaggcaaaaatatgtgatatacttatacccatatttaaacctacaccataaattatatttaaatttataattctgcctgctgctgttttcagtaattaatatcattaagaaagcacaggttaaatcaaatttcaacacagtatcatttcagtataaaatctcatattttgaataaaacaaacatatctttacacattattaaatgaactacgctgacaaattttgtttcttyttttgagaaccagaaaaacaattatacttagatgggccatctaaaatgtccttccagcttgtggagtaggttgtgtttgtttttcaatgaacatctgtttgacaaattgaaatgctarttatgatttatcatttccatgacatcaaatatccagatagtaataaacgttgatgactaactatatttttcagtttcasccagatgtttggcatcacgtaagataccaccttagttttacataaaaataaaatgtttcttgagtctggcttatcataatggggaggaaactaatatgaatgaagcagaatggttcattttttttctcaatgtgtacaattctactggtaagacttttacaatatcataaataaaattgtactttaaaataagtgtctttcaaacttttacaaatacaaagaaagccagaatcaaaacccaattttgaatatcaagtgttaaatatgaatatcagaaactgaatatatcatcaatacaaattttaaaaaaaataagtttgtaaattcagagtttatccctcagatgttatttcaagcatatatcatagtgacatatccttgaatatatatttaagatccgatagggactgggcacagttgctcacaccagcattttgggaggctgaggcagatggattgcttgagctcaggagtttgagaccagaatgggcaacatggtgaaacgccaccagaaaaaatgcaaaattagcaaagtgcggtggtgtgcacctgtagtcccagcgacttcggaggttgagctgggaggattgcttgagcctggtaggcagaggttgcagtaagctgagactgtgctactgcacttcagcctggatgacacaggcagaccctgtctcaaaagaaaaaaagaaaaatctgatatgataatttagaatatgggtcctcagggccataaaacagcatatgctagtttgttggcttttactcaccatgctgtgcactaaaagtaaaaaaatataaagtaaagcccattcttttaactgagattttgtgccctttgacataatctctccattcccacagccctcagcctctgtaacttctatttcactcactccttctaagaatttgattgttttacatttcacatgcaagggagaacatgtaatctttccaaatgacagaattttcttttttaaagctaaatagtatttcatcgtgtatgtgtacgacgttttctttatccattcatctgttgatggacaggttgatttcaaaatgtggctaatgtgaagtgctgcagtgaacatgggagtgcagatatcttttcggcaaaactgatttcacatcttttgggtaaatacctggaagtgagattgctagatcgcatcgtgattctacttttagttgttttggaaaactccatgtagttttccataatggctgtactaatttacattcccaccaacagtgtacaaggattctgttttttccatattctcgccaacatttgttatcttctttttgatattacctattctgacaggtgtgagatgatatctcattgtaattttaatttgcatttccctaatgattagtgattttttcatttatctcttggccatttgttagtcttcttttgagcaatgtctattcagcttccttgctcatttttaatttttttttcttcctcttaagttgatggaactctttatatatttgtggatattaactttttattgaatatatggcttacaaatattttctccacattcatagtttgtctcttcacattgttgcttcctttgttgtgcagaagctttttagtttgatatgacccaatttgtttgtttttacttttgtggcctatactttgggggtcaaattcaaaacattattacccagatcaatgtcatatactttctcccctgtgttttcttctagcaatttggagttgctggccttatacttaaggctttaattcatttcgaattgagttttgtatatgatgtgaaataaggggccaattttattcttctgcatgtggatacctagtttccccaacaccattcattgaacagactatccttttctcattgtgtattcttagcatctttgtcaaaaataaattggttgtacatgcataagttgatttctgggctattatgctgcattgacctatatttcttttttgccagtaccatgctattttaattaatactacaatagctttgtagtattgtttgaagtcaagtagtgtgatatctttatttttgttttgtttgctcatgatgattttgactgttcttggtttgttgtggttccgtgcgattttaaaattgttttttctatatctgaaaaatgacatcaaaatcttgatagtggttgcactgaaatctgtagattgctttgggtattatgaacattttaacaatattaaattcttccaatccatgaacacaggatatctttccatttattcatgccttcttcaatttctttcatcaacattttacagtttgcagtgtatgcagatcttttcaactccttggttaaatttattcctaagcatttaatcttttttatagctattgtaaatgggattttttaactccaagtatatttcatagatggcattgatacagtaaaatcctttattctgtaaatggcatttatatagtaaaatcttttccatggtgaatgattattagtcttaagtgaaatacaaagatttgattttataagtgaaatatttcttaagtaaactatccttggctgccagtttctttcttaaaagtttaatatttcccagcaacttcctgtggttgactcttaaggatactgaagctgaaaggagcccagcaattctgggtgatggaggaaatacgtggccaggctctgctgtccgtatcttcctcaattttcaacttgaattttatacttctactctgacctttaatttttgtgatctaatttccttttccccaataatatttgtttttgaactagtcttcctcatgccatttaaagaaaaatttcaggaataaggaaaaacacaggagtattaaaatggagaaacatcaatattgttataaacagagcaccccaaaataattattttgaaagagatgcactcatttgaatttataaactctggaatgcttattttaaaattaactaatgtgttaacctacatacaaatttgtatttttacttgaaggaaaagcagcattgctggtagtgcacatgtgcttctgtacatacagattgtacacattgaggatgatgtttatgccataagagaatcatttcctctctttttatcagggccattacatcatttctcaaatagaccactgttaggaagtagggatatataagtataagggaggagactcaagtaaaaccagagtggtgcatatcctacaaattgagaataaggcatattttatcttttaaaataacatattttggccgggcgcggtggctcacgcctgtaatcccagcactttgggaggccgaggcgggcggatcacgaggtcaggagatcgagaccatcccggctaaaacggtgaaaccccgtctctactaaaaatacaaaaaattagccaggcgtagtggcgggcrcctgtagtcccagctacttgggaggctgaggcaggagaatggcgtgaacccgggaggcggagcttgcagtgagccgagatcccgccactgcactccagcctgggcgacagagcgagattccgtctcaaaaaaaaaaaaaaaaaaaataacatattttagagactcagtaaaataattttaaaggggcagaagtacagatgtagctgttaggaggaagcattatttcagctacagcacattattggaggataggaagagcatatggtattccagtgaaagagcttaattataatagagcagaaaggattagaaacagaaaagaaggtggattatcaggaataaagtcaaagaagggactgaatattgatcagattttcagaaaaacctgcaaacaaaccccaccacatactagcactagtcataggactgagatttgtcaaagctagctctcttctggtgcactctggttcactgtgaatataagtgggccatagagtgtgaccattgtggtctctggccctaggccatggagtgagataattgagacaagagaagtctgtatatcatctctccacataagcaatagagctgattgggctgcctgtaaacaagattttagagactcacttttctttttcttaaaagactgccacacttagccatctgatatggaatggcatctcctcttaatgagcctgtgtctttatttgcaccttatcaaactgggagatactgaagatggcagtgatgctgatagtggtgagacatggaagatgtagaggaaacctacaaagaagcctgagataggagagaaagggtaatttttagaagtagattgggagaactgcattctgggcaataaatattcactggacttacagcgtattcctttttttaaggaaccaagttcacagttgttagaactacaagagcacaacattacataatcatgacatcaaataagcataaaaataatgcttatttttaatttttacaggtgccattttataaactatctctataaagagattaatgttagcttcttgttttggaaataagataatgggagggaaggataaatgaaacagttttgttgccatctctcattgtgagccagtttagaaatgaaaacaaacaaacaaaacaactcttaagcccaacagcaacattcattataattttcctaattacactcccttttctttttgctaagaaagaacggttgtatttttgtccttaatagaaaagggaacagtgcctaaacaacctattataaattcttctgggaaagcatattacaaataattgaaaacaaccctgattctgtgaacttggcagcaaatgtataaaagaaagcaattcagccctggcccctggatgattgattaaatgttttattctttttacctttcattcatgctgtgtttgtcaagaggaaagagaaaaggaatgttgtgaaatgaagtccactttagacaaataacttacaataatgatcagtgacttctcatcagctgtttattcatttttcttgagttgtaatatttcttaatattagctatcctgcatggacccgacagaaaataaggtcctgagttttagcttgtccccaactccctgccagctaaccatcaacacaagctgtatctgagcttctttgagggcatggccctgcagctccctgtggtcagttattagtctgagtccagcaaaggaacaagaacactgtgtgcttgctaaatctacagaaaacttcatcttctggttgtgtgggaggagaggtccctttgtgtactctgtttctttgaaggaactagggatctgttggtgctgtacagatgtcgaggtgcacagagccaacatcctacaaaactagtaaatagatgattaggatccaactctgtacagaataatggtaggaacctaaaccttggggtactgtttacttgtatcaaaattgttgttgtcctataagccatgtaaaattaactacaaatctcctcaatgaaacactttcttagaactttgatatttttaaatgatatctcaccatctgtgtacatcacaatgttgagctacaaatgtggtggctctaacaaaattttaagtatgaagtcagatgtatagwggatcccttctccatcacgttcttctgtttttcatttcccgcttctcacaaactactccccagatgtcaataattctacaatctcctcttcctacaaccttcgtgttggtccttagtcgtctactctgatctcaaccgcaaaagtcaggggatgagactataggccatccccagagcaacagcctcagcacctcagcacagatctggaggggatttgagctagaaagaactctgaccttactcttttttttttttttttgagacagagtctcgctctgtcacccaggctggagtgcagtggcacaatctcggctcactgcaagctccacctcccgggttcatgccattctcccacctcagcctcctgagtagctaggactacaggcgcccgccaccacgcctggctaattttttgtatttttagtaragacggggtttcactgtgttagccaggatggtctcgatctcctgacctcgtgatcggcccgcctcggcctcccaaagtgctgggattacaggcgtgagccaccgcaccagcctctgaccttactcttaattgcttgcatgaaaattggatatggataagaatgcaaacccaagaacatgtcctgctttccttgatgcacattctcctattgatgttcagtgaccttagcatttccagaagcacctctttattgtggatggaaacttacttattcatgttgtctcaggctgtccaggttggtaacaggtaactgctataaagggtggagcacatcctgctaaatggagagatccagtgtcatttacattttttttaactctttcaagggtaatggcaactaacaatagtttctcctgtgtgctagatattgttctaatcattttacataaattatttcttttaatccaccaaacagcactataagatagatattatttttatttacctttgttagagaaaactgaggtatagagagattaagtaaattgtctaaattcacacagatagtaagtggaggagccagaatttgaacacaagcaatttgtctccaacaaatttgatcttaaactatggttaactctctgaacacacacacaaacacacatacgtacatgcaatcacacaaagtatcaggcacatggggatagacaatattagaaaagcatatacatacaaacatccttacagttgtacacatagactcaggtttataaacccactgaagtgaagactcatcatttatgaaaatatacaattttgttctgcaaaataatttaattttttaaaattccttgtgcaatgagaaaagatcagagaggcctacagtttscttttacagagctaggccaggggctgtatttagagtaattgaacacatgattttacttgaatgcggagaaacttgaccaactgtgaatatgcaatttcactctacagatgaaataaaattaaayggggcaaaagtaaagaagaatggagactaggtaaagtgatggaaagagacaccaaaaaattagtcatgtgaaagcaaaactaagaggagagggaaaggtggcaaaagaagggaacattcagagaatgttgatatattgagaggtgagaatagggagttggtaggcaagtgtcagagtgtgggaggatggtgacagtcactaggaactccagtttgcatacacacaatgttaagaacattagaaattagctagccaatggaatgctcagtcttgaagagcttgtgtctctgcttaaactcctgtatgcattagtatgattccataaatttaaagtctctgacatcttgagttttaagctttctgaacattaaatcagtggaggctgctagtagctatcctgaaatgctgcttctatacatatgagtaaaaatccaaattaatgtatttatacagcttttcatttgtgtactcgtaaaatacacacacacacagagacaattcaacacacacacacacacgcgcacacacaattcaacttttctctgaagaacctttgagtcagagaatgagaatgaaggagactgaatttctcttttaagttcctgtctaggttttgttccaatctaatgacacaggatctggcactgtatttagacctcctgctccaagattttatttttattttaaacaagtgttcccacacggggactgaaaacaaaacaggaaaatgttgcttaagttttcctttgagctgctgttatctgactttcaagtgtactgattgttccgtctcaccaatgtaggtcattgtactctcagttactttgttttctatcggaactttctctagcagctctccacattaagggagatcatgttatttcacatatttatttttgttattaacatattttcttcatctccctataatttgaggttttagcactttcttctttgtagaatttaccataaagcatacgtatttttgaaaactagggaatagcttttacttactaaagtacttaagtactaaacctatcataaccaatttcatttattaagatgttagtaagactttaggagttgttggttcttttccggagaataatgctttagcccagcagtccccaacctttttggtaccagggattggttttgtggaagacagtttttccatggaattgacaggggggatggggagtggggatgggtttccagatgaaactgttttacctcatatcatcaagcattagttagagtctcataaggagcctgcaagctaggtccctcacatgcacagtttacaatagggcttgtgctcctttgagaacctaatgccacagctgctgatctgacaggaggtggagctcagacacctccttctgtgcagcctggttcctaacaggccacagatagtactggtccatggcccagcagttggggacccctgctttagccctcaactcttaggcatgtttcagttctgattttggtcagcatagagctttccttctatttaccaggagggtctctactgatatggatcaatggcaggaggtgatattgggtctggaactatcctttggcttagtgacatttgtactctaatctgcctcactcctgccccttctcaggggacctgggcaccgtcggatcccatgacaggtcctacatggtgacctagggcacggtaaaaagtctaccccaggaagcctagaatggatagaatacaaattcatccaacacaaattcatgaagaaaagccaagatctgcagaaaatcaaacagtaaagactattccagaagagcaacaggaggacgataaagaggagatggagttaaaatactgggtctgtcatagacaggattggaatggaatcccaaatcagatgatagaatgaagggaaggtacatggaatagactctcactagtggtgagctttcggtcactacaagtcttcaaaaggggcctagatgaccagttctttttcatccaacaaatgcttattgaacccttcctctgtgggtagtgatgggcacattcagtgaattcagactggaatcgaacacattgtaaccattaaatgagttaatcttatatgagttcatacatacagatcacatgcaagagtgtctcatatccagtaagtttgcaagaataactactattgtttttgtgtacaagatcttgtgtattgtaatttctgaaatagcaatgaggttggaatacatgactaatgattttatcctcttatgatatctctggttggggcacacccaaaacaaaatttggagcaatgcaaatgttcgaggagagtgagagaacttccttctggtgtttttctctaatgacttgctctgaagctactcctcttagattctttcctagctgtgtattcctatatagtcttagcttaacagcacaaagatttaacagtggtgtctgcatttgataaaatgtaaatgagaagctcccaaaagagattgagaagctctattttgacaactcttcttttatctgtgtwattattatatactttaactgaagaaagaaaaacacaaagataaatacaatatttcaacttcgagtactttttaaaaattatttgaaagcatttaaaaatagatgtaaaatgaactcctgtatgtcaaattcctttcagagaaaaaaaaaagtgagagggaagggggaaatttgcatttagtaattttttttgtttttttgaaaatttcaggcacttagtaatcactgttccttttgtacgtcatgcccaatgggaacgataccaggatctttcactcaattctgtggattacaggtcacccacctgggcatgtttcagatgaaactaacctaagctcatcttgagtaaggggcttagaagtaaatgctttgttggttgctttgagttgtacaaagcaggacgaccaccagaggctttctaagaaaaagaatcatagagactttgataaaattggaactcctaaagcagctaaggctttgcttctatttttgatcatttttaaaaagttagttcttctggtgtttggtagttccatagtagttagaaagcactgccacatgaaatctgctattggtagaaaaagaaaatgttacagccaactctgatacaacatgagagagagacagagagagagagagaagggagagaagagacatgttcttctttgaccagcaggaaaaaaaaaaaagctgcacaaaccttttaactagtttcactagcagaaaagaaaaataaaaatataaaatagcaaataatctttaaagaaaactgattttcttattatgctgaaatttattaaagactrttgtgttgactgaagaatatgtttaaatattttgtggaaggcaaagctttcattcaggaatgacaagtgcaaggactgtaattctaaagaaattaaagaaaagaagaatggcaatttaagttcagggacaattggaatcaagcagtaatgatttacagctttttaaaattttcaggcacttagtggtcagtgttccttttatgcgttatgaccagtgggaaggataccaggatcttccattcagttattatgggttacaggtcacccatccgtgacctgtggtcacagtgttaggtatcgaaagcataataccttcttatctaagaaggaaagacctgttaagtctaagcttaggggtagagttgtcaacgatacagtcatatttgttgaacagttcaagttgccatttcttgtattcttggaagaggtaagttaaagaaggttgtgcacagttcttgacattttattattacagcactacctttcaagccactcagtagtcatcggacatgtaagagtggttgttctatttggtcgtgtaaatttctagtgacagtaggaaaaaaaaaaaagacctttattaaagaccttccaaactaattcagtgccctacatgctgcatgaaaatgaggactttccagttctgagtagaaggaatattaaggcacctgaagggacaaatccatttataaaattatttttctttttgtgataaaaatataaatggctctgctagtatactaaaaaatataaatggctctactagtatatttaataatccttcattgatttacctaaacgtatgaagatacccatataatatttttaaaaataagttattgtagctctaaaataatttattagactagaataaataaatttatactagaatttatgatgaacagtcaataaatggaattaaaaatataggtaaaatacagttaaaatatatacaaattttaagtgatacatgcaatgcacaaattgtaaatgtttgattgaggaaagagctaattcattggaagctctagtccagtctatagtatttggggactgctattgatatgttcattcaacaaataattactgataatatagtatgtactgaaatcattatgctaaacactgagggtttacaataaataagaaaatgtataacctcattgaacttaaatctagtagcagacacaagcaagtaaattggcaataaaaatagggggagtcaagggagtttggataaattatagaagaagctcctagacagtccatggaggtatttgtgggaggatggaattggcaacacagctgagattttaaagatatataaagtacatctgtgtaaatggcaagcagtgagaacacagaaaaggtgtttgaggaaagggcctaaagataagatagaccatgacacagaaaggaaagtaaaaatgattcagtgaccatctagtagatatccaatacatatatttgagtgaatgagtgatagactgactatatgaatgggaaatattgaaatataaagaggaaggccagagataaagctctgaaaggtaagcatatattttaagacttcagagtacctaattttctgaatatgcaaatgagcagtattagaattaataaaaataaccctaaaaatgagaactcttggttggagaaaataacaaaatatgaagtaaaggaaaattgacagaatacttcaaaaactgtgcctgatataattggaaataatgcctggaaacagattgagtccataatcctgtatgtgttcattaaggccaggaagattcttggtaaggaaatgtctagtctgaaaggtctaaagattttattaatctgtataataaattatatcttatgaaactcttgtcatttatccagtatatttgaattacccgtgcattactgtttcatatattcatggtactttcatattttataacatttaaaaatatttcaatattccattgatttgaataagattytttaaattacagtgaaagctttctgataaggtatggtaagattatttttcagtaattatgctgatacatataataaagctactgacaattcataaagatgataatacacttagtacaaactgagcttcaatgggattactaratgagtatgtgaggacagagcagaggaaaaggccaagggttgagcactgtggtgctctattatgagaaagttaggaaggattaaagttggcastgaaggggattgagaaggagtagctgaagcggtagaaggaaaacaagaacagtgtgtcctggaagtcagtggagtaatcacttgtctcaaatgctgctaataggtcaaatatggtgagaactgagaactggacatttcatttagtaatgtgaaggacgttggtgactttcccaagagcagtttcagtggaatggaggaagaccaatggaataataggagcattgtggaggaataaaccaaaatgtacctatttaccatccagagccagactcagagyctttactctgtgctagaaacacaatgaccaattgttgcattgttccctttccttgagctttctacagctcacctcgcttcttcaaacatgtacaatcagacctctgaatctgtggattccacatccatggattcaactgactgcagaagaaaaatgttagaaaaaaatctgcatctgtaccgaacatgtgcagacttttttcttgtcattattccctaaataatatggtataacaactatttacatagcctttacattgtattgggtatttaaagtaatgtagatgtgatttaaataattttgaaatatgtgtataggttatatgcacatactatgccatttcatttcaaggacttgagcatcctcagattttgatatccacaggaggtcctggaaccaatccccacaaatcccctgaaactataactgatgaggggtgatggtacttctttttttacacagtcaaaataaaagagattaggcttgtttttgttatttctccccaaataatgccatattgagcatgactggatttaagaggtccccagatgtctcagccactcatttacataaaaattctttgtccatatctgtacatccttaatctcaagctacacatatggatttactgttctgtctcctggtgtcagcttactttcaatttgttttacctgtttcattggcacacttgtagagattgataatacaaaaatgttttaggagagagcataccacacatcaagttgtcaacttcatccacttctgctacttatttcaaagtttctgatacttattcatgatctttcagtagccttcattctcccatccatccattcactcaagaaacttgtattgttagggaatgtattagaattatagctcttcaagctttccaaaacaaatgtagcaacataaatagacaagcataataatggaaaatcgtctatacgagaaatctaattattttaggcacaaatcattttttaaaatgtattctaaaataaaaatgccattgaggcacagaggtcttactaatctgtaaagcaaacatgatttatatagtatgcttacattagtaaatcaggattatttgggtgaacagagtataatattgatatagttatttggttataaaaagagatgtttctgataaggtttccccccctttatttgccttggaaaacaaatttcaaagaagagtgtcattttaaactctaaaaaaccagttgataaccatagtctgatatttgcagttggaatgaattcctgtgacagcatgaacatacacccaccaacatgtctgtaatagaaaccactttggaagacactagaggctgccacagatttctcaggtcctcacagcaagacagtggtggtcttggggatggatacatttcatcttccttgaagacagataccaccctctggctgtcaccccataggaaatcaggaagtatgctaagctatccagtggacttggaattacactgtgctgtgctagtggaaatatcctatccaacattatgatttattttgaaggagaaaggaaaaaaaaatacacacaaaacggtggaaggaagctgcacacaacatcgccaaacagctggcttgttttatatcccagaaacagcttgggactaactatattcacaagatctcttggcagagtagcttgatgaaaataccaaagctgtgagaagtgttcttttgctgaatccttcatgtagctatcacacggtttattaacctaaatgagaatatgtacaccttttttccaaaaaggtcctttgtatgtttaagtgagaaacttactgattcttcatacggcacaaacatgattcaccacagcattcacaccaaataaactctaataatgttcagaaactataatcctagacatgtagcgatttcctcctttctttcaagtagtatttttggggacagtcaagagagaatttgatagaaatgtaagcctgagttcaatggcactggtgacttttttaggtgccaaggttaatctcagagggaaattagttttaatggcttcatccatatatttatccattcttttaacatttaactctaacctccttaagccaaaaatataactcaattctaaacacatttctggctcacctgctaggtgccagaaatgcggatcttgaggaatatacaagatctgcttcactcttttagaatccctgcattagagaggattcagtattttcagattcatattttagaagacattgcattctattccttactaagcatcccaggtagattcaattaggtggaacatattcatatttttatcatgaggcattttgagtctattctttgtgacaccagaattagtttctcatctcagagtttgctgtatttgtctggtgactcaagtagtttattggcagtcagtttgtaaaaggctccctgggattatctaaatgcaggacgttaggaatggaaatatgtatcattgcctctcctgtcaaaaaatgtaattaacacacatgatatatcatcttacaaagtggatgaaaattccagtgggtgaccttgagtcacagctcctcagtgcacacactgtcctgtacccaagcatctcccagatagcacagaactcccacttcctgcatccctgtacctttagcactgtgtgcatgtttgtgtgtgtatgtgtgtgtgagtgtgagtgtgtatgtgtattttcagttcaaaatctaccactcaatttcactttctttaacaattttggtttggttcaatttgttgcataggtaataataatccatttacagaatacaaaaatagtgtaagtatgtgcttcttcctatctgtatgtygagagattcctcattcttttttatggttgcagataattcattatgcagwtatacaatttatttaaccagtcccatattgatggatattaggttatttccagtcctttgatgtgaccaaaaaagattataataaaaaatgctgaaagaataatattgtctttgtcagtttgggcggccataagaaagttccatagactaggtgggttgtaaacaagagaaatttatttccccacagtactggaggctgaaaatctgagatcagggtgtccgcatggttatgctttggtgaggactgtttcggggcttgcagactgctgacttcttgtagcctcacatggttgaaagagagctagctagctctctggcctctttttattaggtcactaatctcattcaggagggctccaccctcaggatctaattacctaccaaacgccttgcccccaaatatcatcacatttgggattagggtttcaacatatgaattttagtaggggggaggcaaacattcagtccattagccatattcagttcacctgtaatatagtatctgtattattttatgtctgtagaataattcctagaagtggaattgctagctcagaattactgtgtgtttctaattttgatagttactgctcaattgactttcttgaaatttgtatcattttacagttatacctgtaaatgtaagaggtatgtatctactctcttagtctaaccatcagagagtattaccaatatttgtggggtttgccaacctgaaaaaatgggaagtttatcagtgtgtttttaattaacatttatcctattatgagggaggatcagtatcttataaacttttaacagtcattttaattttcttttctttgaatagggccctcatatatttgtgcattttgttatggtgttggtgcatttctttattgatttacaagagttctttgagtattaggaacatccttcctttatccgtgccaacagtaccttttattttgtcacacagtttattcttcatcagaattctttgctcttgagaagtccctgtgagagcctgccagccttctacacctttggagggcagtttgttggcaatttctcaatttttctttcacatagaaaatgatctgactgaattttatttctcttgatgtcaactgtgctgaattattgtcttaaaaaattcaccattccattcaggtttaacatattttttagagtgtgattttcatagggtatgttacattcttgatgaatttttatcttcttgacctattaattactaaaaaaaaaaatacagataacgacaacctaaaacaacctattgaaatatctcactgtgatgatagatttgtctagttttccttgtaatttttgttctccatattttaaggctatataatgtgatgttttcaagtacagaattattttaagttcctaatgggttccttttttaatctgatattttataactttttccccaagttttctggtttcccaccataccccagattcttaagtaatttagggcacaataattttcagagaaagaatgattaagaatttatggaaatcttaggaaggtcgaattgacgcagtgccttggaagagagaaatataggtagttgaagtataaggagaaatgcctatgatataaacaaacaaattgcatgtacatgtattaagaagactataacatatatcagttacttcactagatgccagtgcataggcatgtacctgaatctgcgtaactaattgggagaatgggaagttaactttatttttccaagaaaaagaaacaaaatcaatatttaaattttggaaaacataattrttaaattatttttcatattgtgtagattcacatctctttaatcaatgggagaccaagtgccgatgatccttctccagaactgctagaatttacctccgctcgcyatattcgcctgagatttcagaggatccgcacactgaatgctgacttgatgatgtttgctcacaaagacccaagagaaattgaccccattgtcaccagaagagtaagttatgatgaatcatattagagcctacaaatgatatcccacttatctttttgtctgttaaatactttaaaaatgttttcagtgatttgtaggagtggttattatcaaayttttattttagaattgtagattattattattattattatttgaaatttgacagactttcctttgttcagatccaagctgtgccrcttattayatgtgtaacatttatcaaacattttagccttctcaaactttaatttcttcttttgtaaaatgagaatcacaatgtctacttaataatcttatttttcagaataaaattagcctttgtcaccttaggggatctatactactattataattggctttggcgagttactactggaagtgcaggggctttgaaacatttttttgccaccactgagccagtatacacacatgcacacatacagagagcagtatgtcttaaaccttaatgtgtatgggattagccagtgatcttgtggaaatataggttatgattcagtagggcagagctgagacgctgcacttcaaaaactttccaggtgatgctgatgttgccggtttgtgggccatcaaataatttggttttatgcttgattaatgaatcacaagccatagttttaaaaatgcagtgctataggagaaaactgattctacatactgttttattttcctttacaaataaaatattaggggaaaaagtttaaagcatcttttcaaaagctttttgaacacaagagctaacagaagtgctgtcttccagtgttaaacaggaatttgtgggattacaagatagatgatcaacccagattgctatgagtgataaccgtgcttcctcctgtctaccttctmccatattcactggtttatggcacctcccacatatgctgctacacaaccaaggcattattaccagggaagtcaattcagccataactctataaagtaaactcctgtgaatagagtatctactgtatgactagaggtatagctaagaaaaaagactatagggagaaattaatattgtaggacaaagcatttaattctagaatgatccyactaaggtaagaccacygtcatcggttgcaaaattgctgaatcactagggttaatagttacagatcctaaatactcctcacatgttttctttcctcgttacttaacttcccacacccaacctctccatcatcacaagataacttttaaggctttagttagtcccatgcaacatatgtcagatgttttagtgccctgtattttccaaacttgaaataatttccccttgtattatacctcaacatattgtaaattgtctcatgcaaaactaatcattattttatagcaatgtttggatttttcacttgtttaagaaaacattttcaattctaattttggcgggacttaaaaatatacaccaaggaagactggtgtgaaattggagtgaaatttaatctttcttgacagtatgtctatcagagaaaaaaaatcaatgaaaataaattagtgttctttctatcatctcttgcaggaggtagagtgggggttggggtacacatctattatttataactttatcgtacatgagtctttaaaataatgcagtataagtcaacatataaatatgttttttgaaagtactcaagttcaataaacactcatttaaatatataaaaataagatagcaaatttcagctcttcttcatgactcaaaagcaaagcattatacatttatatttaaaatagatttcccagttttaaaagcatttacaaatactactgtatcagctttttaagcaaatatctctatttgtgtctatattattaagtgatgaggttaaatggaaaaaatatttttatactatccaaactccctagccagttccattagttcaaggtctaggtatatcaaataagataacataacaaaaatattttcaaagacactatatgtatgtaacaaaaacaaatagaaggaaaaagaaacaaagaagtaaattggaaaaaggggattcttagtcaaggaactcagatatgtgtccacctacatattctagctaaatctgttttttttgtgtgtgtgtataattggaataatagaactatctaacgctaagatgattatttgaatatgataatgtaaagtgctctgacaattataaaatgttatatacacattaattaaaattttaaaaatagtctagcctccataattatccttaaaaaatagctgggtagattaaaataattagtaacatagctctatgttaacttcatatacaaaggtaattgtatggactatattacatagtaatataaaaatgcaaatgttctgcacaataaacttacagttaatgactttttaattttcttcttaatatggttaaggaatatattgttatgagcacaatttctacccagattttgttggttcttttcaaatccatcaagtaaaacagtgtgcgtatgatttgtgaatactgcagttgctrtartcacaataaaagagggtttcttgcaagaaactatgtaaaacaacttttatgaagaatagctgtccttagccccagataaaaactactgtcagccacaggtactctagcatggacttggtgctgactgggaaaaagatatttctaaaatgcccaactagcttaaattaaaggccactcttcctttgggctaagatcacagtgctaagagttactttgtcagttttgtgagtcctcacttgtcctcaagaaacacaaatgtccttcaaactaaggataaaagcagaaaataaagtttttactgaatgtccccttttgttactttgaccttgcagtcatcttaacaggatttctctctggattgctttttgcagtattactactcggtcaaggatatttcagttggagggatgtgcatctgctatggtcatgccagggcttgtccacttgatccagcgacaaatgtatgtatatttataggatgcttaggcaaaatgaagccctgagctgtaaaatgtttcatgacagtctttgctgacagagaacgctgtaaatgggwgtcaggtccccacttagacagtgtaacagaaatccatgccagggtgaaataagagctggcagttaggatgatagactttgaaatcagccatcacagtataagaaaacagattagtttttcctttttttttttttttttcaaaaaggctccaaactggtctattttgaaatctctctagctatgacagcctgcctcatgatatagctttagagaacgcctgccatcaatcaacctgaccatttcttttaaagtttctaatcaaaaaattaatgcaaatgagtaaaaaaatgtgcagggaagtaaatatataagtgacaatggaacaggaggataaaatagggcaggggcaataagggggtggagggggtggagtgggtgagagagtcaagagagtactgatagtggcaagccggaaaatgccagaatgctttttgatagaattttttcattaatgacaatgaattaagtgaacataacctaaaggagaagatgaatgagcatctatttttcctgtcatagacaaactggtgaaattcaaactcatctcctgtatagtatatggaaaaatacattgaatagtaagatcagtgaatgtaaatcgggccacagattttttttctcaaatattgtaatgcaaatgacattatactcaaagctagttttctgatgattggattataatgttatctcctaggaagattaaagtacactaacatatttttatgggcaaagctgcagtgctgctttctgcctggtatgggtgctttcttcttttttttgttttccattttttaaaattttactttaaatcctggatactcgtgcacaacatgcaggtttgttacataggtaaatgtgtgtcatggtcatttgctgcccctatcaacccatcacctaggcataattttccacaggctttacagagtccctttgtctcactggctttctgcattttaaaaatccctttactgttattttatttggaggaagtgaaaaaatgcatatgccaccatagaatactacgctgccataaaaaggaatgagatcatgtcctttgcagggacatggatgaagctggaaaccatggtcctcaggaaactaacacaggaacagaaaaccaaacactatatgttctcactcataaatgagagctaaacaatgagaacacatggactcaaggaggggaacaacacacaccagggcctatcagatggagggaggcaaagggagggagaacatcaggacagacagctaatgcatgcagggtgctttctatcaggtgtacagatgatcagtgtttcccaggctttaaaagtccacaagacaggcttggaaggccaattccaggtggtaaattgagactgtattcagagcatgcacagacaggagatttagtcctagagacattagatttctggtttacctgcacccctagaggcctaggaatcaactccctccttcttgccatatccaaaaatattaacaacattttgaggggagccttaaaacaagctaatcgaccccmaaaaaacacatagatcccaggcatcagagaaggagaattcagtcttcaagaccactcccagctgggccttcctgctttcttctgagcctaaacccagtgattaaagaaccagcctggacttccttaaggtgatgttgatcaaatatacccacttcaagcctggcaccactttcttcccaggctggctagttttacattttagtacacagtccagatgttttctcttttcttcatagtacctttagagagaggcttcctttatggttctaaatgaggctaaaatttgtgcttcctccctctttttgactagaaatctcgctgtgagtgtgagcataacacatgtggcgatagctgtgatcagtgctgtccaggattccatcagaaaccctggagagctggaacttttctaactaaaactgaatgtgaaggtatgttctttagaagccaacaaaatatgtcattcttcctttccaagaaaaaaagccagtaatgaaaaatagtgaaatggctggttatgcaaatgtgtcaacaaatactcatttatattatcacttcgaagacaacccatatgtctagcttttcctaaagggaaatatctaagaaatgtagcagatgactttatagcctaatagtgacaactggtctttttaggtgacaggtatcatggagaaacctgtgtttctggagattttctcaacccaagaaaagacctaaaaatagtcttgggctgaactgcaaacctaaactagtatgaagtccaattcaactgaatgcaaatattaatattacagtaaatcagccctaaccacatttttttcagctcactaagtatatatggccttcaaaaacagcttgatagacattttaaattaataccaacactatatatcctttgaataacaaattaactcaactcacatttatcatgtacaatgtgtcagacatgacaggtctttaaaactattgaatcataacacaccttaatcacaaaatgttccccacctataagatataaagtcggccttccatatccatggtttctccatccatgggtctaaccaactgcagatcaaaaatgtttgaaaaaaagttgcatctgtactgaacttgtaaagacctttttcttattattatttcctaagcaatataacaactatttatatagcatttacattttgttaggtattataagtaatctagagatgatctaaagtgtacaggaggatgtgcataggctgtatgcaagtactatgccactgtataacaggaacttgagtatccttgaatcttggtgtttgagggaggtcctggaaccattcccatggatattgagggatggctgtattttctttttagtttgagattctgcatatatgctattagctctccttattttctgcactcacttcatttgcttttggatttgtgtctgcctgtttataaagatattatggattagaaatctcccattattacaaaagcatatctggaggcatgagccaccattggatcatcactcaccatgcatggtaggggaccattggaagcccagccttttgtttccttcaactacttccagccatgttctggctaatcccttagttctccacagcttctccatagagaacagacatttgttcttaatagtgactttaaatgtaatgccacccagggatgtttgctctcgagctcctttaaattttaattaaatttctcttctgtttgtagaatatcagtaatcataagtgggagcagcacttgaaggtaggggtcttcctgttgccactgacatgccttcacacagtgataattgtgtaatgttaagtggctctgcaaaatcctttaccactctttacttgtgtttctacgtttaaatacaaaacaaaaacaatcgagcaacttgttagcaatagaggtagactaagcaaggcaagacatttcaaactgctactgtacacatttttaaaatagtggaattgtgaaacactttttttctttccctgtagggaagaggggaggtcgtatttccaaactgaaaaacaaacattttaaaaacgcagaaattcaagatggggatcttagccataaagccatacataaaaatcacactttcagcaatgagtacattcctgaaagcttaagtaaaaattttcttttccaagttgaatcatattccaatcaccttaatatttagaaaaatccttccatgacatgacaaatccctccataaaatgaataatcacattctaattcatttgagtttaatttggattttcatcaatctagcttacataaggcaagataatatctctaaaaagcatagaatattcattcagttgctgagcctttactaaacaacagtttcatatgatatatcttggacattctgtgaaatagtaagttgctgatgatagagaaaaaacatggctttgtgatcagttactagccrtattcttgaaggttacagacagagcggggtaggctgcagcctrcagacagaaagtggggctgtaggtgtagggtcctggctgcacagagtgtgtgatggaccgtttatttggcatcagggttttacatatagtagctcatagttctaaacactcttgacaacacgaattctaaatagtgtgagaataagtctatgttactttatgttttcctctgcttatactggcagcagaagttttgactgttttttgaaatacactattacaacaaagcttttaagaattcatagccaggtccagtggcatgctcctataatcccagctactggaaagaagctatggtgggaggatctcttgagcccaggagtttgaggccagcctgggccacatagtgagaccctgtstgtatcactccgttttcacactgctgtaaagatactacccgagactgggtaatttataaaggaaagaggtttagttgactcacccttbtgcatggctaggaggcctcaggaaacttatgatcaaaggggaagagggagcaggcacatcttacatggtacaggagagagaggagaaagtgaatggggaagagccccttataaaaccatcagatcttgtamgaactcactcactatcatgaggacagcatgggggagctgcccccttgatccagtctcctccctccctccatacgtggagattacaatttcaaatgagatttgggtggggacacagagccaaaccatatcactgtctttcwgaagaaaaaaaaggaattcttgtatgttgccctaaagatataaaactgcttacartgcctagtgatttgtattgattactatgtgttccctaaagtttgaaactctccattaacatagcaaaactactatattctaaatcaaatgtcagcaggttgggaaaggtatttacaacaaacatgacaaggggataataacctttctatattaagagatcttacatatcaataagaaaaaagttaacctgttagaaagatcaaaacaggtattcctcagaaatgacatataactttgtaaaaagataatgacactcataatgaaggaagtatcaattaaaacaatgacatattatttttcacctatcaaagtgtttattcttctactcaacaaatatttgaatgcttattatgtccaggaattgtattcaagggttgataacacacaaggttggtggctatggagaaagtgttttatcatatctactagaggaaaagtcatttgtcatagcgttcctggaggggaattttttaagcgattaaaatttaaattttacatatcctttgactagaaattatgcttccaggaatttaccctatagatatattcatatagatgtacaggcatattatcatgatcctcgtcattattatacaagtgctaccactactgctactaacatttattgagctcagtatttagtatgtttcaggcattctgctaagcattctcaaaacatgtatgagacaagtactaaagtgatgctaggactcgagtttttgcctcaaagtcactcaactggcaaataggaaacttttctaacattagagcgcctccctccacccggcatccttgtcctcccagtatgtgtgtggtgttatttgtaaagggagaaacatggaaactgtgtaactgttcattaatagggacctgataaataccttcattcaagtagtaccctgtgtacccttaggggatacacatgctaatatggaaagggctccatgatttactgttagtaaaaagaaccggttctaaacagtatacaaatgccccttcccttttgtagaataaataaaaagattgagctgtatgcatacaagcacacctacacacacacacacacacgtggaaataaatgtaagtactcctaagaaactcaacatgtcaggtaggaaggagactgcatcgatatatttccctggttctatcctaatataaattcttcatatttagaagagtcttacccaatcctttctggagaaagtgatttttcacttcttggaattcttctaatgtaacatgaaaaagacaaggaggaagaaaagaagaaaaatcaattgctaacttctttataagacattacgctaatgatttcacatgcattatctcacttgtgcttttaaatatcccaatctagtaattactattgaccactccatgtattatatggaaactgagccttcgtgaaattaagaagtttccaatgtcatatgactgctaagtagaggagagcacacccacatccaagacagttggttgcaaaatagcatgatcttagccaccagtaaactagctctcggtttgtcttaattccttggcacctgccatgtatcttatttcattcaccgggtaggatgtgaagagattctggcagtctttagcagtgcagactctggagtctggcttcagaggttggtttccaatactgattagaatatcttttacacgttatttcacttctctggactcaggtttctagtatacaaaaataggttaataataataatacctaattcctaaaagcatttttgaggattaaaatcagtagcaacaaatatggagcatttagaacagtgtctggcattgagaaaacctatgttttagttgttattagtattaaaagaaaggaattatattatacatayttttctttacccacaggctctaatacagaaatttccatatggtagtaattcattacagattacctagctgttaatcattcagtgccatcattgaataatttattatttgttataataggaaattgtaagttgaaccatataaaattgcacgttagtcaaaaccaaatattggcaattgcatatgattgagcttaatttatatgttttaatcatttcaaattctattaaaatgtgtgaatttattaatacctccaatacatccagatactttctggatatgtttgtgtgtgtgtacgctaaatgtaatttcccgtatggtataaaagtctaggccgggggcagtggctcacgcctgtaattccagcactttgagaggctgaggcgggtggatcatgggtcaagagttcaagaccagcctggccaacatggtgaagccccatctctactaaaaatacagaaattagctgggtgtggtggtgcatgcctgttgtccccagctactcgggaggctgagacaggaggattgcttgaacctggaaggcagaggttgcagtgagccgagatcgtgccactctgcactccagcctgggcgacagagtgagactctgtctcaaaaaaaaaatctattatgtataacagaaatgatttttaaatgtatctgaaatcaaattgatgtttattaatttatttttccttaatgcagcatgcaattgtcatggaaaagctgaagaatgctattatgatgaaaatgttgccagaagaaatctgagtttgaatatacgtggaaagtacattggagggggtgtctgcattaattgtacccaaaacactgctggtataaactgcgagacatgtactgatggcttcttcagacccaaaggggtaaagtatgctttttctttcataaagagttatttttttgctttttcatacaaaaatgttttatacaaaaaaataakaattttgaaagcttctgtaaacagttgaacttcaaattaaaaggtaagtaggaacatttcgtagttgaaactgacctaaatctttgaggatgtaagataaaacttttccatcactccagaaagttttatcatggctccttccagtcaaggagtggacccctaggcaaactctgttctgatttttagaacgtaaattagttgtgcctcttagagaatttcataaaaatgaaatcatacagtacatactagtgagtcttttttcactcgacataatatgttaagatttatccatgttgtttgtgcatcagtagttctttttcttttgaaagaaattgctgagtagtatttctctgcacgaacatatcaaaattttaaatccattctcctgttgatagaaattaggatcatttccagttttagcttagctcctacaaataattttatactagttattttatagtcatatttttatttaccttgtgtaaatacttaggaatagaaagcttttttcataggataggtagatgcttaactttataagaaaccgtcaacattttgccaaattagtaataatgtataaaatgttcaccaaaaagttatatgagtttcagtcattctatatcatctctaatatttgatgttgactatctttttggattttagtcatctagtgggtgtgaaatggcatctgattatggatttaattttaatcgtaagggcttattgaccattcctgtatcttctcttatgaagtagatgttcaaagtctaaatatttttttatcctaaaaaccaaaattttaacttatagagctattacccatatcaagtaaatgtttgtgtgtggtgtgaataagtaaccagatttatatggttaacctgaagttctagcaccatttgttgaaaaatcaattgatcatattacatggatcaatttctagaacctcagttatctatttttcctagcatctatttttccctctgcgtgctaataccatactatcttcattgctttagtaagtctagaatttaggtaatataatgtaccaactttattttttattttcaagattgtctatagtaggggcttttttgtgtgtgtttctatacaattttagaatcaacttgtcaattacagaaaatattaggattattgcttagactctatatacaaatatggaaaatggakcttgaggagatgttggtcaaagaatataaaatttcagttagatagtaggaatacattgaagatatttattgtacagcatggtgactgtagttaataacaatgtatttactcttaaaaaatgctgagagtagattttaagtgttctcaccaaaaaaattgataattatgttaggtaatatgttaattagcttgatataaccatttcacaatttgtatatatataatatatatatacaatgatattcaaaatatcatgtcacacatgataaatatatacaattttgtcaaaaaggaaattaaactttaaaagcaaacaagtattgaggaaaataacatcataataatattgaatcatttaaccaatgaacatagcatatctctccatttatttctatcttctttattcatgtcagtgttccagtacagagatcttgcatgtcttttgttaaattaatctttagaattttgctttgcatgactgtaaaaaaaatttttaaataattttccaattatttaatgtaattgttaaagaattttgaatattgactttatgccctatagccatccttaatttctttttttttttttaaataacttcccttttaaaagttactgagaataaagaatacagaacatggttataggcacttacattgctatcaaatgcaggaattcacttcaataagaagtgctttctctgtaagcatggttcatggcaatagaagctccaacttaggagaggatgttttccgtgacaaaaataataacaacaaaaaaaatggtggttgaaggaaaacagtccaaatttacagatgctttaaacttcttttggccttggcatcagctttcatgttaaaaaataaagctggtggggaagctatctcacttgcaaagtaaatggcttgtatgagattggcgaatcttggtcagatattgcatttttaaagcacaaaaccaccggccaccaatatcttcctgtgcatgcatataaattattttcttctaattcaaatggcaacagaggaatcctggcgtgcatgtgcatggagacacacacacatcactaaggagacaggacaaactatcataaactaagcagtatcccaaacacatcatcatctataggctgttttacaaaggtggaatacaaacgaactgaatgtctcaggtaaaaggcaaagtctatttctccaactctgctgcactcatttatcttcttaaggctttcacagaaagcaccgttttatgaacaggcaattcagtacccagagcttgactggagacactaatcaggattgaagtcttgatgcagttcataaaaacccatttaaaaaaaggcatcaaaaaccacatttaaaataaagttgtccatatataaagaatgaagtgtttagaagttcccagcttgtatcctaataagagtactgaaaggtttaatattagcagcctgtgaacacgtagtgaagagagagtctgagaaccaagttaacatccttattccactctaattccacccatgccatgggtaaaaacagttcttgcagtctagagtttctcctccgatggtttaaccgtcagatttttacatcttgggattcaaccatcttggcaagcgtcttcttaattctcaacgctgtgagtctgggggctggattgtgggcccagcattctgacattagcttcaaaactgctcgtagacattcatcactgttccaccgattagacacaattggccgcaaacgtttgacacacacaacctcacgcatatcttcgtatgacggatcactcggtaccatgttataatatggcaattggtagtcttccacgatccctcctgtgatacaacgacgagccatctcccaaatgattaggccgaagctgtagatatcagccatgatgtagggctggaagtggtttttgttcaggctttcgtccagcacttctggagccaggtagcgtttggtgcccaccctggtattcaagggcacatcaacttcatttgtgtcactgttgaatttaacagcaaggcccagrtcagcaatgcagcaactcccatttttcttgatgaggatgtttttgctctttaggtctcgatgagcaattgcgggctttccttgggtgccatamrtttctgtgtgcaggtggcacagaccacaggcagctgaataagccaatttaagcagggctctggtgtccagcgtagcacatttcaggaagtcatagagagatccattttcatggtaatcagtaatcaaatagagctgagtccaggaacctgtacctttaatatctgccgctatgaaaccaagtatgttttcatggcgcattagcacagtttggtagatttctgtttctcgaaaccagctggcttcttcagtggtaaagaatactttcaccgccactctttcgccatgccatttgcccatccgtacttctccatatcggcctttaccaacttgccggaccatctgaatctgtttggcaatagttcgctgaaccaataaaggtagtccagacccactaccagaactttgtgactggtcaataaggtcttttagtgattttccaactggaataaatgcttcatcctgttccaaatcacgattgtaacgacgtctgcttgagatgctcttgcaataatgtttgtaacaaaagcagctggagaagatgatcatagcaattatgcagacagccatagaaatgagcaaaaccagccatcgaatgctgccatcaaaaaayggacctatgacaacagggggcatgtgggttgcaaatactggttacataaattggtccgacaacattctattgtccggcgtagctgggcttttggagaatctttgcactgaaaatcagatccttcatatttcatacaccctgaagctaatgtggtttctccctggtcatcttcttctatgatggcaaagcaacgtccattagttatgcatgtgttattaatagcatcatctgggcagtgccctcagcaatagcacttgaaaaaaggcaaggtatcctctggtgctaaggttactccattttctgactttttctggtcggagtctgatttcatcccagtgccgtggagcatactatccagattctgtccttgaacacgagaaatgatgaacaaataggctcccaataatctgatgtaaatgtatagctgagtcattgttcaattgtaatgtttcctgtgtactgtcacctttagtaattggtcttgctacttcaccaatttaaatgactgtcattcagtgagattttcttgtaaaagatcgcaagcacttgacaatgacttcaactcccactgctttcttacgactcctccaagatgtggctagataaaactgtacttccgattttctccaaacagctttgacctatgcttccatctcatgaattccaagacagtattaaactgatgcatattttcataagtcgctcccggcgtctcttcccgggctccttgccagcgtgccgaggcgcaggcagggtgatggaggcgccccggccgggaggatctgccggggagagcggctttcctcatcgattcgggagcacccaccatgcttaatttctttattaattctagtagttttaaactacatgctttagaaacgtacacataaacaatcattttacctgcaagtacattcaggcttacttcttcctttgcaatctttatgccaaggttaactaaaaatggcgagagctgacatcttcactttgttctgaattttaaagggaaacctaatatttcactatggagtatgatgtgaactgcatatttttttatggacaccctttatcagattcagtaggtcccctactattcctaagttgcagagagtttttataacaaaatggttttgcattttgtcatatgcttttcgaaacctactgaaatgaacataaggattttctcctttattctgttaacggggacaatttatgcaaattgaattttaaaatatgaaggcagctttgcatttgtgaattaatctccatttggttatgatatattatcatttttatatattggatgattcaattgactaatgtttggttaagaattttgacatcctctcataaaatatattggtctataattttattttcttataatgtttttgtcaggttttttattggggtatactggcatcaacaaatgatcggggaaatgcacttcctcttctgttttctaaagtaacttcagattaaaattaattctctttaaaatgcttgataaaatttcctagtgaaactatctgagtctctagttttcttcgtgcattgtattggctattttttattagacatagggttagataggttttgtattaatatctttagggagggtcaatttttgatatattgtatttttcaagtaatttgttcaattcatctaaattgtcaaatcattggcaattggcagttttaaaaattgccttattatcttcttgaagtctatagcatctatatagatatcccctgtgtaatttttaaaatgattaagttgtgcttttctccttttattgatcacttatgttaggggtttatcaattttcctaatcttttccaaaaaaacttctgcctttttattttttgtgtttttattgattctgttctatttattatattattcatttgacctgttttggttttaaatttcattttctttttctacctatcaatttggaaagttaaattatgattttacacctttcttcttttatcatataaacttttaaatatagatttccttctagcagttctttagctgtttctcatgaattcaggaatgctttatgttcattgtcatttatttaacataatttctaatttctcttgtgatttattttttgttaatttccaaatatttgagctttattaaatattatatttttgatttctacactggatgtttatgatctgagaacatactctctaagatgtcaaactttagaagtttattgaaatttaacttatggctcagtgcatggtctctcttggcaaacaaataaatgtggatttttccaatctgcgattatggattcctacctttctttcatttttttcagtatttcttcctgttctttgaagcactgttatgaggcacatacatatttagaatattttgaatctttagatttttatatcttataaattaatattttgataactgtgaagatctccacttaatctcagatatcactttttgtcctaaagtctactttattttttattaacattgccacagcagttttcatatgcttactctgtatggtatgttttttctgattttgtttaactttcaacctatctttattttcatttaaaagatttcttataaagagtaaaatagatggattttttatcctgacaattactgtgtgtttagtccctaaatttaatatagttaataatatgattgggttttgctatttgtttcccatttgtgtcacaaaatttttgttcccattcttccttttctgtctacttttatgttaaacaaatatttttcagtattccattttatttcctttattatctttttagcagtacctctttgtataattttccattccaacttttattttaggttcaggtagtacatgggtaaattatgtgtcatgggatttggtgtacagattattttgtcacccagataataagcataataaaattttcaatcttcacccccctcccacccttttcaagcaggccctggtgtctattgttgccttctttgtgtccatgtgtactcaatgtttagctccactcataagagagaacatgcagtatctggttttctattcttgcattaattcacttaggataatggccttctgctccatccatgttgcttcaaaggacatgattttattcttttttatggctgtgtagtattccatggtgtatatgtactacattttctttattcagtccaccaatgatggtacctaggttgattccatgtctttgttattgtgaatagggctgcaatgaacataggcatgcatgtggctttatgatagaatgatatatattcctttgggcatatacgcagtaatgggattgctgagttgagtgctagttctgttttaagttttttgagaaatctcccaacggcttcccacagtgtctgaactaatttactttcccaccagcagtgtataagtgttccctttctctgcaacctcaccagtatctgttatttttgactttcagtaatagccgttctgaccagtgtgagatggtagtattttaagctcatgatatagtgatatagtcctatcttttggactattgttttcatatattgcacataatttgtaagccagcaatacaatgttgtcatttttgtttgaagtcacaaaactatgaaaacaatcttaaagaaatgaaaagaaggaaaaaaatttacattaaccatacctttcccattttccatactctgtggttctagcttatatatattgccctcctgcttgaaaaatttcctttaacattttttttttggtagtgcagagctgctggtgacaaattttctcaacttccctttatctgaaaatgtctttaatctactttcattattgaaggatattttccacatagttacagaggtgtgtgttttcttctttgtttagcactttaaagatgtggcaccattattttctggatttcattcatccttatgacaacatagccattatttgtttctttgttctatatatatatatctttaattcactagatgatttcaaaaatttttttatatctgccttttgacacttataccatgtatgataaaactttggcccgtagaccaaatctgactcatggcctatatttgtatgatctgtaagcaaaggatgtttttacatttgtaaaggtttgttaaaaggagaagtagaagaaggggagaatgaagagaactaggaggggggggaagaagaggaggaagaatgaagagagtctttatatggcttattttactatctggccctttacagaaaagttttccaacctcagagttaaataaactatgatgtgtctatgtttggctttcaagcttaccttgcttgattcacaaagcttctaggaactataaattgagattttattccacatttaggaaattttaggctattttttttatttttacttattttttttaggcttttgtttaaaacctgttttttgaccagtgtttttccttctctttctaggactccagctgcatgtgtgctagggcgttcattgtatctgaggcagtgctaagtaattttttttctttctccgttctttagattggatcatttccattcatctgtcattatactttggtctacatataatgtatctttaatttactagctgattttaaaatattctcattaggccgggcacagtggttcaccccaggaatcccagtactttggaaggccgaagcaggcaagtcgcttgcggtcaggagtttaagaccaacctggccaacatggtgaaaccctgtctctattaaaaatacaaaatttagccaggcatggtggcaggcacctgtaatatcacctactcaggagactgaggcaggagaatagcttgaacccaggaagtgaggttgcagtgggtcaagcttgcaccagtgcacttcagcctgggcaagagagcgagaccctatctcaaaaataaatacaaataaataaataaataaattctcattatatttacttttaacaatagtatcatgtttgagaaaactttggcctgtagaccaaatcctggcctatggccagatgactacaaaagtagtcattaggttgactactcttcctcctatcatctctacctgatgttaagcatatccagtgaattattaaattgaggtattttacttttcagctttctggagttcttatgttccttacagcttccatttctctgaaatactccataccttcactcattataaacattgtttcctttatattctcggacatatttacagaacttacgttgacttccttgtatgctaatttcaatatctgggtcacctcaggatctgcttttatcaacttctttttttaataaggtcaacattttcctgtttctttcctgtatatctaatacagtagtcctcctttattcacagaggatatgttccaggaaccccagttgatacctgaaatcacagatagtaccaaacctatatatactatgttttttctatctgatacctgtgatgggactaagtgactaacaggagggtagtgtctatacagcatagatatgctggacaaggggatgattcatatccctggtgcgacagagcaagatggcccgagatttcaccacactattcaaaatgacatgcaaattaaaacttttcaattatttatttctggagttttccatttaatattttcgaactgtggttaaccatgataactgaaacctcagacagcaaaactacagatgaggtgaggactactgtaatttatcatctctacaggacatttcggagaatacaatgcagacactggtttctgttatgttcctctgaagagtttgaattggttctaattagtaataaacttgctgagtgatcaccatgaagtcatgaaagtttactttcatactttgttaggacagattagtggaaaactccaggtattcatcaaacatttctaatgtagttaacttaaagtctgaattctctttactttatggttggtagcacctgaaaactcttctcaccttgttcagtttccagcggttgctttccactgaatttcctagaatctcctgagtgaatatacaataaagggatcagttaaggctgggaagggtattgttatgcaaattttgtgaattgcagtttaacagctaaagaatttatctctatgatgttcataaaattattgtcttaaaatttgattttagatttttccacttaatgacatttaatttatatgtgtatataaaatatgccttacctattctgtgcacagtcccaacttcataatgggggaatgaatgaatgtatcttaaacaaatgatgattttgaaactgacctgtgaacttagttaattgagattcagtgaggtatataaataagtctaattttaacactctgatttatagtagcaaacaagttttcatttgtaaattaagcctagatatatatacatatgaactatattgaataggtgggcatttcttgggcaaataatttagttttttttttttttcctattacatctggaaaataaatcttgtatatacagtatatgaacacagtgtagttttgtttaagtaaactagctttgttgatatactatgtatacaagataaaaaggaataaaacatgaaaatatcaataagtattgaatctaagtaacaaatatataggaatttattattctattatctttacttttgtgtaagcatgtaaaagaactggattttagaaattataaacatgtattaaagrtaattcttatagttttctcaataatttgctgctctgtattattaaaactactttgtctataaaagtttgctgaagtgaaaaatattgctgtttctattacacttcgttaaattcattttaatatttttgttaggtatctccaaattatccaaggccatgccagccatgtcattgcgatccaattggttccttaaatgaagtctgtgtcaaggatgagaaacatgctcgacgaggtgagagctgcagcagaatgtcactgctctgataaaaggacaactaaaagccaaatatgattattttcagaagaatattttgcagtaaatgtyattcatgtaataaatttattctttaatctatcagtgtattagcgttccctccaggaagtagtttttaaactcatctcaataattactttcatgtttaattataatgttttcatagcaagaagagttgaattatgtattttgagatacacacacacacatacacagagataaagaaagagagagagtcaatcacaaatctgtggtatatgtaattttttcatatcgtgttatttattagattgtttgtagcttctatgagttctagcatgaaatgccagcgttcactgaggaatgtgtgtgctgtagtgggaaaagcaaatagaagaactcacacactgagatgtaggcaataatatagaaagcaagaagtgttcataaaggactaagaaggtagtagtcatgaattaatgaacagaaagaggctgacactaatttaagctaaagccttcctttgaggaatgaaattcatgaactccaaacattaagaaatcaaatgccaacataactccttgatataaaagcgtttgggagctacttccagggcagttgctcgccaagtttaagtaggaaattcatagaatgcactgggacgcttcttctctagaaagactaaaattaatcaaggctacaatgtagtgtttttttccctaatgactttagcgttaaaagaccagcaatgtttcttargtacaattcttgttacctgctttctttataaaactgtaggattatcaatctgagcattacatgtagactaaattttgaaatattaaaaaacggatacgttwtgatagtcgaatgatgaattactgagctcacttttcgttttaagccttttctctttgtgtttacaagtaaatcacaatgttgttttcattaatatcatttaactcttccctacccctttttgagtaatgagtatatgatcacagaataaaaatggaaaagtagaaaaataaatatacaattcagtggtaattcaggagagataccactattaacattttcatatatttctgtcataatgcatacaaaaatttctgatattgctcctcttaactttatgtgatgagtttccccaaaaatctatgaaaactttctctgaagtctggcttcagcacctaaataacacattattatatggtcgtgccataattatttaccctctcaactttatatggacattaagattgtttcaaatttttgtttattttaaccaatcctttaataatacttattccatataattacttttcaattattgtaaaaacaatacatagtaaaataaattcttaatagtaaagaaataaaataataagtgtcctcttcaacctatttatcccagtcttacttccaaatttaaaaatattgagccttttttccgattcagtttttattttttttaattatactttaagttttagggtacatgtgcacaatgtgcaggttagttacatatgtatacatgtgccatgctggtgcactgcacccactaactcgtcatctagcattaggtatatctcccaatgctatccctcccccctccccccaccccacaacagtccccagagtgtgatattccccttcctgtgtccatgtgatagcattgttcaattcccacctatgagtgagaatatgtggtgtttggttttttgttcttgcaatcgtttactgagaatgatgttttccaatttcatccatgtccctacaaaggacatgaactcatcattttttatggctgcatagtattccatggtgtataagtgccacattttcttaatccagtctatcattgttggacatttgggttggttccaagtctttgctattgtggataatgccgcaataaacatacgtgtgcatgtgtcttcatagcagcatgatttacagtcctttgggtatatacccagtaatgggatggctgggtcaaagggtatttccagttctagatccctgaggaatggccacactgacttccacaatggttgaactagtttacagtcccaccaacagtgtgtaaaagtgttcctatttctccacatcctctccagcacctgttgtttcctgactttttaatgattgccattctaactggtgtgagatggtatctcattgtggttttgatttgcatttctctgatggccagtgatgatgagcattttttcatgtgttttttggctgcataaatgtcttcttttgagaagtgtctgttcatgtccttcgcccacttgttgatggggttgtttgtttttttcttgtaaatttgtttgagttcattgtagattctggatattagccctttgtcagatgagtaggttgcaaaaattttctcccattttgtaggttgcctgttcactctgatggtagtttcttttgctgtgcagaagctctttagtttaattagatcccatttgtcaattttgtcttttgttgccattgcttttggtgttttagacatgaagtccttgcccatgcctatgtcctgaatggtactgcctaggttttcttctagggtttttatggttttaggtctaacgtttaagtctttaatccatcttgaattgatttttgtataaggtgtaaggaagggatccagtttcagctttctacatatggctagccagttctcccagcaccatttattaaacagggaatcctttccccattgcttgtttttctcaggtttgtcaaagatcaggtagttgtacatatgcggcgttatttctgagggctctgttctgttccattgatctatatctctgttttggtaccagtaccatgctgttttggttactgtagacttgtagtatagtttgaagtcaggtagtgtgatgcctccagctttgttcttttggcttaggattgacttggcgatgcgggctcttttttggttccatatgaactttaaagtagttttttccaattctgtgaagaaaggcattggtagcttgatggggatggcattgaatctgtaaattaccttgggcagtatggccattttcacgatattgattcttcctacccatgagcatggaatgttcttccatttgtttgtatcctcttttatttccttgagcagtggtttgtagttctccttgaagaggtccttcacatcccttgtaagttggattcctaggtattttattctctttgaagcaattgtgaatgggagttcactcatgatttggctctctgtttgttgttgttgtataagaatgcttgtgacttttgtacattgattttgtatcctgagactttgctgaagttgcttatcagcttaaggagattttggactgagacaatggggttttctagatatacaatcatgtcgtctgcaaacggggacaatttgacttcctcttttcctaattgaataccctttatttccttctcctgcctaattgccctggccagaacttccaacactatgttgaataggagcggtgagagagggcatccctgtcttgtgccagttttcaaagggaatgcttccagtttttgcccattcwgtatgataytggctgtgggtttgtcatagatagctcttaatattttgaattacgtcccatcaatacctaatttattgagagtttttagcatgaagggttgttgaattttgtcaaaggctttttctgcatctattgagataatcatgtggtttttgtctttggctctgtttatatgctggattacatttattgatttgtgtatattgaaccagccttgcatcccagggatgaagcctacttgatcatggtggataagctttttgatgtgctgctggattcgttttgccagtattttactgaggatttttgcatcaatgttcatcaaggatattggtctaaaattctcttttttggttgtgtctctgcctggctttggtatcagaatgatgctggcctcataaaatgagttagggaggattccctctttttctattgattggaatagtttcagaaggaatggtaccagttcctccttgtacctctggtagaattcggctgtgaatccatctggtcctggactctttttggttggtaagctattgattattgccacaatttcagatcctgttattggtctattcagagattcaacttcttcctggtttagtcttgggagagtgtatgtgtcgaggaatttatccatttcttctagattttctagtttatttgcatagaggtgtttgtagtattctctgatkttagtttgtatttctgtgggatccgtggtgatatcccctttatcattttttattgcwtctattagattcttctctctttttttctttattagtcttgctagcggtctatcaattttgttgaccctttcaaaaaaccagctcctggattcattaattttttgaagggttttttgtgtctctatttccttcagttctgctctgattttagttatttcttgccttctgctagcttttgaatgtgtttgctcctgcttttctagttcttttaattgtgatgttagggtgtcaattttggatctttcctgctttctcttgtgggcatttagtgctataaatttccctctacacactgctttgaatgcgtcccagagattctggtatgttgtgtctttgttctcatgggtttcaaagaacatctttatttctgccttcatttcgttatgtacccagtagtcattcaggagcaggttgttcagtttccatgtagttgagcagttttgagtgagattcttaatcctgagttctagtttgattgcactgtggtctgagagatagtttgttataatttctgttcttttacatttgctgaggagagctttacttccaagtatgtggtcaattttggaataggtgtggtgtggtgctgaaaaaaatgtatattctgttgatttggggtggagagttctgtagatgtttattaggtccgcttggtgcagagctgtgttcaattcctgggtatccttgttgacttcttgttgactttctgtctcgttgatctgtctaatgttgacagtggggtgttaaagtctcccattattaatgtgtgggagtctaagtctctttgtaggtcactcaggacttgctttatgaatctgggtgctcctgtattgggtgcatatatatttaggatagttagctcttcttgttgaattgatccctttaccattatgtaatggccttctttgtctcttttgatgtttgttggtttaaagtctgttttatcagagactaggattgcaacccctgcctttttttgttttccatttgcttggtagatcttcctccatccttttattttgagcctatgtgtgtctctgcacatgagatgggtttcctgaatacggaacactgatgggtcttgactctttatccaatttgccagtctgtgtcttttaattggagcatttagtccatttacatttaaagttaatattgttatgtgtgaatttgatcctgtcatgatgatgttagctggttattttgctcgttagttgatgcagtttcttcctagcatcgatggtctttacaatttggcatgcttttgcagtggctggtactggttgttcctttccatgtttagtgcttccttcaggagctcttttagggcaggactggtggtgacaaaatctctcagcatttgcttgtctgtaaagtattttatttctccttcgcttatgaagcttagtttggctggatatgaaattctgggttgaaaattcttttctttaagaatgttgaatattggcccccactctcttccggcttgtagagtttctgccgagcgatctgctgttagtctgatgggcttccctttgagggtaacccgacctttctctctggctgcccttaacattttttccttcatttcagctttggtgaatctgacaattatgtgtcttggagttgctcttctcgaggagtatctttgtggcrttctctgtatttcctgaatctgaacgttggcctgccttgctagattggggaagttctcctggataatatcctgcagagtgttttccaacttggttccattctccccatcactttcaggtacaccaatcagacgtagatttggtcttttcacatagtcccatatttcttggaggctttgctcatttctttttattcttttttctctaaacttcccttctcacttcatttcattcatttcatcttccattgctgataccctttcttccagttgatcgcatcggctcctgaggcttctgcattcttcacgtagttctcgagccttggttttcagctccatcagctcctttaagcacttctctgtattggttattctagttatacattcttctacatttttttcaaagttttcaacttctttgcctttggtttgaatgtcctcccgtagctcagagtaatttgatcgtctgaagccttcttctctcagctcgtcaaagtcgttctccatccagctttgttccgttgctggtgaggaactgcgttcctttggaggaggagaggcactctgctttttagagtttccagtttttctgttctgttttttccccatctttgtggttttatctacttttggtctttgatgatggtgatgtacagatgggtttttcgtgtggatgtcctttctgtttgttagttttccttctaacagacaggaacctcagctgcaggtctgttgcaataccctgccgtgtgaggtgtcagtgtgcccctgctggggggtgcctcccagttacgctgctcaggggtcaggggtcagggacccacttgaggaggcagtctgcccgttcttagatctccagctgcgtgctgggagaaccactgctctcttcaaagctgtcagagggacatttaagtctgcagaggttactgctgtctttttgtttgtctgtgccctgcccccagaggtggagcctacagaggcaggcaggcctccttgagctgtggtgggctccacccagttggagcttcccagctgctttgtttacctaatcaagcctgggcaatggcggcgcccctcccccagcctcgctgctgccttgcagtttgatctcagactgctgtgctagcaatcagcgagactccatgggcgtaggaccctccaagccaggtgcaggatataatctcatggttcaccgttttttaagcccgtcggaaaagcgcagtattccggtgggagtgacccgattttccaggtgccgtccgtcacccctttctgtgactcggaaagggaactccctgaccccttgcgcttcccaagtgaggcaatgcctcgccctgcttcggctcgcgcagggtgcgcgcacccactgacctgcgcccactgtctggcattccctagtgagatgaacccggtacctcagatggaaatgcagaaatcaccgtcttctgcgtcgctcacgctgggagctgtagaccggagctgttcctattgggccatgttggctcctctccccgattcagttttttagtgagttacctttagtatctaaataatattcttatcagtacttttatcaccattacatattgcctattgactctccgtcttgaaaggtgaagaaatgtatcattcacaacacctccctccttcattccaccatccatacatttttattatgtgtttcttctacgatatctttatcatgttcaagagagcttacatgtctatttcatcaatgactacatttagactttctcttgaggtcctactatataagatgtgataaagactatcatccctacattcttcaccacttgtcagtgtctgtcaattacatatctttgaaatcttttcaaagattttcacagttacattcagctctggaccaataattaatgcttataattcaaaaatagaaatataataatcaagattgtaatactgtaattagatacatattatttgatacaggctcgaattgcaaaattggacacatatttgtaggtcatttttatcttcatgcttgctctgataacttatttaggaaagagtgtaagakgtggtctcatggtttgcacttcttcatcagattacataaccagatagtagaaaaggatattttagtgtattactggcattcatttgattacgagggaaatacgatgtatttcttctctgatttttcttttagttttcttcattttcttttagtagaaggaagttttctcccttgtagatttgtaagagcactttaaatattaaaaacagtgatagtatatcattttttaataatcagttttcagatttgctttgtgtctcactactgttgataatttctagtgcacaaacttcaaaaattttatgtaatcagctgtcaaagttcaggtaaaattctttacttataataatgataccaacccatgattattatatattttgatttttttgtgtatttcttacatgctttataatcctagaactctcatctatcccaagattagaaaaatgtatttgttttcttcatttgtatgatttcattttataatacttaattttttattccatctagaatttattttgttatatttcataaggaaattttcaaactacattttgttttccaatactcttttttactcatctacatttaatattactttcagctctttagacatattaaatatatttattttattttcggaatctgttagaagcactctgttattgagtctgagtctgcatttttatttctcttctaactcttattcatatggacttcattttcttatgtttcgtaagtgtgtgtgtgtgtgtgtgtgtatgtgtgtgttttgtggatgtatgcgtgcatatgtatttcttagtttattctttcagaagccttgaatttacatgaagttatgtgwtaatgacctaccttatataggacctagaattttttgttgttcttctgtaaaaccatgctycctgaactgtagtctagtcatcagaatttgccagtcaactccaggaaagacattgttttaaagaatgacgtaagctttctagaagtcaattttgtagtttctcatctccaaggggtttctttatttcttgccagcgcaacgattctgttatctgccatctgtctttcgatctatctacctacctacctacctacctacctatctatttttctacgtttaattttattctgtatcttcaactgttctgaacaggaggggttttttggacatctagtctacaatacttccagaaataaaagttaagatagacattgtttaatacatgaagtacttctacatttagcctcaatttctggaaattttaacatcagaaataatgttaaactatttaatgcctttgcaaactttattaaaattatcagatttatttcccatttggtctattgggtaatctattagaaacgaacttactaatatcaaacaatatttattttaccagagtatgttctacttggacatcatagaggatccttttaatgtactttaggattcagtttggtgttttgctcatctggattcataagttaattgcctgtgactcagacacccaccagttgtgctcctttggcaaatcacttaatttctccatgccttagttacctcatctgtgaaacaggaaaaataatagtgtctatctcatatagatgttttgagtactaactgaattaacccctgtgttttgtgtaatgctaagtataatgactaccataagataagtgctatttgagtcttagaagttttgtttatttggggttatcatttgcatttgggtatcaagttagaatttgcttcataaattgaattacatagctctccatttttatatgaccataagagtttcaagttttgaaaacagtctgtaaaaattaactagcattacagaaaaccaaacaccgcatgttcttactcgtaagtgggagttgaacaatgagaacacatgaacacagacaggggaacatcacatgccrgggcctgtcagtgggtgggggtctaggggaggaacagcattaggagaaatacctaatgtagatgacaggtcgatggctgcagcaaaccaccatggcacgtgcatacctatgtgacaaacctggatgttctgcacatgtattccagaacttaaagtataataataaaaaaaattaactatcattaaaacatgtttgtggtagttctttgataatttgtcctcttttgatacccttgattagctttgtttaccgtttccttttgcttgcttttctttttttcaaatctctttacttcctgtggtgtttatattttctcttttttatacttaaatgaattaaattttaatttatctatttttaaaataatggactatttaagcctataagtttacttttgggtacagtttttccatactcaacaaaaattaagttccttttttactgctattatattctacctagatagctatttatttttaattgaagtcttgattttctctttaacccaagagttattaaagagaaatatttaggcattaatttttagaacagttgaattttgcataaaattctctcatcatgtttgatattcagaactaatttaatcttaatttttgtggcatttgatacacatctaaaagtagtaatttatgttaagaaaataagccttagataatttctgctttgataattgagtattttttatagtcaatcacaaactatggtaaatatttagttatataccacataatatgtaatttgatattattagattattcaaattttctgttttttcttacttcatctgtaaatacttaagatgagtaagttagcatcattttcagccattgacttttaaagtttttatttccaatatattttgttgtccacatatttttgtactgataattagtgcttatttgaagcataaacataataatttaaatcatgtttttattatatttttatcaatgtaaaatgagagcttgccttactgaacctagtttatttgagttctactttggccctatttaatatttcacaacttttttttcttttccatacgctttcttgacacacattcattttcttttacttgtaatattttatttgcaatattcctgttcattttgtttatctcttgtgcacattacatgtttatgtttttaataagaacagtaagactgcttaactcattagtatgtatttagtatgcatttctgacactaattctgtcattctgctttttgctttctctccctaatgtttccttgcctttttttccctcctcctttcttctttctgatggactatatatattactgatttgcttttatctttctccagattttgaaggtctgttagttgtattcattcatcctgtattatttctattttttaatcaaagacatgaataaacattgtgttttgtatttctgtatgttaaaaaagtaaatttaaacttttcattcccctcatctattgcttcttatccccaaaatatcaattccaatgaacacctttattttctttagtaatactgccagtggcatgttcttagagtatcattgttaaactgttattttaagtaatatgtctttattcccaaggctactttgcacctgtaatagtctggtggagcaggcttgttccgtgagccactagttttgcatttgttactgcttattcttctcaatgtagcatcatcagcattagcgtttgtggaaatttctccttggtcattgttttctatagccatagtttggtagatgctttgagatttcatctttcttgtttacatttttaatatttctattgacacttagaagatgctatgttcacgtaatcatagaaagcttttaattaaaccctctactctttggttttaactttyctttattgatatatatmaaaaatctatttttgtgtcaaaatagcattttaaaggttactgtcattaaaactttaacaactaaattatgtacttgttttagaaatgttgatatgtggctcatctttctttaggtttggcacctggatcctgtcattgcaaaactggttttggaggtgtgagctgtgatcggtgtgccaggggctacactggctacccggactgcaaagcctgtaactgcagtgggttagggagcaaaaatgaggatccttgttttggcccctgtatctgcaaggtacattgtttattccagtaatgtcccactgtcaagacagaaggttatttttcttggcttctctgttgatttccttggcattaagcaattttaatgacttctggaagtatccataatctattctacgtgtggtgacccaccaggttcactgtagcaggatgtttataaggcacttatctaaaagcctacaaatgcacggaggataaaccacgtttaaaggcttgttattttataacaaaaacactttcaccccattgcccaactagtgtgttaatttaaaaatatacggcactagaaatagcaaccctttaaaactaaagtgcattcaaatctacctttgcatctaattcagtaatgaattctgtcwagggttttattctgaatttttaaataatcttctaaagtttgaacccagataagccttaaaatactcattatattcaaatttttctgttcaattataaaaaagtacaaagccctaatggaattaattaaaggctcaatattttcttccaagattacttttagaaatgcaactttatttgttgtacatgctcacctaataacaaatcatgttaacaccaagggatgcattacctctgcagcttataaacattatgaagcatacaggcatgcacaagtgaaaaatgaaaagactgatttactttacctatagtaatgagttctataacattctgaccagacggtgtataactacattagctgagagaatgaaccattctttgaaaaagttagcataccatacttatgtaaaaatgaaagttactacttttttctttattttcaattaaagagggacccttattaaaaatatttttattaacctgttagtcttatcttggcagctataaaatattatatagttatatttgrtacatgtgagcatatgtgtacatatacaaccattaagccataatataagtagtaaatattagttttaatgaagtgtttatgaattgggacaagaatgtctggaaatatcaagctaaatataataataatagttacataataggtatatgttacatcaggggcaatttaggttcctattttgaactactgaaataataaaactcctgtggacacagtaagcagaaaagtccacaagcccatagtaaaaagttgccatgtcctggaatgtagtaaattttctaatctattacatttcattccaatattatctgaaatgaaaaattgcttgagttgaccaagattgtgtagcagtgtgtgagtgattgcttgcttaaggacacctcccctctccatcttgtatgtctctgtgggcaatcctgcaggctcttagtgcatcttctctagtatttatcaaaacatgtcttgtgtgtgctttattctcttttcaaaactccacagaaatctctaacctttaccacttgctcaaataaaggacagtcaaaactaagcttaaaatggaaaagaaacctcctgagtttctagaatatataaaatcaaacagggaagaaaaacaagtgcttttctacacctaccactcatacagtggtgatgtctggtatttgcaaggaaagggagtaataagcgagttaattttctttggtaaatatagcgagaaaggctggagcaagagagctgtagtgattagcagggctccaagggaaagccccttgagctacttactgcctgctctcagccgaactcaatattgtactgagaattattataatcctaataagaaagatgcctcctgtgtagacacttgaagctctacacagacaattaaaatgcaacaataaacagcaattaagaaatcataaaagagaatgaaaattaagtaaatagcattattaaaataaatgcctttctaccatgtgatatcttaaatagaaaactgtaagttcttataaactaaattgtttcaggattaaaaacttgcagaaagcaagtttcataaaacatctacataattataaaaatcacaaattatatgcatataacatgaattacatcacagaattatatatcacaataatatcacaatatgccacgatgagttatatcaaaatgtgcatgcaatgtactacaattaagtgcctacagtctcttgtttaaaaaataattaataacctagcatttcaacaaaatatgcatacaatttaaatactgaaaagacacttagtgtagtgtatttaaatactgaaaagacacttartgtagtgtatttaaatactgaaaagacacttaatgtaacagttcatactgtttcacaaaaacatgatttgacatagatatgtcaactgattgtaaaaacagcatggatcaaaatgctgcttaagaagcaaaattttattgaaagactaaaatattggagatataaattcaaattaaatgacaggtttttagcagaaggggaagaatatatacataagtgtccatatatttctatccaagttagtaactttaaataagtatttatctgtaaatagaaataatataaatcacatatgaaataatgtgtatataagtattcatctccaaaatgcttattaaccttaaacatttgtacctttattctcttatactataacatatgagtttttaaatagtttttttttatcagaaagaaatatcttactgaagtgtgaagacatttttaaaaagagcttcattaggaagtcttgggcctaattgttttttgttttataaattttaaatgactgctctgtgatgagcccatttcagttgaggctgtattayttttcctgtgggtaaaatgacatactgagctgatatggacatcacttctcccacttttgctattttaaaaatacagatatgctgcataaacatagcaaatagatttataaacatttagattcaagaaagaaagggaaattcctagatgtcagaccaaagagggaaatctaagttaagcataagcaaaagctcaagctaaactgagcaactggggtcatggggtggagggtgggagacaagtcttagttctaagatcagggctaaagtttggagttttaatgccctcactaggacttgacactaggatttggacccacagacggaaattgcagctgaactcmctgaagcagggacactagaaatgctttcagacagtgaaatgggggctagaaaattcttcctgcaagcctacagaggcagctagaaaatttttctcttaggggctctgggtgggtaaaagttactaccttgtgtaggaccgaatccccaaacctgtgtgccacgtgggaatgggatacatttttattctccccttatgtgctggcattcttcaacaagtcaaggaaatgatattcccataggaaaaataatacagcctcaactgaaaatgatctcatcacaaagcaagtaaagtacacaaaaggaaaataactacaaaaggaaaccagtagccacaaaaatgaggatatttgtacacaaagaactagaaagggtagtctgaaataaatttgtattcataaaaatctgtgatcatattcttatcacataaatcataaaaatatgtttaaaatgtacaattataaaagcatgattagaagattgaagaataaacaaagaaggaatagaaaaaagtaatataaaatagacgctatattaaaattcaaaagtaaccaggtttggaaaagaaacatgtataatttacttccagaaatgaaaaaaatatgcagtcattgaaattaaaaattcaatgattgggttaaacaagagatgagaaactgcaggatagaaaatcagaaatataggcctgaaaaaattacctataaattgacatagggaagtaaataaatrtgatgctaactgactcacagaattgtaaaattgaacagaagtttagcagaagttgccaaagaagagattagaagaagttgagggaaacaatattcaaaaaaataatgaaggagagaagaatgatcatgagttaaaaactattataaatcctcagtttgaggatgataaaaaataagtctacccctagtagaaaacctgtcaaccagcaagacaaagagaaaaatattaaaactgggggcaaatatctttattgtgagtgtttaccactcacagtccaacttcatggaaagaatattaaataatatatgtcctttagtaagaatattgaacccataagacagtttcactagattatagtccagaagaatcaatctataaaaagcagtagtatttctatatgtcagtgacaagcaaataaaaaatgtaataaaaatacttagaatagcaagaaaaacttcatgatacctaaaaataagtgtttgtaaaattgagataatttttaaaggttattgaagaacataaaattctaaatgaggagacagctgaggatcaccaagtaccagtgaaaatctgtgaaatttgaaatgtttaccatttctattaatagagttaattagtaccacaatttaggagggcaatatggtattatctastatctttgaaggtgataaaaccctgtcaaccagcaattccacatccaaacatttaccccaaaaaactcttacaatgtatagagaaaaaccatctaaaatgtgctcaacgtaaatgtacttactatgatgaaaatgagaaaaataaatagcaaaaataaattgtagtgtttcctttaatctgataaaagaaacagttaaagtggttgaaatagwtcttcatgtataaaccatgataaatttcagaaacttcaggtggaaaaaacaatgtcattatggtattatttatatcaagttgtaaaacataaaacaatgctacattgtttgtgaatacatatattataattaaaaaatttaaatacacttgtagggtaagtactaatttcagaatagtagttacctctagagaaacaggaaagggaataaaacagaagtgaaatgagattcatttgtatctaagtatcattgctttaaaaatatatctgaggcaaatatraaatataaatattttgttacctctaggttgcatgggtaatgcatgttatrtgtgctttttgaatgtcttaatataatttctaatttaaaatttctttaattgaatgtaaaaaagaattccagatttaaaaagaggagaatgaaatttttaatacaatgtcaactacattattacattttacacataagattttctcttcaacaatgatgttaatgaatattatcatcattatatttcaaaatgtgaaagcagtgctagctcaagacactcaaatgtttataatatttttgcattgttaaaaatgttgaaatttctctcacgaattacaagaggcaagtcaatctcagatatatgacaagtcattgactataagtgctgtctgactctcagtatttgtttatttcaagtaccatatgctagaaattggctcttttgcagtttggtgtcatattatttatgcaaaatcagttggtatgtagaatctcacacataatataaattgacattgatctagttaggaacatgtgcttttatttttatcaaagtcttataatagaaagataaatagtgaagtagaagactagaaatcaaagtctgtattttcatcttgttttgctttgtttttattgcattttccattaagtccttacaggcccacgagactatgtgatctggccttggcttacctctccagaatgttcttgagtttcagtcactgtttttcagctttgcttaaatttcttgagtctcttagttgtttgtagcatctggaattttataagttctattcagatttcttgggatacctcatttctagccctattcctttgcttagccaggcatttttaatggctcggcttaacttcaactttctcaggaaagctgcccctgcatcctcaagtcatatcattctcatggcataatcacttttcaaacctttttcttttcttttatgatctcataatgagtaattctgttttatgtctatcttacctctggtgatgatatggaccctatatattttctttaccattgcacaataagaagataacacaatgactcatacaaaagaaagaaggaaggaagagaactaaaatctcgtgaagctttgacagtcatttagcctttccgattctgttttataatctatgaaatggtgttattgaatcttttctgcctctcagtaggtataattatcacactgaagccctgtacaagtataaagtataaccataaatacctactggattactttttgttgttgtttatattgcttttcccaagtagagataagtttctgttctttttccctgaaaggatttttatggtgtgttaacatttttattggttttggatttccctcttctttttcatttgtgtacaggaatggtcacttcattaacttgtagacttgattcctgggcatttttacaaatggacttcaatgtgtacatttaatcctgaatctaaattacagatgtagaatttttggcataaaaggttcatgcrtgaatgaatttatctcttgcaacccctacagttcaaataatattatgttagtcaattttttacatggacagactctctccttgaccaaattttggaaagtcttctctgagtcctctttttgatgaggcctcatcgttgacccttgtcctcaaacctagcttggttaaagcaagaattctgctaagtcagtgtgttaagaacaccttacccttgatatctgatccctctggcctgtcttcaacaagaatcctgttaatttggtttagcaagaatcccccctacctacccctgatgtctcctcttaatgattgttcgcccctgatccttgctcgtggctataaatctctacccttttccttggcactgaatccctacttgttcatgttgtattgggaatggaggctagttctttactaaggttgctttttctctattgccatagtttctcactgaagcctattttcatcgttttaactactgtccagctctggttctctttcacaatattaaaagctgaacttgtgaaaattgagaactaatgtttatgtatttccttctccctccctaacccatcaactattatctagccttggaaaagtgtgttttaggagtwagtcctcaacaaatactgctaattaactaattatccttcttttgttaacttattttaatactaggatgcattagtctaaaggtcataacagaagaaaacctgtaattaactacaaactaccaaaaaaccaagcatgactgagaaattcctgaagcaattatcacacaaaaaaaataacttaaatgtcactggagctattcctggtaactttgtcagtagtactcccagctgactaacaatcacagttcaatatgtactgctgaagttgtacctagtttataaagcagtagcttctatgagaaagaatacaagaaaactacggtgactatttctccagagaaaaactgtactgaggaaactatagcaaaaagaaaattgatgtcaacacaatagtatctcacttcaagaaatcaaaaacaaaagaacttagtaaaatttttctaattcaactttgtttttaaagggaaaagagaactaaagaaaaaaaagacagccatgattttttgtagcgtaggccacaacattgagctatgttcaaaggaaatagatgtctaaagcacacatttcttcctaaaagaatgaaaattggttctttgggaacaaaaatatcatattgattttatgtaaaggcaaacattcacatggtgcatctgtacataaaatatatctggagtattaaagtttcatggtggggatgattatgaaaaaatgactatataggctccatagggacatgatgataaaaaatagattaagtagattgaaaacactagtctaaagtgaagtgatgtgttttaatatcataatatgtgagaatataaaagtatttacgtatggattatttacaatggaaaaatgactattatagttcatatttcattttattaatgtaattgattagaataatggtatagaaatagcaaaagcagaatatttggttttaagaaaatatggtgatataagggaatgaatattaatttctagagtggaagtctgtagcgttctagaaattaccgtgttttataggctgtagtgtgaaaattatcattaaatacgcaaattgaaaagaatcactaatggactctatacaaataaagtgttaaaatgaatttattggatcaataggagcttcccagtaggaatgctgagaggtttaatagattagactccattttgtttagattaacagttaaaacaactttaaaaatttttattaaattatgtttttgcaaccattgaagtatagataaacaaaaaaagaaaaaaattaattatatgttaataactttttaaaattcatcagtacaaataaattatagaatcataaaggaaaatagaaatctcatgatgattaaaataacattcagtctggaaggtacaaaacttttaccttcatcattcgatatttaggttcaattatattcccatctatgctttagggactgaattggatggtggtaataaggtataatatatggtctgtgccaatcttatggatggcaagaaaagaacaaaattatggttttactgtgtgtatttatttatttatttatttcaataaatgccctttagtagatatttttacatctggagacattctcacatctggaagaggacactgcaacagtagcctattttaatcttgtcatgaaaatcttgggatacatcttttttgctcaactccctggtttttctgtcttatttttttcttcggggcatagtggacactggtgatgaatttggtgtcagatccagaacatgttgtctgtacccctcttacagcagtgattttcttccaccttgtaatatamttatctgaagtccgcctcatcagaaagtacatagggaaactatcgtgactctatttctccaagtagaaactgtgctaagggaactaaagcaaaaaagaaaattcctacttcctttgctataatcctcttgagggcatttttatattccctgtgatatctcatatgtcttgtatatagtagttcagctatgagttgatgaacraataatataaagaataaagcaacgataagaaataatgagcagagcatttattaataatttgatattgataacagaggaagttaaattattcaaagagctcaaccataaagcagatggcttcactttcaagctgggaatcaaaaaactttaagtsctagaatattcatgtcaagaggatcttccaagaataagccaggaatgcaattaggggctgactcatggatgacaatggtcgatgagtcacaaagaaattttgaaaaaacaatgatgtccctggggacacatagaaagaattggaactagactgtcaagatcatatatattaacaagctaatagaaggcgggaaattttggtctctatgaaaatgtgcacaaaagtcccagaacactatacttctgtgtttgaactgtgctactctaaattatataaaatatactctataatgtagtaaagaaagatttctttatgccaatgtctcacattttatagacattttacctgctactgtcaacttaagttactcaagtatagttctgttgatttatctcctaatgaacaaccgctaatgacttaccaattcctaaggaatatctcttaggatggactttctgagggcagggccctggatctcaagtaccaagtgaagttctagcatacaggaagtattaaatacaggctgagtatcccttatccaaaatgcttgagaccagaaatgtttccgatttggtattttttcggattttggaatatttgcagaatacatactggctgatcattcctaatcagaaaatccaaaatctgaaatgctctagtgaacattccatttgagcatcatataggtgcccccaaagtttcaaattttgaaacatttaagattttggattttctgattagggatgctcaacctgcacatttgtcttgaaaaataaataatgaataaacctccaacttttaaaatgaattcttgttcccaatgtctttgctaacatcggtctctcattctatctatgtccacaagttgaatttttaaaccatgcttcaaggatcaggtcaaactccactcctgtcataaagcttccttaagccttatagcaraaattagtgcttcctctatgttcccgtaattatttatttctcagatgcacttaccatattccaccttgcattatagttgattgtgagtatatctttttacccaactagatattggcctttaaagacagacttatttaaagacagaccttgacttatttatcttcatagtgcctagaattcctaccctaatgtgttgcttcaggttattaaataaaattgaatgtgaaattatttaatcatattttttcaaggtcattttactaggctaaaatggagctaaggaaaatgtagctaatgtctgcaaatttctaattgttgaacttagtctgaatctcagaatagtggcattataagctttcaaattagagtaaatgaaaagtagattagaccaagcgcataagaacacagtatacagaacagctgtactgtgtcctcaacgggataaactaaatcataattacagatatgtttcatctttcttgcctttatactcttttgaagatgctctcaacttcagtgctttggggatttatttgtcactgtaagtctgaaattagtttgattagttttgctgatatctatcatttcaaaatgtctgaaatctgccttaaaaagtaagctggcacaaatcttggggcagtgcttattaaggttcccacatagaagtggctgagtttgtaaatgagtcatagaaattcagtatcaaaaagttaatttaaaacaaattattctcttggatataaggaggactgctttgtttattcttaaatttttctccttacttcttcatgctatttttctcttctcttctgattttccttatatgttctcagattttatcatccctatcttctgctcaatctgggtttgtttaaagtgtttttattcagctcgtactatgcgtatagcactttgctatgcatgaaaaacatgactgccaagagatttatttgaacttaataaattttatgaagctaatgctcagtgctgtaccaggaaccatgttattttctcagactataaagttagtaagacagaatttctacctctgaatagattatggtagatagctagagagaacaatctttgagcaatacttttttgtggttgtgatagggtaatgtatacagggccacgaaaactacatggagagagaagttagttgtccaagggaattttttaaaaagcctcagtattgataataagggaattcaaggaagaggggaaatgtagagaaaatgcgtatgtagggaatattacaaatctgtttcctggaaagcaggatgccttcctttagaattattagttaagattaaccactctttaaattgagagattatatcctwccctgtttttcattatatggtcagctttcactggcctgagtccacattttaagctcaactatatacaaataatttttcagwatactgagagtaggattaatgaaaccagtctggagagcagtcacagaatgagaatagatctttcccatagtatcactatgtgactaactgattgtactgatgtgttacagaaaacactgtaaaaagttaaccagaggaaaactttgctttctactttatctgatctttaccccagtttctctacctgtcaaattcctatgcttgcctcaaatgtacatatttttaatctgaaatgtgaaaagtatttataactggtgtaatatcaatgttctattatacatccatgcattaatgtctttaattttaccatgaaattaaatgaagtacctcaataacagaacagtgaactttaaatgaagtagctcaataacagaacagtgaacctaactggccccattttagtcaatctaatgcattcctgcacaggtatttatcatgacatttactytacactcaacctacatgaagatcaacatagtcacttttacgagagtagatttgcatccatccaataatctttctcaccagtgtaattagaaaggatacagcttaacacatagcttttgagcagatttttaaaaatatcattatacgttaaatatagttgagagggtaaaatgaagaatgtacagttaatattttccttatacagacatggacgcagctcataatgttgaaggatacctctgttgctgatacatctctttatttgcaggaaaatgttgaaggaggagactgyagtcgttgcaaatccggcttcttcaatttgcaagaggataattggaaaggctgcgatgagtgtttctgttcaggggtttcaaacagatgtcagagttcctactggacctatggcaaagtaagcaagcaccatttggttctgtttgctgccccagcagccttctttgttgctttcatcgttgttcttttgtatgaacagtttctgatagtgaacttctacataaagttacaggaagaagtaatggaattttcttcaaatgctgttgtgtatttttgctcaaagcctttgaggttgtatttgtaatattgtgtagactggaatttcttagaataggtagacatagtctttttagtgtccatgattactctatgaaacaataatgcaattaaggtttcaactccaagggtgcatgatttaagagagaaaacactacattgtgatatgaattatattttccattactagtatgttcgtatgcaagttgagaaaaactctgtatcatctgtatacataatacatattatccaccaacgctttagttactatttgatgttgcctaggctctttcattattaaaaggggacattaaatataggcaataccttcattctgagttggtttgaaaaattattacttaaactatttaatagcaactgaaattttctttctttaacgtaaatgtgtttacctttctaacttcactgcctacactacccactgccttttcaaatctgtgcaaagagcatgttgtctccctatacagaaaagtgtcagaggaaaatgggaccttctgggaatttcacacagcctgtgtggctggacttaagagtgcagaatggtaggaaatgggctggagagagaaagaagtctagacgggggaatgagaatctagaacttatagggttgaatatactaagaatttgagatattttacttggagtgtcattgaagaaatttaagctaaagactgacattatcagagttgtgttttataaagactactatttagataaactatttcctaaacacttcttcctttcaactttaatcagtgaactaatcctgaacagagctataaaatattttctctgcctgcagtgcttttaagtcaagcctcatattatgaaatattatctatacgttatcaactgtattgctttcagagcagacttcaaagaatcaaccacagatggacatctagtctaacttcctcttttgtttataaagtcccaccccaccctccagactgccccactgatagatcaaagtttcatagccagccaaggggcagagctggtactcaagctttgatcatcagatgctagagacacagaatcccattcaactgtcttacaatgcctcaagggtgacgttagaaagggaagaaatgcaaggaatatattacttgttgtccagaaagtcaacaggttgtacctggtttctatttctcatttaactaagggaattgcagtgattccacagctttgggataagcagagtcaaatagtctatgaagaaattttaaaaaatatttcagccacatagagtcacccttagcattctgcttcccatcacccacaacatgaagcagctcatgcatgtctagtaggttcctggtagctggtaccctaagccctcagtaatcagtgttttgtcctgactaggtaggatgctttaaattagasgtgtagctgtaggcctgaccttggctgaagcataaagatgtaaaaacaaatcattatgcattcccagattcctcctttaaggttccttccatttctgggccagggatctaggctgtaggtccccacagcacttctgaccctatctgaaggaatacatacagtattgccaggtgttgtcatagcaccaaggctggtgggttcaaatatccttaagcctcaaagtagaaattttaaaaagtgggaggggtggaaatactgaatgaaacaccacctttcaggtacttgcatagtttctttctttttccctctgcattacaaatacatacgcaatactttttcaggttgttttttccaaaagcaacaataaactactagtggagtaaaaaatayggaactgaaagtccaactgtttgattaagtgtatgttataaccattgtatgactttgagtgaatttctatttttaagaaagtggtatttggaaccacaattttttaaaaagcataggttcaatgaaaacagattattatagaataccttggaaactcctagaaacatcaaggaaaaaaaataaacaatggaagcctatgtgagtacatataatatgtctaatgatattcataatgctcaggtttttttctaaatgtttgtggtttggttttttttgtttttaatttccaaaagtggacacgaccaggaacatgaaagagaaaagcagctgatagatattttttaaaaattaatgatgactgtgtgttttctctaagatacaagatatgagtggctggtatctgactgaccttcctggycgcattcgagtggctccccagcaggacgacttggactcacctcagcagatcagcatcagtaacgcggaggcccggcaagccctgccgcacagctactactggagcgcgccggctccctatctgggaaacaaagtaagtccacgcttgcttcccgctattctgctttaactgactgatcgtgagaatgggttttagttggtaattcttttaaagaaagacaaaatcaaatacacactgaattggattgccagaaccagctaaatcacattgagttgggcgtttcttccatgttgcacaagaccttaaagagccacggcatccttaatatgcaactttgtatagctgatgttctatgtaaactttttgaatgggcaaataaattaatgaagccgctagtgtattttcgtaaagcaaattataggtattggaagaaactgtgttgtgtttatgtgaaaagagctgttttctggagttgtctgtggtgggatacttactaaagtttttctcatcggtttctatttcatttcaaaactgatactcaggagatttacttttccttctacctgatatgaatgttaattggaaaagaaatgtattacataactaattaaatgcttgccatgaggcttatgtaaacaacatatttgctggagctcaggcagaaactaccctaaaagtgccagattggaagcacgtttgttttaaagcccacacatatgtaaaaacatacacagataaacaaatgtagcagcctcagaaatacaggcttatttttttctgttgtggattacttctatctagatagatatcctggggtttagaattttattttatcttgcctaatactttgttggaaacaaaatttggtgacttatttataaacgtgaatacttgcttgttctgtgaaagttaataccttctcagctgatagttaaaatacctgatcacaccagaaggtgtgatgggaaaatcccttcctaaattaatgttgtttaagcctagtttacacctaacaaaatatagcattatttatgaagaaatcataattgattaagcaaataaaagtatgtttatagtcagtggttttcttgcatgacatgtgagtattgaaatagaaaaacttagtatctcatatgctactcagtgaatgggaactggtggtgttggctggttgaaacacttttaacttatggccagtttcttatatttaacagaactctgaatgctattacaaaaaatgtgtaaatgtctaaaagacattttcartgaacatgtattttaagagacagagtatgttgcataaaattcaatagctgtaaaataaaaatcgaattaaacttttatttgcaaggccctttacagcaagaagtcattttatcctattctatttaggaaactctggtattcccaaaagaacaaaacagcacataagacttgaatttctactgcttaaaattgccaaaaaaatataaaaatatactgtcaatttaaaaaaaaaacaactgagagctccaagaagagccttaggtcaaaattggatgaatttcagaggccttatttcttatatgatggcaacacttaattaaagtagcttataatagaaatattctttaccagattttccatcctttcttctttggtcatatgcatttttttttctgttggctgacaatcaaactgacagaaggaaagcaagcaaatggaatattcggtagaatcagaacaaagaatttggacatcccattagtagttgttggttcccgaagataacttcccttatcctggctgaaatatttttcttataacccacagtgaagctcttcatattcccctaccgatcattttcacatcaaaacactgttcttgcctgtactgccgtttccattcagtgaacaaaataacattaacagggtgtgcaaattgtttgaatacggaggacatttttaatgtaacgtggaagcccttggtggtttactgtcaggcatctcagtatgaatgaaacaatttgccttaataactgaaccatgtaaatttttgatactacaataatactgcaagctctcagaaattaccacagtacatcttaactgtcatgtcacatcacgtaaattatagtcatgatgacatgcttagcttggttgatttaatatcttgctaaggaagtggaaaattgtagggccttgttggtaaattcaataaagccacttttctaaatagttgaggctaaattctttaccagtaattgctgttcgaatcagaaccattgccagaatctgacagaaatagcgtatcaagatacaagtgcatctgcttaaatattgaattttatttacatccatgaccaggagtctatggtacataatccttcctctgcttttttagtgttatttcctaattggaaaaaattatgagatgctattagcttttcctaaatatttatatacagactttcaaacattttccaagttgcttggttataaggcttcttctaacagaagggcgatatgctgtgcatgttctcttataatggagatgccacatgctgttattctttttttaggagcctaatcccaaataataaaagtggctcacatgggacacatttttgctaacatggatgtctgcctggttgtaataaaactcaagaatactagccaatttagcaaaggagtgctttgtatcctgtgaaacatttttcacatttttactgttttggaataatgaagtataagtaagtgattataagtgtatgtgtggataatggatgaggcctaggaaaacttagcacgtttttatactttctatttttgaaattcccacagtctcagctaggagttgttcctccaattttttcccctatgtaccagtgaatatttggcacaactggcagaatcaagtgttaattttcccgcctcgttcttgatagtcaaagagaattaaatcaggcacccacagggctatcctaggtgcatttcattttcaaaatgcttggcaaatgttaatgcttggttttagggcatttgtttaagcaactaggcagcagtggaaagagctagaggacaaagaatcctgctggtttgctgcaggctacagctattcagaaacagtttgggaatttcagagttgggataatttactgccctagtaaactaagtgctactggaacattgcaacagtcatttgcttaaggttgccctagtggtctgaaatagttgaggcagcttccaaaagcaattctctttgcatctgtaaagttctgggagaagctagcttggcttgtctgctgttcctgcattaccattaaggtttgaaattctctcyctgaatattattaaattaatcttatgtgatttgttctttaccaaaacctgcttattttctacagcattatgctatctttctgtttctagcttagagaagcctttaaatttgttcatatagttgccaagaatacctatagtctagtttaagatgcacattaggagagtctgctgacataatagcatctggcttctaaaagtaatctctggtaaactcttttgttttgttgttcttgcttgactttccattctacttcacggatctcaaattaaagctatagatttgaagaaggaaaytgatatttgagatttgtaggacagggtagatctcatcatataaaagaagctcaacaaataccttgtaattgatgctacatgcttaacacaaacaaacaaaactctaagaaattgttttttttaggttgctcagaaatgcccattgagttggatttgtgggagttgaaagatgaattctgtcttgctttacaaaataattaaaaactcgctaacaaatatgttccactctcctttgagcagcatattttgtgacttctttgctccatagtcctcaaaattattcagaagtggagttcaaacccctcctcgccatccataacttcctcctatttaaatcttggattaaatgggttagttaagaagatcattatgcaagtgaagaatggtatggctataaaagtaaataggataaatcaactgtggttgattttttattccataaatcagatcccatcaagactaacttggcaatggagtagaaccaggaagaaggtttgctgcctagaataaactgaatgaatttgtaaaccaaaaataaaattctaagacccctgactgaacggacccccttcttggccaagggaatcccaaagaaacctaaagaaacctgaacatcatgggaagggacgattacacattcctcattataccctgctccctttggagtttagacaccacagaccaacagtaacattaaaacagagattttaaaactgactagacagacactttacagcaacaagataccaaattctaacctcactctggtatagcataacataacagatagcaggccctaaaagaaatcaaagtattttataccaaaatatatttatttgacatattctgaaatgaccttgcaaagctgtctcttggggaaatttgcattctatagagaatctccttcccttactaagtcttttctggagagtcagataccttttaaggtctggcaagagacattcaccatcagcctgctactttaccctactaccttgaggcttcatctacatgacaagaaccgtggcttccacaacccactctcttaactcaagctgacttcaactgttcaggcagaattttactctttcgaccaattgccagtcagaaaatctttgaatccatcaatgacttggaagcccccacctcgcttcaagatgtcctacttttctgggccgaaccaatgtgtaacttagtactggtgtatgtctttgcctgcaactttcgtctccctaaaatatataacgccaagctgtaacccagtcatctttggcacatattctcaggacctcctaaggctgtgtcacaggccatggtccttaaccttgccaaataaacctctaaattgattgagacctgtttctgatactttttggtttacaaattgttaaggataaatgagaaaataagtattaaaaaacaaaaaaaatcaaggactcatttatttcccatagctatgatagaatctgctgtgtaaaagtaacacaaatgcaggagctcaaggtcaaacatagaaacctctgtcttacatatccgtcataacattctcttgacgtttttcctaattaaatttataaagcattagttctaatgttaaaaattgttatataaaaagcattttaatattcacatgcatctgtctacagtgttttacattttrtttataattcgtcaactgaatgaatactagataggagaatgttccatttaataaaaactcttgagaaaaataaaatagcttacttaacagtaatttcaatgtgagttggtttgtgatgtggttggcaacaaaacttacgtaatctagggctacattggcaggaatttactggtcaggacaaaggaggtagtgtttatacagattctgcacaaaacgcatgtcacctaatattattattaaatattattaaatattattaatatttagcttacttgtgaatttctctttttatctttgttaatatacatgacccaagtcatcagctaataaaccaagaaatccaaattaggaagaaatagagccaggattacaatccagatgtgtctatagcccattccagttaagcattttttcaatcagttaagtttattagttcttgcaaggcattgatctttggaatagagatgctgaagcagcttattcaaaagaaagggaacgacaaagatatgaatttataaaaatacaaatgaatgagatgaataacaaatgtcaatagaggggacacaaatccaacaagttttttaaatggtttcaaagctctggcaagattaatcaagcaaaacgtgggtaaaacacaaataaacaattttagaaatgtaaaaatgggcataactgcaattacttcaaaaataaacaaataaggaagtatcagaaaataaacaaattaagagtattatgaaaatttacacacaataagaatacaatttagaaaaaggaatatccttctaggaaaatgcaacttaaaaaaactgactcaaagaaaaaaaatctataatgtcagataaacattaaagtaattgaatcagcagtcaaataaaccttccaatgaagttaactccaagcctattgatttgcaagtaatatcaatcaaaattcaaaaatttttaaaaatgcaaaattatacaaactttccagagaatagaacaaytgggacgtactcctcacataattttatgtggcttgatataaaatcttgacaagaggactatgaagaagaaaacccctacccaaagtcactcatgaacgtagatgaaaatatcctaaataaaatattaacaacccaaatccatcagtttataaaaatagtcaggctaaattggccaagtggattttatcatccgtgtttgaggttactttaaaattagaaaaccagtttaagtaattgaccatattgactgattaaaagagaaaaaaatcaattatctcaatagacacagaaaaagaaatgggtaaaattaaacattcttcatgtctgaaaaattttgaaaactagaattggaaaagcactttaactgatgaaggctatctacataaaaatcaatagcaaatatcttatttaatataaaatgttcaaagtattgtttaagatcacaaacatgaaacaattctcactataacgactcccacttaacattgtgctagaagatgtggacagtgcagtagataggaaataaaatatatagggatcagaaaggaagaaataaaactcacttatagatgatatacttatctgcttgtaaaatcaagagaatctacagacaaattcttaatcagtgagtcaataaggagactatatgcaaaattaatatacaaaagtcaatcatgtttctttatatcaacaacacttttcaaaaaaaatttttaagaggccatgtataatagcaatacatataaatagtaccaaggattaaatttgtagggaaaagccaatggccaagaataatcaaaagaaattatagatggggtgcgatggctcacatatgtaatcccagcactttgggaggccaaggtaggtggatcacctgaggtcagaagttcgagaccaccctggccaacatggcaaaaccctgtctctactaaaaatacaaaaattagccaggtgtggtgacaaacgcctgcaatcccagctactcgggaggctgatgcaagagaattgcttggacccaggaggcagaggctgcagtgagccaagattgggtcactgcactccagcctggggcatagagcgagaccctctccaaaaatatatatatacacgtgtatatgtgtacacgtatatatatgtgtatatatatacgtgtacacatatacacgtgtatatatatatacgtgtacacatatacatgtgtatatatacatgtacacatatacatgtgtatatatatacgtgtacacatatacatgtgtatatatatacgtgtacacatatacatgtgtatatatatacgtgtacacatatacatgtgtgtatatatatacgtgtacacatatacatatacacgtatatgtgtacacatatacatatacacgtgtatgtgtacacatatacatgtgtatatacatgtacacatatacatatacgtgtatatgtgtacacatatacatatatgtatatatatacatgtacacatatacatgtatatatatgtgtatgtacacatatatatgtgtgtgtatatgcatatatgtatatatgtgagtgtgtgtatatatatatatttagaaattctaaaggaaagaagtggggctttttggaaagggattaggtcatgagggttctaatctccatgaatggaattaatgcccttatgaaaatcttatctgatataaagagttaggacttactttaaaagatataatgactaaggcaaaatgctatcagtgtgaaaataaaccaatagacctgaaaaaatagcccatagatatcacatacatagatgaatacttaacttttattgaaataggcattgcagatcaatgacaatgggatagaccctatacagtaaatggtctggtaccactgattatctagagaaaaaaaataaaatttctgcatccttactccacattatacataaaaataaactccccttgaaacaaatcataaattttcaaaaattatgctaaagacaaacctttataaagacaacacattgagatttctgctcctgaccataattgaataatagtatctagatttccttatctaccttaaacaacaacaaagcctgagggggaaaaaatgtggaacaacagtttttagacactcttccacagatagcataaaactgtgatctctgaaaaagagaaacaaatggggtgaggtttacaattgccccaagattattgcctggggacagtctccagggtgaagtgcattggtatattgagaaaaaagccaaacacagcctggccttgccaaattgaaagacagaggttagggttcatggaggccaaggcagctagcatttgtgaggcagcatacaagggaagaggaacctgacctgcacagagagagagacgaggagagagctgcagctatctgcaaagagaaaccggagtactgagttgcaaatatgtgaaagaaaactacctaaggctaatgaaagaatcactaaaaagtagtaagagaaacaattcctgagctgatacagggctgctaatagtttattttcctaacacccaaagtggaatgtcttcataagagggactaaattagctccaaactacaagctactctaggttcaccccaacaaatcttgaaaacagccttaaaagaagtcaacttattccaaataaattaactgcatgccagaacaaagtccaatactatttaattacaacaaaatccagcactcaacaatgtaaaattcatgatgtttggcatcaaatcaaaaactaccaggtacataaacaagcagagcatataagccactaccaggaggaaaatcaatcaatggaaacagaaccccaaatggcaagaaaatcatgtcaagatatatcagaatcaaattattaaaaagacagataactggaaaattgtaaaagcaatcagaaaaaaactaacatggccaggcgcggtggctcatgcctgtaatcccagcactttgggaggccaaggcaggtggatcacgaggtcaggagttcaagaccagcctggccaatatggtgaaaccccatctctactaaaaatacaaaaattagctgggcatggtggtgcacacctgtagtcccagctgctcaggaggctgaggcaggagaatcacttgaacctgggaggcgatggtttcagtgagccgagatcataccactgcactccagcctaagcaacagagcgagagtctgtctcaaaaaaaaaaaaaaaaaaaaaagaaaagaaaagaaaacacaacaggtgcagaggaacaaagataaggaagaatagtttcttgtcagaccctatatgctatggtccaaatgttggtgtccccctaaaacttatatgctggaacctaatgcctaatgtgatagtatttagaggtggggcttttgggggagtgattaagtcatgagggctctaatctccatgaatgggattaacatccttacaaaagaggttgaggatgctgccttgccctttcctttacgtgaaggggcagcaaggaggtaccaccttggaagcagagagcaagccctcaccacacatcaaatctgctgatgcctggatcttggatttcctagtctccagcactgtgagcagtatatttttaatgcttaaaaactacctagtccctgttattttgttgtagcagcctgaatgcatcagtacactttgcaagccagaatacaatacagagatatgttaaagtattaggaaaaaacaacgcaagcaatcaaatgaacaaaacaaatactatcagtctataattctttaccaggcaaaaatgtcttccaaaactgaagaaaaaacaaagattgtttcagagaaatagaagttgaaagaatgtgtcacagactgatgtacacaagaagaaatgtagaaagttcttcaggcaaaagaaaaatgttaccagatggaaatttactcctacaaatagaaattaagtgtatcaaacaggtgaatagcaatgctttgtcactagtgctagctgtcacaagacctctagccagtcatgttttcagctgtagggcctaacaccatggttaaggaatggttacctaaatacacaaacttaaagtagaacttcaaatacttcctgtataaaattttccctctgaagttttaaaaagaaagactgggttgtaagaagagtataaaaaaggcttgcttctccagctctcatttctcatttcaaacttaaagaaagaaaaccagcaccaatttgaaagtgtttcaataaactctcaatgtaaaacttcacgttgttttctgtagcttttcagtaacttcttacactcatgttctatgtgcggctcagkggggaactatctgtatccagtggattgttggttctgacacactagcctacgtgcatatggggcaacccccaacatgctggcccctgccacttgcaatagatcagacccaccccttgtggttgagtgaggcagtattatgtcaattctaaacctggcattttgtttactgttgttgagtgttgttggtagtgggagaagaaaataggtcacagacagtgtgaagacacaaggagaagacagccatctacaagctaaggagagagggctgcaacagcttaattccttgtagtgttcataaagaaccaatcctgctgacagcttgatctcacatagcaaaataatacatgactttttttcctccttgatttccatgagaattgggtgaaagctattactcatataagcggatgacctgattctctcatttttgtggttacctttgattagtgttttggtctttatgcgtttcacagacctgattcaaatgctggatctctgctttattagctttgtgatcttggacatatcccttaatctagttgagccagattctcattatctgcaaaatgaggcttctagcacccctcagaattgtacaaagctctcgaaaatgtccttagcacacagaagctgtccgataaatgccaattgctttatgaatttctgtagttgtatgctgcagtaatttattttggagatcttccttatatcagtaaaagacgtttgttaaaaaacactttgtcacctgtctgacatagtatctggtggtagtaaggataagacatcattaaaaataaaaattgacaatcagagagagttaattttagcaagtacgtagattatatgcctttaatggcagctttgcagcaaagtgcaaaacataaataaatcagttaaccagatttgtgaaatacccgcagagtgttttagactttattttgaaggtgccaaattagagctaacatgcatcgcttcatgtcttcccaagaaaattacatgacaaatatctatctctgcttcactgacaacctggcagtgaaagggatttgaggtttgtgcccatcagtaactaattagagaagtaaatgttataactagtcagtattctgtggctacaatgtggcaagttaaaataatatccttaaggtgggcgctaacgcaatatgactggtatccttatgaaaaaaaaaaaaaaggacaatttggagataaacacaccgacagggtaaacaccatgtgaacatgatgatggccattcacaagcaaaggagagaggcctggaacagattcctcttagccctcaaagggaactaaccctgccgataccttgatttcagacttgtagcctctagaactgtgaaacaatacatttctgttgtataagccacccagtctatggtattttattatggcagccctagcaaaccaatacaaatcataaaacatcaattatttttaaaatctcataattttcattcttgttatatatatataaaacaaataaaaggtgactctctctaatgtataaagaagttaaagaaattgataacagaaaggccagcagtccaacagaaatgaatgagcagtttatagagaaggaaatttaaatggctcttaaatgtatgaaacggtactcaacccgactcatagtatgctaactacactgagaaatcattgtcttctaacatataggaaagtcaaccaaatgaataacacatgccattcctgtggcttcttcaggaacaaaggtcctcctaaattggtagtgtgaatatacattgatgcaatccaaaaaaaaaatccaaagttatagctgggcagggtggctcatgcctgtaatcccagcactttgggaggctgaggcagatggatcacgacgtcaggagatggagaccatcctggttaacatggtgaaaccccgtctctactaaaaaaaatacaaaaaattagctggacctagtggcacacgcctgtagtcccagctacttgagaggctgaggcaggagaatcgcttgaatccaggaggcagaggttgcagtgagcagagatcatgccactacactccagcctgggtgacagagcaagggattccatctcaaaaaaaaaagaaaaaagaaaaaaaaatccaaagttataaatgcacagtcttacatacttctcttctgggaatttattctgtaagtatatatatatatatayayayayacacacacacacacacacacacacacacacacgtgtgtgaaatgacatatatgcaaagtgattcattccagaaatgtttgtaattgtcaccacaaagctgccaatcactgagagactgattaaatgagttttggtacactcgtgccatcaaacactataaaattattaaaaaaggaaggaagatttttgtataataatatggaatgatccaaggtgtattttaaataaattaaacttaggaggccaggtgcactggctcacgcctgtaatcccaacacttttggtggttgagacaggcagatcactggagaccaggagttcaagaccagcctggccaacatggtgaaaccccactctactaaaaatacaaaaattagcgggtgtggtggtgtgtgcatgtagtccccactaccagggaggctgaggcatgagaatcacctgaactccggaggcggagattgcagtgagctgaaattgtgccactgcactccagcctgggtgacagactgagactccatctcaaaaaaaaaagaaaggaaaagaaaaaaaggaagggaagggaagggaaaggaaaggaaaggaggaaggaagggagggagggagggaggaaggaaggaaggaaggaaggaaggaaggaaggaaggaaggaaggaaggaaggaaggaaattaaacctaggaacaaagtagtttatctatctaatctatatgtatgactactatttgtcttttaaagtggagaaacgaatatgtccttgtaattataaggtgacttagctatttagagtcacatctagcatttgcatcaaggtgagtttgtctcaaaagctctgttctagtgccccactcaagaacagatattgtcaaatttgtaaaagatattttaactrgaatagacttgatttttattgctgatttaatctattacaaactattgcttttctattctaagctgttgtaaaaattattgctttaatatgatcacttaataagcattaaatgccccaatcctatctgctaaaaattgtttggcatgtttaattgatcacaaggatttgaatagcactcttatcttttcaagtatcttcaagaaattcttattttcagcagggcatgttgaggaaacataaagcttacattttttattcctgatgtcttctcatcacttccaacagtagccactgagtcaaagcagttgctctctttccttactttttctaaagctctccctctatattagctgtgtctgagattgcaggcagttaaaatccaacatttggcacactgaaaaaggggctatgtgatagggcctccaactgaaatgtgatgaattattaaacaggtagtttgttgggtgattgaaaattacctgtgaaagagtgcttatctccttgaggcacatcgaaagctgacggaattgagccaattagactgactgtctcttcaatgagttgtgacctatcaatggtaatagcttattatgatgataaatgaacccatctctcaaactgaagcctgagtacacacttcagcagttgccttgaatcatgaggccattgcctctcaacttcagatcgacagcagtgacagccacaggagcagagagcatgcatgactagacacagatgattgttttactcagatgaatatatttacagctatttccaaagaaacgggcccttcttttgcattgtgtattcgtatctgaaatagttaccatatgacgtttccttcattaggaagagaacccctccctggctgtagcattctgaaataactggattttgaaggtcttttttttttcttcactttttgtttattgtttacaatgttttaatttctcattcttgtgagtaataactcaactcctggttaagtaaaatttcagaataaaaatattgttttatagtaaagatgcttgtaatatcaaaacaagtatgtttttaaaaaattaatttcatcctattacatttcacattttatatttgatgtgggttrgaggagccccttagagattcttttttctttgtagagaagttttgtagagatcaatagtgtaagaatcatacaagtgtaaatagttttgtttccttttaatttttcaaaatatttgaaaattctttaagtagttactgaaatttggtaagttccatgtgctgctatattgatacattttgttttagaagaattaggagcaaaagggttatttttataatgaaatacaatcttccagttcctaataagtattagacacctgttagctgccaacttcccaaaaatacccctgagaaaaaaaaaaacctgttggtcaagaaagttcacgaagttattacagtaaacaagaacatcaccttgatattcttagtaatgtctcagaaggtgagggtcaggggaagatatttacaggctttagggaaaaggctggttgatttcaaggcaaatcttgagtgagagggaactggttgggattctgcagggtttattatataatagttttggatttgtcaccagagtgaacaaacattgaagaacatgttatgagtctataaggaagttagcttagatggatcacagagcagacaaggttttcttggagattgctcacagcattcttaaaatagggggtggacatttttcttactcccagcattatttagcacaggaaaggaaattgtgttagcgttagaagaaattgtgtttgctttagttcttacagacaatatatttacttaatcttctgtgacactgtttcttaatgtataaaatgaaaataatatgaatacctactttatagtgttattttgagggttaaatgagttaacacatatgcagtactcaagatggtgtctgaaaatgataagcatttggtattagctattattattaactccaactgggcttaatttgaggtcaggcattattttgttgaaattttagaaagactcccctcacacataaacagacagaaagagagagaggaagaaagaagaaaagagagagatagagagaggcagaaagagaaaaagaaagaaagagagaaagaaaaggaagagaaagaaagaaagagaaagaaagagaaagaaaggaggaaggaaagaagagagggagaaagaatggaagaaagaaagaaagaagaaagaaagaaggaaggaagagagggagaaagaaagagaaagagaaggaaagaaagaaaaaggaaggaaggaaggaaaagggagggagggagggaaggaaggagggagggaggaaggaaggaagaggaagcagggagggcaaggaaaggaaaacaatggaaagaataaagaaataaatgcagcaggaaaggaaaaagaataggaagaatttgctcatatctgtctaatttttagggtattttgatatacaaagtaactgactgtcaggacctgtcttagagatgatctggtaggacagtaaatggcttttctttccagttttcatctgggactgggtttgaagtgatcatcagcctcagtgttctggaaataagtcatttataatgaaatggaactggaaataacccacagacaaaaagctttgcaagccattgaagttcccctaggccatttactgccttaagctcgtttttactcatactgcaggaaaaaaaagagtgagtagggaggtggtgttcttatatcacataattttaaattaagatgtgatggttttatataaaagcaaaaatgctttattttgctttttttgttcaagacaagtacagggatgaaatgtaaatatgttaatatctaatcttaagtctgctcttgatccgaaactcttttgaaactttacctagaaaatgatagagcaatttaatgtgtctcacaatctagcagagatttggagggtgatggatagaataagggcttaacacaagaaataatttctgttgtacaaagctcatgagcttcatgcatggtgaaagatatttaggctaaagaaaatgttaactatgcagggaatgaaactcgtgacagcttgatcccataaaactcagcaaggatgaggtttgactctgcatccctgatttatatagtacagtatgtttatttaaaggagataagccaggttaaggggttcagcaaaactgttaaattaactcctttaaaaatctagttattgctatgaaagtctctcaagtgcggtgctcaggcttttttgcatcagtcatctggagtctttatttaaaatgtttattattggccgggcgcggtggctcacgcctgtaatcccagcactttgggaggctgaggcgggcggataacgaggtcaggagatcgagaccatcctggctaacacgatgaaatcccatctctactaaatatacataaaaattagccaggcagggtagcgggcacctgtaatcccagctactcgggaggctgaggcaggagaatgacgtgaagccgggaggtggagcttgcagtgagccgtgatcgcgccactgcactccagcccgggcgacagagcgagactccatctcaaaaaaaaaaaaaaaaaaaaaatttttactattgacccttactctggattcacttatccagaagatctggggaaatctacgtttttaatcagctccccaagtgattatttacccataagaatttggggggcactcttttatgactacttttttaaattactgatgattaattatctgcagatagttccctagactttgactttccaaggctttaaaaaaacaaacaaacaaaaaaacctgcagtatgcttttagtctgaattcagggattgactttcttatccaatagtctatcctgtacaagggaaccctaaaataacctcgttagccaccaccaaagactatgtaaatacaaatttatttatcaatctcattagaaaccgaaccacgcatgtgcacgcacacacacacacacacaccacaccaaccacacatttacattggaataaaatgaatcttagaaagcagctatttttaaagaaacaggaagtctaacatgtactgccattaatttggaatgggagagaaaggagacttggcagaaccagaatattgcgtgaggattgaagatagcttcagattctagaagagtttctagctctttctgaatatgtgttaacagtttcgctgtttgagctctgctacccactagccagttataaacacaggtaagacccttaacttcacagggcctgttgggaagaggttataattttttagcaacagaacctgtttttcaaacaaaatcctaattagaacacccaaaaacaaacaaaataaaggattcaaatgggtgacatggccagtcctggttacagtatgagacagatgccggttacggtgggcaacagaacwgatgctggctacagtggtcgacagagttcattttagttcaagcagaaggtagggctggtgcttgttacagtggccagtaggcctggtttctggttatagcacatggcagagttaggagctctacctacattatgtccccacggcctcrtctgtggtttccccataagaaaactaccttttgggaaaacatgatacaaacagatcaggtgaattagaaggtctcctgcagatttaaaattttatgaatataatgccaaatataatcttacactcagttgactactaataataaataaccctacaaaatatggtaaagtgactccatgacaacaattgaaaagaaaataattgcactcagctgagctattgtccatatctagatgcactgatgatacacaaacccagccacagaaaatgtggcatgtgtcagagcaaagcaactagaatgattcaagacactgaacagccagtgttcaagctacgtaatttcttacctatattacaggaaaaaaccatctaactctttttctacctccaacctccctcctctgaaatgttattcacatacctggtggagaagaatctttataaaactcaaatttgattaccttagtcctctgcttaaaatttcagtgtctttcaatgaaagctcagagaccattctggacttataactcccttgcagctcagaagggacccgtggtccagtaattaaaatgcccgtggtaagtgttcaatgctctctcatgcttttcttctcacaatgtcccttcagtacgggatttctttctaccattttcctgagtaattaccttctagtcatcattcaaaaagcatttaagcattgaattctataggaaatrtttctaatcaccctatcccccagctctggctgagttaggccttctctgcacaattcccatgaaagcacctaccacccagcaggcagaaatatcsctctttgactttctcactaaactgcaaattcctggtgagtgacaactggattctattcttcttctaacctctagaacctagcagattgctttggagaccttaggaacttaataattctttgttgagtgaataaagggatgctttttgtggacagcagttatttctgtttacacaaaagataagagaaaatacaggtaaaattatcctaaattttaaaaaatttgaaacttacaaaaagtgttggatttaagttcctttgtctgtctggatttccgaaatatttttaaaagattttttctgggatcatttaaggcctcatctgttcagaaccaaggggaggaccgaaatagtatgccaaattcttktccagccctcaaattttatgagcctgagttgcattgtgtgggtaaaagtcttgtgctctgtggatcagraggaagttagatgttttggatatttacatagaaacaaagaatttgaagactggaaagaacttgagcaggactctattaaatgtgttttgtgtgagatggttttcaccctgtgttcttgtggttcctccatgctaggggcaggaggtaggatggagcagatagggagtctcttttcctcttaaaccggatgttttttttaaaatcagttttatatgttgagagtccrtggaatggaatgtggaaactgagaccctgaaagattaagtcacttgaacaaagatatacagcttctccagagaccaggcagacactaggtttatgatttcctgacttccactgcagatctcttaccatttttctatgagagwcataaaaaaagaatcagctatttactttctagtcaaggtgggttaaaatcaagccacttgttttcaaacatcgatttcgggttcatgccatcaaattaaaaaattcrcttaactgagtttaatttgctttcacttaggaagcagctgcctttcaakataataaaataaacagatacaataatatttggtcagctgtggcttttaatttaaatgtttgatttaatgttgtttagtttgctggattccaaaatattctctgcaagagaagcatacacattctaaagcatttcaaatgtttattatgatgtcctagaggtggctgtctttctgttgctgtgcataccctgagcagacttgacwttgctttggaagcacatattttctgatagacatattactctcataatctaaaatttttcagaagtgacaaaagtggggttgaccattttcttcttcgctgtctccatgattttgctttttccaagatgtcatgtagttagaatcatacaatgtgttgtcttttcaggytggcttttttcacttagcaatatgcctgtaaggttccgccatgtcttttcttgccttgataattcatttctttttagctctgaatactattttgttgtctggatataaccacagttgaattatccatttacctcctgaaaaacatcctgcttgctaccatgttctggcaatatgaatcaagctgctataaacrcttatgtgataartcttgtgtggatataaatattcaacttatttgggtaaataccaaagagtgcaattactggatcatatggtcagagcatgctagttttgtaataaactgccaaactatcttccaatatggttgtataattttgcattctcaccagcaatgaacaagagttcctgtttctccacattctcaccagcatttcatattgtcaatgttttagacatcagctattctaatagrtatgtagtggtatatcgttgttttaatttgaaattctctaatgatgtaagatgatgagcatgttttcatgtgcttattttccatctgtatataagctttgctgaggtatctgtttagattttttccaatttttaaatttattttcttgttgttgagatttaagagttctttgtatgttttggaccatatcaggtatatcttttgcaaatattttcttgcaaatggtagtttctcttattctcttcacagtgtctttcacagagaagatgatttttaattttaataaaatctaaaatgaatttttatttcatggatcttgactttagtgttatatataaagagttactgcaaactcagggttatttagattttcttctatgttatcttccaagagtcatagttttgcattttatatgatccattttgaggtctatgatccattttgtgttaatttttgtgagggtctatatctgcatttatgtattttttcacaagttatctcagtcaattttctgttgctataacagaatacctgagactaggtaatttataaaggagagagttctatttagcttgtgatcctgggagcttgactaggagatccaagttaggacaggtgcatttggtcaagttctggtgagagtcttgtgctgcatcttaacatggtggagaagtggaagaaaaagtgggcatgtgcaaaatgaccaaacacaagagggagccttcctttttaacaacccaccctcgaggtagctaatccagtcctacaagagcaagaactcactctaagaaaggtattaattcctttttaaaaacctaatcacctctccaaggcaccacctctcaacatcaccccattaggaaccaaacctcactatggattttgattgtgacaaaccatattctaaccataacacaaatgatgtccagtttttctagtgccatttgttgaaaacactttcctttcttcattgaattccctttgctcctttgtgaaagatcagatggccatattcatgcgggtgtatttctgggctggctattctgttccattgatctaagtgacttttttctsaccagtactatattgtcttgataactatagttttatactaagtcttgaagttgggtagtgttagctttacaagtttgttcaatattatttaatgatgtgttggctgttcttggtctttcctctccatataaattttagaatcagtgtgttgatatccaaaaaataacttgctgggattttgactgggattaccttgaatctacacaaattgggaagaactgacatcctaccttgagtcttcctatttatggacatggaatacctctccatttatttaatttttctttgatttctttcactggagttttatagttttcctcatatagattttgtacataatttgttagatttatattgaagtgttttgtggagcatgctagtataaatggtcttgtgtttttaacttcacattccaattttctttgctaatatataggaaagcaattgacttttataccacctttttcttcagacagatggaatcaagtgacttagaaattggctttgttgctctgcctgagtatcttgaaaattctcatcttccttctgagaaccataacctacatatctcaaggttatagataaaatgctacctacaaaatccttgtaatgcttacagtctaaaagactaaataaggcctcaagagattattcaaaatcagagttgttgattcccagtagagtcataaagggctatgttatgttagctgcaattctaatcctatatcaaagcttctgacttccactcccccatatctaaggaggtttccctcaacagttgaaaaataactgcagatactgctttgccatcccatgccacaaaaatgcatttctgaaggatgctgcagagagatatatatttcttaagcccagctcatatctatttctcaaggctgtgtgatatcatagaatgaatgatggagtcaaataaataaatatttatttatttatttatcagtcaaataaatctgatttaattttttagaacttaacatttagtagctgtgagatcttacagagatttcttcaccttgtatcctttgtcactttatctataaaatggagagtgtaaatactacttcttagagttatcatgattctttaatctaataactcatgagacactggatatgtaataggaactgaataattcttaacccccttgctttcccttgacatttccagaaaataaaacttgattgagtatctaagattatataacagatcccactagactaagtgaatctgagggaagatgtatttgtcacttttcttctcttctttggtttttaaaaagtatcattagaaatagaatcagtaactataaacaaatttctgtgtactgatccagtattaacagagaaaataatggttgactgtgccttactgtgcaaggcaaaaatgagctcaagatattatcaaagtcatgaatcagaaagagaatttcgttttacaaatgatggatagccacaaaacaactaggacatacaatctctgattacacaactgcagtctatagctacattctgcagattaaacaccacagtagagatggaaactttattgtttatattttatgaaaactgttctcttttgtttttatgtcagtttgagagtagaagaatatccttgagggcaaaacatgcctttcatacattagagctgcctagagcatagtctggcacattatataaatattaaataattcctataattaaactgatgttctttggaatgaggatggagacacatagttatctgaattgccttaagctagttttgcaataagtagatttttactattctagaatatgtaatgaatgaatcatgctatgttacaagtaagtattaattaatggttgaagtacaaaaacatcttccttgaattatatgataatctacatcacagtgaaaggaatttatcatgacaaatgctagtcaatgttgaatcacagagggctatatgagatccattttcattcttaaagaaaattattatatctttttattaatatggtgratattwactcagtaaataataaagaaaactaatatgaagtrcaatttgtaatattctayttatgatgcatgatttttgttgcacaattagaaaatacttaagttcttgagaatagttggaaagggttgtaatgatcagaaacacatattatacctaaacatgtattaagaccttgttttaaaaattagatcttggagcaagaaggtaagctgtatcattacgttcttagaatacagggttgggcgtgggggctcatgcctgtaatcccagcattttgggaggctgaggcgggtggatcacgaggtcaggagatcaagaccatcctggccaacatgacgaaaccctgtctgtactaaaaatacaaaaattacctgggtatggtggcgtgtgcctgtaatcccagctacttgggaggctgaggcaggagaatcgcttgaacccaggaggcggaggttgcagtgagctgagatcgtgcctctgcactccagcctggtgacagagcgagactccatctcaaaaaaawaawwaataataataataagggtaaatacaaggagtgtgttttgaatacaaaatatctatttttagaatctcaaacccatgagttactttcttccatatataagtcccaacatgttttctataatcagtctatgtctattagatgtgtaattatattaattatgtaaatgcacrtgaataccaaattatttggttaatcttcgaatttcttttagcaattatatactctcctccaggttagattgagctttcccttcaactcagagaaatcagtgtcaacaggctaccttctgtaagactaccagagagctatgcattactctgtacaaaggatatttctcctataaatagtgctttcaatagagaaaatctgttatcatgttgtcagtaaattcaaatattttctcttttggaatactctgttcctattaaaacaagagctgtttccttctttgaaacaagttatttatatttatgtggttaagatatcctatcttaaaccataagacctttttgaatacttcacatacagaaaaatgaaaaaaattaaacaaatatcagagttgctgggaaccccaggatataatctactgtggatagtcattcatagacaaagacacctcctatttataggcttgggacagttcagcttctccaacttgaagagagttttgaagatcaaatacaaatgggtcttgtgaagtttcaaaaaatgtttctcaaagtcctttgagaaaaataaacttgggcctgtagccaatagtttgtattccaggcttttaaaaaaaattcaaatacagaaacatcagattttcattgccataggggtcatgacatmttttaacataagtgcagaaactatctgtaatgaatcaaaacttaaatcagatgacattaagaccagctttgctattaccacagatggcatcacaattaacttttaatatatcaaaaatgtgagtgtactcatatattatcagtcatttgatcatgatattccaacattaacatctcagtgtattgtgaaaatgattcatttgtacaatatttttcttcttctagacttttaatttcttgaaggaaggaacgcattttactcatcttgtagtgaccctccctgtacatgttgcctgagacataataactattcaaaaatgtttacagtattcaatgaaattatataaatcttggtttaaaaagcttgatatacaatgaaacatacttgggcaaattataaagctgttcctgagaatgagctaatacatatttagttgttaaaattctgaggggaaaatgtaaattagatgtgaactacctctacaatataagatagcagtaggctgtaagttaaaataatcatttttctcatttttcagtaacattcattaaatgcctgatacaattctgtactttctgaaaattgactataataaagaaatcctggccattataaaattgtcatccactcataggtagaataaatgagagaattatggtgatctaaatatagaaagcatttaaattagagaacagctgaaattgtgcttctaaaacatttcagtgttgytcattttctatatgttayattgaaaaaagtaatatggaaatgtaatgttttcatttgcagatgcttaaatttagatacatgtttaatactgtaatcattttgatcaaacagcagctatyatttattattcaatatttatatgtaaaacctgaaactttcatctaccttaatgatggtattgtgataaaagtacccatgtatcaccaagmtttgccaattctttttattccttaaagaatatcygacaatttgctggtttgtataagtttgagttaagacaccgtaataatgtcctgcagtatatatgtcaaaatacatgggtcaaaaagacactctaaaatagcagtctccaagaacccaggaagtatgtgatccataggagtgtacatattttattttctttaaaaaataagacagacacttctcaaaagaagacatttatrcagccaaaaaacacatgaaaaaatgctcaccatcactggccatcagagaaatgcaaatcaaaaccacaatgagataccatctcacaccarttagaatggcagtcattaaaaagtcaggaaacaacagatgctggagaggatgtggagaaataggaacacttttacactgttggtgggactgtaaactagttyaaccattgtggaagtcagtgtggtgattcctcagggatctagaacttgaaataccatttgacccagccatcccattactgggtatgtacccaaaggactataaatcatgctgctataaagacacatgcacacgtatgtttattgtggcactattcacaatagcaaagacttggaaccaacccaaatgtccaacaatgatagactggattaagaamatgtggcacatatacaccatggaatactatgcagccataaaaaatgatgagttcatgtcctttgtagggacatggatgaaattggaaatcatcattctcagtaaactatcacaaggacaaaaaamcaaacaccrcatgttctcactcataggtgggaattgaacaatgagaacacatggacacaggaaggggaacatcacactctggggactgttgtggggtgggggggaggggggagagatagcattaggagatgctaaatgacgagttaatgggtgcagcacaccagcatggcacatgtatacatatgtaactaactggcacatggtgcacatgtaccctaaaacttaaagtataataataataaaataaaaataaaataaaataagaccattaaaaaaaagttcatcgtatggattgacactgggctgctccctggtggagtaccagctcaagatgttttgaggaaaaaatttgcatttaccaagtgggaggatttatagtggtgatttcacttgttcattgatttagacatatgaaatattatattttttgcacaactaagttggctttcagattatatgaccatatttttaactaaatgaagctttgctgaataaatacatgacttaatatattccttcaaaaaacatatagtgaaataatattaactacacaaagataagcaatgagcaaaaaaacactagtgcttaccactgctcttggtaagagctttccttcaggcacaaaatgagataaaagtaatgacaaggtaaaactggatgaaaattggtcaacaagtgaggaattaactgccttgcaaaagcagtttttattatacrgaaaccattttgaaagcagttattcagaaagtttctatcagtatatgatttgtagctcaaattattgttggtctatcaatcacaaatactattttctgcataatatagctagaaaatataattatctaacttatttttaaagtcttctaaacatgaagtttcagtgagctttgaagctttttgttaaatatgttaaaatgtcatactttccaaatagtttccaattataaccaattagcatcagaaaatttattagccaaatttcaccaagaacctaatttgtgagagaattgaaaaatgagtaccataatttagtatgctcagccactgatgtaatgcttataatgggacctgtgtattttttgtctgtgctgtatctcttttcagctgtgaaaactattattactaagtattaaaacaaactgagggcaaggcacggtggctcatgcccgtattcccagcactgtgggaggccgaggmgggtggatcacttcagatcaggagttcaagaccagccttgccaacgcggtgaaaccctgtctctactaaaaatacaaaaattagccgggcatggtggcacatgcctgtaatcccagctactcgtgaggctgaggcaggagaatcgcttgaacctgggagacaagaggttgcagtgagccaagatcrcaccactgcactccagcctgggagacagagcaagactccatctcaaaaaaaaaaaataaaaattaaaaaaaaagcctgaacctagaaacggacctacaaatgtcaatacttagtaatatttttaattattaagccaagatttccaaaaataagaaaagcataattgattatactggtttctttttttttttttttcatttggaacatataattgagaaagctttagtatcaagcatatgtaaagactcataaaataataaggaaaggccaaactgcctgatagaccaaaaaaaaaaaaatcaacaataaacattttacagaggagaaacagagaaacatatacagctaaaaacatatggaaggatcttgagtcttatagcaatattgatgagcaaatcaatatgtagaatagcaaatcagtatcattatcaaagagataatggatatctctttatactcaatttattggcaataattaagaatttaaactacagaaatattgaaaagtatttgaatcaaccagatttcttatatagtgctaatataaattggttaaccacttgacattatcttttaaagtttaatattcacacaccctatgacccaacaattttctagatgtatatactaaaggaaattattacatttgtgcacccagataaacacataaaagtgttcataaaagtactgtttatattaagaagagccgacagcagatgcctatccagaggtaaacaaattgtaatatatctggaataacttgttgcaatgaaaataaatgaactacaggtatacgtgataatatgatgcttagtgataggttctcagatgatcacagcatgatggtctttataagcaataacatttttgagcaaacatatatttgctgaaattatctttttaaaaatgtaagaaaataatataaacacaaaattcagcatgtcagggttatgctgcagggtaacggggtggtgaggattgtatagatagttgcaaacattgctcatgttcaacttcttgggttgggtagttggcttttatcactaacaaagtaataagccagggaatacaatgggtaaatgaaaaaataaaatagagtcacgattagaccaatgatgatagtatatcataaatcaagtcttctcatctttaaaatggaattagtaggagtacttagcttcctagggttgttatgaaggttgaaattcttagaataatgcctggtacatagcatttttttttttaagttaagttctagggtacatgtgcacaatgtgcaggtttgttatgtatgtgtacatgtgccatgttggtgtgctgcatccattaactcgttatttacgttaggtatatctcctaatgctatccctcccccctccccccaccctacgacaggccccggtgtgtgatgttccccttcctgtgtccaagtgttttcattgttcagttcccacctatgagtgagaatatgcgatgtttagtttgttgtccttgtgatagtttgctgagaatgatggtttctagcttcatccatgtccctacaaaggacgtgaactcatccttttttatggctgcatagtattccatggtgtatacatgccacattttcttaatccagtctatcattgatggacatttgggttggttccaagtctttgctattatgaatagtgccgcaataaacatacatgtgcatgtgtctttatagcagcatgatttataatcctttgggtatatacccagtaatgggatgactgggtcaaatggtatttctagttctagatccttgaggaatcgccccactgtcttccacaatggttgaactagtttacaatcccaccaacagtgtaaaagtgttcctatttctccacatcctctccagcacctgttgtttccagactttttaatgatcaccagtctaactggtgtaggatggtatctcattgtggttttgatttgcatttctctgatggccagtgatgatgagcattttttcatgtgtctgctggctgcatcagtgtcttcttttgagaagtgtctgttcatatcctttgcccaattttgatggggttatttgtttttttcttgtaagtttgtttgagttctttgtagattctggatattagccctttgtcagatgagtagattgcaaaaatcttctcccattctgtaggttgccwgttcactctgatggtagtttcttttgctgtgcagaagctctttagtttaattagatcccatttgtcaactttggcttttgttgcccttgcttttcgtgttttagacaaaaagtccttacccatgcctatgtcctcaatggtattgcctaggttttcttctagggtttttatggttttatgtctaacatttaagtctttaatccatcttgaattaatttttgtataaggtgtaaggaagggatccagtttcagctttctacatatggctagccagttttcccagcaccatttattaaatagggaatccattccccattgcttgtttttgtcaggtttgtcaaagatcagatggttgtagatgtgtggtattatttctgagggctctwttctgttccattgatctayatctctcttttggtaccagtaccatgctgttttggttactgtagccttgtagtatagtttgaagtcaggtagcatgatgcctccagctttgttcttttggcttaggattgacttgggaatgtgggctcttttttggttccatatgaactttaaagtagttttttttccaattctgtgaagaaagtcactggtagcttgatagggatggcattgaatctatgaattaccttgggcagtatggccattttcacgatattgattcttcctatccataagcatggaatgttcttccatttgtttgtgtcctcttttattttgttgagcagtaatttgcagttctccttgaagaggtccttcacatcccttgtaagttggattcctaggtattttattctctttgaagcaattgtgaataggagttcactcatgatttggctctctgattgtctgttgttagtgtataagaatgcttgtgatttttctacattgattttgtatcctgagactttggtgaagttgcttatcagctttaggagattttgggctgagacaatggggttttctaaatatacaattatgtcatctgcaaacagggacaatttgactacctcttttcctaattaaatacccttcattactttctcctgcctgattgccctggccagaacttccaacactatgttgaataggagtggtgagagagggcatccctgtcttgtgccagttttcaaagggaatgcttccagtttttgcccattcagtatgatattggctgtgggtttgtcatagatagctcttattattttgagatacatcccatcaatacctaatttattgagagtttttggcatgaagggctgttgaattttgtcaaaggccttttctgcatttattgagataatcatgtggtttttgtttatatgctggattacgtttattgatttgtgtatgttgaaccagccttgcatcccrkggatgaagcccacttgatcgtggtggataagctttttgatgtgctgctgcattcagtttgccattattttattgaggatttttgcattgatgttcatcagggatattagtcaaaaattctcttttttgttgtgtctctgccaggcttttgtatcaggaggatgctggcctcatcaaatgagttagagaggattccctctttttctattgattggaatagtttcagaaggaatggtaccacctcctccttgtacctctggtagaattcggctgtgaatccatctggtcctggactttttttggttggtaggctattaattattgcctcaatttcagagcctgttattggtctattcagagattcaacttcttccttgtttagtattgggagggtgtatgtgtccaggaatctatccatttcttcaagattttctagttwatttgcatagaggtgtttatagtattctctgatggtagtttgtatttctgtgggatcggtggtgatatcccctttatcattttttattgcatctatttsattcttctctcttttcttctttattagtcttgctagcagtctatcaattttgttgatcttttcaaaaaatcatctcctggattcactgatttgttgaagggttttttgtgactctatctccttcagttctgctctgatcttagttatttcttgccttctgctagcttttgartgtgtttgctcttgcttctctagttcttttaattgtgatgttagggtgtcaattttggatctttcctgctttctcttgtgggcatttagtgctataaatttccctctacacactgctttaaatgtgtcccagagattctggtatgttgtatctttgttctcattagtttcaaagaacatctttattccagmcttcatttcgttatatacccagtagtcattcaggaacaggttgttcagtttccatgtagttgagccgttttcagtgagtttcttaatcctgagttctagtttgattgcactgtggtctgagagacagtttgttataatttctgatcttttacatttgctgaggagtgctttacttccaactatgtggtcaattttggaataagtgtgatgtggtgctgagcagaatgtatattctgttgatttggggtggagagttctgcaaatgtctattaggtccacttggtgcagagctgagttcaattcctggatatccttgttacctttctgtctcgttgatctgtctaatgttgacagtggggtgttaaagtctcccattattattgtgtgggagtctaagtctctttgtaggtctctaaggacttgctttatgaatctgagtgctcctgtattgggtgcatatatatttaggatagttagctcttcttgttgaattgatccctttaccattatgtaatggccttctttgtctcttttgatctttgttggtttaatgtctgttttatcagagactaggtttgcaacccctgcctttttttgttttctatttscttggtagatcttcctccatccctttattttgagcctgtgtgtgtctctgcacatgagatgggtctcttgaatacagcacactgatgggtcttgagtctttatccaatttgccagtctgtgtcttttaattrgagcatttagcccatttacrtttaaggttaatattatgtgtgaatrtgatcctgtcatkatgatgttagctggttattttgctcgttagttgtttcagtttcttcctagcatcgatggtctttacaatttggcatgtttttgcagtggctggtactggttgttcctttccatgtttagcrcttccttcaggagctcttttagggcaggcctggtggtgacaaaatctctcagcatttgcttgtctgtaaagtattttatttctccttcacttatgaagcttagtttggctggatatgaaattctgggttgaaaattcttttctttaagaatgttgaatattggcccccactctcttcyggcttgtagagtttctgccgagcgatctgctgttagtctgatgggcttccctttgagggtaamccgacctttctctctggctgcccttaacattttttccttcatttcaactttggtgaatctgacaattatgtgtcttgaagttgctcttctcgaggagtatctttgtggcattctctgtgtttcctgaatttgaatgttggcctgccttgctaggttggggaagttctcctggataatatcctgcagaatgttttccaacttggttccattctccccgccactttcatgtacccaatcaggcatagatttggtcttttcacatagtcccatatttcttggaggctttgttcgtttccttttactcttttttctctaaacttctcttctcacttcatttcattcatttgatcttcaatcactgataccctttcttccagttgatcgaatcagctcctgaggcttgtgcatttgtcaggtacttctcgtgccatagttttcagctccatcargtcatttaaggacttctctacactggttattctaggtagccatttgtcctatcttttttcaaggtttttagcttctttgtgatgggttcgaacttcctcctttagctcagagaagtttgatcgtctgaagccttcttctctcaactcctcaaagtcattctccatccagctttgttccattgctggcaaggarcttcattcctttggaggaggagaggcgctctgatttttagagttttcagcttctctgctctgttttttccccatctttgtggttttatctacctttggtctttgatgatgatgtacggatggggttttggtgtgggtgtcctttctatttgttagttttccttcttacagtcaggaccctcagctgcaggtctgttggagtttgctggaggtccactccagaccctgtttgcctgggtatcagcagcggaggctgcagaacagcagatattgctgaacagcaaatgttgccgcctgatcgttcctctggaagcttcrtctcagaggggtactcggccgtgtgggatgtcagtctgcccctactgggtggtgcctcacagttaggctattcagggctcagggatccacttgaggaggcagtctgttcattctcagatctcaaactccatgctgggagaaccactactctcttcaaagctgtcagacagggacatttaagtctgcagaggtttctgctgtcttttgttcggctatgtcctactcccagaggtggagtctacagaggcaggcaggcatccttgagctgcagtgggcttcacccagttcaagcttcccagccacagtttgtttgcctactcaagcctcggcaatggcgggcgcccctctcccaaccttgctgccaccttgcagttcagtctcagactgctgggctagcaatgaacaaggctccgtaggcatgggaccctccgagccaggtgtgggatataatctccyggtgtgccgtttgctaagaccattggaaaagcgtggtattagggtgggagtgacscgattttccaggtgccgtctgtcacagcttcccttggctaggaaagggaatttcctgaccccttgtgcttcccgggtgaggtgatgcctcgccctgctttggctgacacttgatgggctgcaaccactgtcctgcacccactgtcagacaagccccagtgaggtgamcctggtacctcaattggaaatgtggaartcacccatattctgtgtcgctcatgctgggagctgtagactggagctgttcctattcsaattatactggtttctaaaaaagattgtaatatattgttgagagtgaagggagttttatatcaataattaaattattttaaaatattgtttatttcatttctcatacttcaaattacttatttacattttaataatatattagtatcataacacatgtgtataatacagctagaaagagagagcatatataccctgaaggcatttttaattataatattgtaaaaccaaactctaaagactcctgttctaggtaattgattagtccagtaaatgtaggcataagaaaaatgtatgaaatagatgacgttaatctttcatgcacaataacacctttctccagctgtggctctaactgtcctgatggattctttactgctctcagctaatccattatatggttttagacatccaggatagacactgaaaggaataactattacaaaagtaattttaagrggagcatttgattgactgatgctcctcttatgtattcattgtgtgtatgtattgaatttgtgtattcattgtatgtattcaatattcaatgtatgtattcattgatcctgcatatacttgatgatttgattggtggtttgattccagttatattaacttgccagaaactttctagtttccaaacagtgaatacaacttagacctcatgamgcttacattctagttagaagagagaatattaattagataagcacataaaatatacatgtgttagatagtgataaatgacaagaaaaaaagtagagcatggagggcctaggaaggatgatagtggttgaatagactttaattttatatagaatattaggtcagagatctgaaggtgactaggaaaaarttatgtgggtatctggagcaagagcatcttaggacaaagagaaagtaagtgaaaaggccctaagatatgaatgtggctggcatgttcaaagaccctcaaggatggggtaagagtggggaagagttgaaggatatggggaaggggaaaatatcgtaggyctttggcacactgtagttaatgtcttcacatttttcttgcaatgcaatgagaaacacagacatgtaatgatctgagttatgttttaatagggttagtatgattgttactttgagagttggttgaatgaggacaaacagatagaccagttaagagacttggcattcatccagtcattagctgtgaagtctggaccacagtgataatggtgaaaatgatcaagtgtggtttgattccagatacattttgaaggtaatgctgaaaagatatgctaatagtttggctgtggaacatgaaagaaagaggagttgaggattatttcccaactatggacctgagcaactaaaagacttgtcattgatttagatggggaagactgtggtaaaaacaaattttttacrggagatcatgaactcagcttagctaattatataaagttagagatgcctattatatatcgaggtgtaaatgttaaagtgatagctagtatacaagtctgaagttcattkggtcaggaacatctgaactgaagatgtaaaatgtttgaatcatcaatccatatgtcatttaaaccagaagactagatgtgataaccaagaaaatgaataacgagacaaartatgagatctaaggattgggccctatagcaccccaacatttagaggttaggaaactgaggacgaactagaaaggagactaagaatcagtgaccaaaaaagtagaaggaaaaccacagaagtcatgtattgaaagtcatttgaatgaatcaagtgatcaactttgtcagatactgttgatgggccaaataaggtaagaaatgagaattgaccattggatatagcaatgcattcgaccaatgaccttgagaagagtatttcagtggaatgaagggcaacatggaaactagagtggatttaagagagaataagaagaaagaatatggagatagcaagtgtagacttgtctttttctagaaagaaaataagggcatagatacttttatgggatgtggaatggtgctgggacatgtggaagtctcttctattggtctgtatattcttagaaaatagaaaataattgagtatgagaacatgggaggaaaatgctgaagattcaaggagaaaagagaaagtatgaaaaagtatccaggaacatagcaaagaacatggaccagacagcattagggatctatgtgagtttagtaatcatgaatttgaagcaaggtcagtcaacaggtactatgagtttcttcagatgtatccagctcagcagttgcaggtacagagaagatagaggttagatttaactgacgttgtggttaagccaagtgaatacagtaaaactagagattaaaataattgaccatggaatctaagacagtgatgagaaaccctcaagctacagcgatttcccattgtctccctaaatgctattrgtactgtagccaagacaagtctttcttttataggactatacaaggccttagaggatatttagtatccttggcctaaaggataaaggtaaagtggtacagtacacatttagtgtgctgtacactaaatatcagtagcactttgccacaaattaaaggaacagtatataatccttgacagtgctttaactccattgcatttccttcttttttagaatggaatttttttctatatgttccccaaagcaaggctagtttatataacattaaattacttatgcaaatgcaaaaattaatctgaacatctatttattatatctagcacaaaacatagaaacaaagaaggcataggttattattttgaaattatgctttactgaacacataggaattgctaccaatcgtttaaatagttgccttatttcttagacaaatagtaactgaaatgtatggagcattcatgcatatatttggaatgtattaagtgttcatgtgtatacctggcgcagagttaattgttttgcctgcattatctgatttgattttcccacagtgccatgaagtatgaattatcattatcactattatatagtaaacagtataaaaatgtgtctatgacttggagaatggaaaaatgttttacaatattacattctggttgttcacttcccttccattcatgttgacattgaattgttctaggctgctaaggcagcactgtcagaagccacgttttttctaggcatacacacactttattcctttgtcctttagttccttaaactacccatgcactttcctcctctttctttttacattgatgattaaaatagtgagcctgaatttttttaaataaaaaccaactaagttttttattatttattatttggaggaacatatgccctccaaaatatcatttagtgcatcttagacataaaacaatttaactgcttgaagaaaatgtccagcttctgaaatggcatgccattagatattagtgacatttgtttataaacaaataaatgtcttcaacctctatgtagttactatcaatatagccatgcaatatatatggagttccaaatacctttcaaaaagtaatgttgatacagtagtgatcacttatgtccttttgattgaaactgcattatacgaagttctttcctttcagcacaataacctgaaaaatatagctgtctatttaaagaagacattttcttgtttggcagaatattatcatcatacagcatatgtacaatatggtcctaatttgtgtcratatgtgctaggcttagaaaactcactttaagttttactaaatttattttggagtttaactcttacttttgacatgatttatattctaaggagatctcagcttcttcctgcttaaatgacattacatagatagaaaggtatatattcttattatagcagtgtctgccagggctgcagtcctgttgttagaaggctgtcagaattttaaatgtaagccttcctttcccagrtgttatwatttaatcttctaactcctattaatttctgaagactgtggggccatcctatatcttagaacaaaatatagatacgtacattcctgatttttttctccatatttaccttcccccaaatgttttaattttattatttcaaaattataataatagcaatggatttcaaattaaaattctggctagtgaatccctcaggtatttctttatattgactgatttgtatgttgtaggctaaataatgccctcctccaagatacccatagctgaatttccagaacctgtaaatatgttccctcttacatggcaaaagggactttgcaaatgtgactaagtttaagaaccttaaggtgggaagatgatcctgcgttatccaggtggaccgaatccagtcacatgagaccttaaaagtagaagagggggtcagagtgatgaaacaatggaagaagaggaaggagaagtttgaagcatgaaaaatatttcattcatcattkctggctttaaagatggagagtcccttgaaccaaggaatgtgaatgacctctagaacctggaaaagagcattggctgacaaacagcaaggaaatgggaacctcagttccacaaccacaagaaatgaattctgccaacaacctgaatgaacaaggagatagattctcctctagagccaccagaaaggaatgtatccatgccgacaccatcattttagtcattttagctaaaggagacccatattggaatattcgcctacagaactgtattccaacaaggatgcatatgttggaatattcacctacagaaccatgagataatatatttgtgttgctttcaattgctaagtttgttacggtagcaataggaaactaatgcaatgtacagttgacccttgcacaatgcagggattagggatgctgacctctacacagttgaaaatttgtttataatttttagctccctaaaaacataactactaagagtctactgttgaacagaagccttactgataacataagcaatttattaacatattttgtatttcatatgtatatatgctgtattcttataataaagtgtgttagagagaaaagaaaatactaagaaaatcataaggaagataaaatatatttktgttaatcaagtgaaagttgatcatcttaaaggtcttcatctgcatcatcttcatgttgaaaaggctaaggaggaggaagaagaggaggggttggtcttgctgtctcaggggaggcagagacagaagaaaatccgcgtataaatggaccggacttgcacagttcaaacctgtgttgttcaggtgtcaactgtatatgaaggctttcttctttaaacagaaaggaagtattttgtgcccaagatttggagaaagcaatgggataaaaatatcatagagattttatggtatttgtcctttttttccttttccccttcactaagggtcttgaaaaactggtctgaaactccgctccagtagagcaaaaagaagaactgaaagttaagaagatatttttgtgaaaaatgttgtgagacaaattttgacacagggttgaggaactctttttttccgcatctgaccaagggcaggcttgatatcctgaaggttaagagcggctttgcctgaagcaaagttctcactatgggaagttgcagccgagtagtgaagagttatcttgatgggaggccggaacaaatttgctttggagacgtaaagggaactaagaactattcttactggactccaatatgagactttatttctatccattggtttgcaaggcctggagatatatgcattagataaaaagactgtatttgtaattagaaaagcctccagtaattaatgtccaaatatgcaaccaatttaaatgatgtctacataataccacacatagatgaaaatccaaaaagtcaaacattcattataataattcttccaatctagttgttgttatatagaagcccctcagagggcaccccattttgctgaatttcttgagttttttacttatatcacagaatcaggatgttcaaagtataacaaagatgagaagtaagttgaaaaaagaattattagtgatatttcttctaccatatacatgttatcttggaattggaattttttcrtaataagaaatccattagcataaatacagtttaaattgaataagtaaatttcattaaaaacaaaatatttatttgggggtacattttataaatagctgcaaaatcaaaactgcatttttgaaatgtaagccatattgatgctagtaagtcaatatgctcattatcaattgtgtatgtacttttatgttatttagaaaatttaattacacgtacggtgtttcaagtattcaatagataaaccacctaggaatataacagggggcataaaacatattatcgactctgtgtctttatgaaactagataaagcaaagaaaaatctgtcaattactcagccagtttcatcttagtagcctactgtaaattgaggtctatgtttttgagtgaatgaaatctartaaattaagttcaccaggtcttattctagtttattttagatggaaatgtatgatttttaaaagtgggagtaaaatcttacacatatttctgaaatgttaagaagataattttataattcaaacctgtacaagaacttagtttgcctatctgagcaaattttacattcactagtgaatgcccatgtgaaagacaagcaggaaacttccaggggccaaggggcttagaaccaactgaactggtacaaaataaacattaggtatttcagtacgtagagtttgtggacaaaaagaataggctcttaccaattactatgctactagaatatccaattttgcttttaccaagccttagtgaaaagtgaatgaattctaacaagaagactcaaagacactggtgctccccctgtgtctcccttcacttattctrcatggtcagcacctcttcaaaagaccaataataatggtcccctacaagaagtatacaattgctcctctgatgtgaaagcatatgaagaaaataagtgtccaaagctgcataaatatttgcacccctttgagagtatgagaargtgtgtgttttatgttgtgattgataggacaactttcatggcccactttgaactcttagcaggaactttggaatgtcctgagggtctgtctgcctttgtatggcaggaactctgttttcttagaaaatagtaaagaacagtttgtactcctttgttctaaagggtacctatagtttatgggaattggggaacttagtagaaaaatcaccaacgctctcatgtttctcataaaaaatgctcagctttatttggaaactttggccattgttttctttttcttctttcttcttctccttcctcttttgrgttaaaaaggccacagtctgacctacttatatgtgtgatgaaatgtgcagactctgccaaggctatttattctaatgatttatctactcaagataaaaagaaataaagtgaagacaaatctgaaatactgtgcaatgtacttacttgaaagcagtaagttctcatgttagaaaatttccctattaagcaagaaatcttgaacacttcattaaagtcatatgatctgatttttattatcatttaagtcagggaattttagaactaaatgtgtcaattataaaactgtacatatgtatagcctccaaaatgtgttaaacattagttcatatgaatctcaaaatactgtaacacagtaaaatgagcaagaaaatttttgaaatttgcacagtagagacgatgctgttaatgttcaccgaggtaaataatttgtccaaagttctatttctgtgagatactcaactgagacataatctcagcttttttcactttcatattctatattttggttttcattttgttcttaagaaacaagtatttttaaaatgaaacatctggtttcggcagtgctggctaatgctcagaactcccttcccttgttttcttcaatgtcacccttctataaaaacctctgaatatctgaatacgttttaagagcaccccttataaaacactttttgctttgttatgtttcattttgcaggtgccaaagtcacaaatatttcacctcattcagatattccaggtagtaaggctgatatttttatgagtcatttcatctgacaaaattaatttaagaataaataacattgaaatagtaagtagcatgtattttggacttaactcttattttccctatttctattcttccatgttttaatagattaatatatactcatgtgtatatatgtacatgcacactcacacacatataagtatatatatatttatttttcctcatcttatacaagtggaaacatactatacacattataagagcacagtataatttttatgtaatataatttgaagttaattccatattggatagtttcttcattatatgtgtaagtatatgtaatatatcatatgtatctatgattgtgtatttcattgaatgaatgcactcaaacgtgttcagcaatcagcacagaggttaaacattgactctagtactagactgtgaaggttcaaatcctgctttcaccacctgccatctttgtaaccttgaacaagttatgtaagtactcaatgcttcaattccctcatctttaaaatcaatgtaacagttataagattcttaccacataaggttgtgtgtggtgttttgagaatgtaatgaatgaacatatccaaagccacattgtagagtgcttagcacttgcaaagcataatgtcagtgtgagttgtcatttccatcatcatttttaacatgtttaattgcaacccctattgatggacgtacggacattttcaatattttttactacaaacgttgttatacattgtttttctgttgttgttgttgttgttgttggagatggagtcttgctctatcacccaggctggagtgcagtggtgtgatctcggctcactgcaacctccacctcccgggttcaagtgattctctgcctcagcctcccgagtagctgggattacaggtgcttgccaccatgcccagctaatttttgtatttttagtagagacagggtttcaccatcttggccaggctggtcttgaactcctgaactcatgagtcacccttctcagcctcccaaagtgctgggattgcaagcgtgtttcagtgaatagccatgtgcccagctgtttctcacatgcacccttataactgtgggataaatctctgaaggtgaaactgctatgtcaaagtatatatgcatttataattttaacagatattgccaaattgaacccatatattttagacatgctaccaccaatgcatgagagtacttgtttccctaaacccctctctaatagagtatattatcaaacttttgggtctttggcaatccaatgggtgaaaaatgacattttgggctgggtgtggtggctcacgcctgtaatctcaccactttgggaggctgaggcaggcgaatccctgaggccatgagttcgagacctgcctggccaacatggtgaaaccctgtgtttactaaaaatacaaaaaaaaaaaaaaaagccaggcatggtggtgcacacctataattccagctacttgggaggctgaggcatgagaatcacttaattgcttgaacctgggagacagaggttgcagtgagccaagatagtgccattgcactccagactgggcaacagagcaagactccatctcaaaaaaaaaaaaaggaagagagacaattatatttttttccacacaagcatttaaaatctaattcaaaaatctattctgaacttactgaatcccaagaataattaggagaggaaaagaaataatgtttaaataaattctatctgcctgttactatagaacatgaagaatgggttctgtgttcctcttatgaatttctttttaaaacccttcaaagtaggtattttcatgcccttttagacataacataacgtataattcagagttgaattaattttcccaaaatcacacagcaaatatatagactacaattagaaagtgggtaagtctcattcttaaacatatacttttgcattatagtcacatgaaaccactgagcgtgttcatgtgtgtgtgtgtgtgtgtkwgagagagagagagagagagagaaagcccaagagtgagagtttgtcttgaggagaagtgtttaaaaggaatatataaatcaaggatgcactatagtatcaccaaagtaacagtgtgaacttgaacaatttaacctcttagagccacgattgctccatctatacaatagaataataataataaacctacattatacaatttccggagattaaatgaggataaagagtacttttgaaattctaaagttccatgaaaatgttagctttgattacatatggttcagcaattgggtctccttattttttgagatctaccttttttttttgtattatctgtagcttgctaaaataacataccagatgtttttgttttcaaattttaaaaatccagatcatactgatttgttgccatggtatagtagtcagagaatcttgctctgggcagttacaatattttggagattgttttacataatagcaacwataacaggaacaatgataactgctaacttgtttacatttacaaaatgtcaaatactattctagattattcaattgaatcatcacaacaacgctatgaggtagttactgttatattgttttgatttccctgatggagacttgacacaaagagagactaagtaattcactcctgtcacacacagctwaaaagtggcagagctgagtgttttgccccaggtagtccagttctagaactgtactcttttccactatgctataccatcttcctaatactatctgtacaagaaattttctcctaatgaaatgtattgctgtaccctatataagctttagctctaaaattgcagagcaggaagcaggtggataaagctaattgctattctattaccctacaatagaaatttcagtggactaactctaatatttaaataacccactgttaataaactggcatggtgcaattgcatgtttcccagtgagatcagatctagtccaatgtctcagcagatataggaattccttttctatcaccccagacaggtggatctctactcatgtatcttcagagaaatggataccctacaaagcagcacattccattttcaacagctctagatattattttatttatttattttagatgaagttctgctgtgttgtccaagctggtctcaaacccctgggctcaagcaatcctcctgcctcagcctcccaagtagctggaattatagttgtgtgccactgcatctagctccagattttagaagttaattcttacacagggttttctggagggacagaactaataggattgatgtatatatgaaggggagtttgttaggagaattggctcacatgatcacaagrtgaagtcccacaataggccatctgcaagctgagtagcaagaaagccagttcgattcccagaacctcaaaattagggaagccagcggtgcagccttcagtctgtggccgaaggcccgagagcccgtggcaaattactggtgtaagtgcaagggtccaaaagctgaaaaacttggaatctgatgttcaagggcaggaagcatccggcataggagaaagatgaagactagaagactgcgcaattctagaccttccacgttctcctgcctgctttatcctagccacgctggcagctgattaaatggtgcctacccagaatgagggtggttctgtctttcccagccctctgactcaaatgttaatctcctttggcaacaccctcacagacacactcaggtacartactttgcatacttcartcaagtagacagtcaatattaatcaccacattctccaacgctttctcatacaggttctatttctccactatgaacagtgagattttttttctggtatacttgataggccttcaaatgttccaagaaaacaatcatgcttttcctaagtcttctctttttaaatactcccattacctttccaaaccttttgttcagctgttgggaccatcaacatcctggtcacacctctatggatgaagtctaatttgtcarctactctcttaaatggtggtgtcatgaattgatcacagtgctctggatgtgctctgactagctatgactgctcctggatcgccgtttcctttaatctatacactatgtgtcttcctaatacagagagtatgttgtttgcctatatatcataacaaattgaaaatgcatttataacttayaaagtatatattactaggtgctagaatttacactattatcctaatatacagaagctgggaaaagtaatgccatagagttgatttatgtgtgtaaatgtctaagtgacttaaatattgatttttctccttcaactgcagatcaaacttcccaaacactaaagcttccttattttaaaacaaatgcatttgtggttcaccagtctgcagtacagtaagctttttataggtaagctcaaatcacagaaaagctcaaatagatacatctcctttagcctatttttaggactgataaagctaagaacagagaaaccaataaagacatattttaatgatggcagggtatctcatggggtagtacaaatttatcccagttttttatgccttctctatgtgtaatacattgaagtgatatatggtgttgaatgtgattaaaattcagcagatacttatgcaagatctactatctataagatgcttatgcaaaattccatagggaaacattaagacgtgaataaaatctgaattgggccatcactatgatctctccccaaaacgtgggattttcaagtgcatttagaattatgaaataaaccactaggtttttagtgtgaaatgtttacagtattttaattttgaaaactatacttattaaaacagtatgacaacatttattgaatacatgttatgtgctaggtaccaagtgrggagttttatgtttattttctcatttcatcctaagagcaaacttcrgaggtaggtgtgattcgtctcattttagtgaaaattcactgatgctctgaaagcaaaattaactttcccaagggccttgtagtgcttaaaggcagaatcaaaatccacaaccagctctggaaaatctccagaaatgagcttaattttttgtgtgatttatatatgactccaatattaacagacatgtcaaacaactaacacaaccctttacctgtttattttggaagaagacacttaaaatgtattttattaccctgttgattctcctctggagtgtgacttagtatccattgcacctttgggattcttatcttctaaaattcacaaccactttctactgctgtaagaaagaatcacctgcagagttcacgaatgagggaagagtgaaaagggaatagtggcagatcaataccacttggcatcacatcaaaatagtattccaaggttggtgttctggcttctgcttttctgggaaatacgttgtctgctatttcaaaatgccctccatctgaataatgtaacctgaaattcattcaactcatatttagcactttaggccatatccagggttgtggaaggtgtacgtaagcaatgaggattgcctacaaggcaagatgagaactctgttttctatactttctattgttcctccctttgcaacagaagtagaaagggccataccatagccatctactgtccaacatgatgaatatccttaaagacaaaatctttaagcagtaagtgaaaggttaactacaattctcatttaaaaagaaaattgcattgctgatatctctttgttacataaattttccacaaggattatacattttctttttattcatttgttatctatttgacaatagcaagcctgtttctctttagcttaaaggaacttggattaaaattttttctgttattttaatcagcattgatgttgtatattatgagcgtgtggctttttgttttcttggcagagaccttgaaaaaattttgaaccctagtcaataagaaatctctgtattaatataaaactataacttatggtttatttgattagatcaatgtttaattatggataacatgtattttttgcactgaatatttacacacaaattaatctagcccatagtaaaagtgctaatggaatgtttcatccaaacataagttagtaaatggaaaacaaacagctgttgcaaagaccctgtttttgggtctgggcctaacagcacgaagcacttcagagaatttcaccactaccatttactcacatctgttgagattgtactatttcaactcaagatttgatcagtgtatgtcataaagtaacaagtagtacgctaagtcagaaaacttaaaggaaacattaaatactcatttcctatatggaatgttgcctttctaagcacatcatcttcttctatgtgatgttttgcaaatctattcataggagatttatattttcaagtgtgctcaaatggatctgtgttggggaaagataygtgaaataagaaaataaaagctaatccatttgttttaaaattttgtctgcctaccacattttgttggacttcttgttatatgagaactcctaattgtctggttttcaattgcagccaaaagcattcttacctgatcaaactcttcaaattctatttactttgaattatagctgagtacatggaaagtataattgggccttactttgttacacagcagacaaaacatatgctcaagataggtcagtgctattccagtgaataaacattttaacaaaaatttgtatgagaaattcatgttggcctctcattcctctctatatgcctttcacagttactctttttccccttgccaatcaaaacactataatgaatatctcttggccttaacgataagaaacactgtatataaatattgtctaggctgtattttatgagaatgtggagttatatgaaatgtaggaagaaaaaatatgagtgagtaatcctgtgagcagtggacgggctgagcttctaggacactgataagcaatcagtgttagttacacttgaggcagtatctctggtggtctgttccagaactatgtccttgactctgtcacattcatacttttcatcactactttttatacttctgcaatttaggtcacccaatacasgttatcttatcaggttaaactgattgtagtggtcacattgaaaaagaaaaaaaaaatcccaaattcaggacttttcccaaccagttctaattaatgcacgtgtgaaaggacatarttattgtgaaaagaaatgctatcaaaacagtctaatggctacaagaagaaaaagaaaagaagaagaaggaggaggaagaggagaaggagatgaagaagaaagctaaggagaagatgggtaacaggaaaaaaagagggcaggaaaagcagataggaaggaaaaaaaaggtggaagagagaaatgaatgcaggcaggcaggatgttttcctcgaggttttttatttatatcccctggactgcataactcagtttattcccttctaaaccracttttctagaatgtgttgtctctgttcgacacctacaactctggttcattttctatgcattaaggatgatgtaactttaaaacctctcatgtaaattctgcctgttttctaattctacaatcctcttgtttatgttcyattctaataattatcgagcttttaaagaagagaaatctgttcttaactcaaatttatacatacactgaaggaaataacaaaaccttgaagtaaaacactgtttctatgataaaagagagctctacaaatagatgcatgaataaacacttctatgggagggataccttttcagagtttaaggctcgcgggctttgggatctaagaagatgaatcgcttgccctgtttgtgatcctaaatggaaattgacagatatgtttaatttatcctgctcagtattataaagcctttttctcatttgatttttgtgtatccctcctgaaatatttgctctggtaagcaaaagcaaatattaggttttacactccatttagtgaaataacagtgatgataatctgacatcagagaaccaaatgttccaggcttatttcatgaaaaggatttcctctccagaaacattatcctcaataggttatcccatccttcattcctcaattcatatttcttgagattgagagggaaaaaaaaagaggccagaccacaagtagcctactgctaaattcttttatgaagcttagttttatgaattaccttttagccttctccagtcatgtgggaaaactttcctgcctcattaaatctttaatgcaatgtgcaccatgcacactrtattgttatttgtgacattaggttatatattgcatagtaactataatattacttgcaaacaagctggtttttccccctgaaggtagaattaaaacaggtactcatgggaaacagctacttgtgttcttcttttcttaatggggtgaagctgaagaacaggaaaktgaatggcttagccyagaaccatctccaggaatggaggtaaattttttcctgcagtgccttctcaatttgatatctgaatctccctgaagagaatttgccttagtagatatggagaaagagggaaaaggccaagcctttggagacccttatgaaatggaatgaaccgctctcactaaattcactttctctttgtattgaaaagagatataattttcatccctagtaaatatagtcgaatccatccagtaatataagaattgcctcaaagtgaactaaaattgcacttactcctacctgtggaaaaccatatttctctagccaagagaacaatgacagattagttcctaaatagcaggagaaaatgaaatgttctattggctgaacacacagtgctctgtaaaatcagagaaatcaatattgtccccaaaatgaactaatttgaaagtctcaaagatgttcaattttatgaaagactcgtaaaattaataaatgagtctgcaaagtccaaaaatgtggaaaattacagttatttgcagtacgtataacttaccaagaccacttatattttgttagaatttttcaatgaatgttaatggatgaatttttttatatagagttctccctgtttggaatcttttagttcccttatttactgtggttgccactgactctgcatcaggctttggaaatatcactaaaaaactgttttttctttagtcttcttactagtcaaatatcagctaaacaaacaaagaaaataagtgtttgaatggtcagagaactataagaatgagaattctggcaggaaaattcatttttaaaaatccaagtaacagaatggataaatataaaaagaggctagatcagacatacccagacattctcagttcagaatgttcatagcgtattcataattttttcatagtgcctccttgaccaacagaaataagccacagttctatttcttaagtagttagtgccaaacaacttaataaatattcatgttttaacaacctagcaattgtttaaaaagaaaatggacagaaaataataatttttttcataaataaccagaatcacttactgatgggatgtggtacctttggggtagtatataccttctcaaacttgagtatcagattggataatgctatccttatttccttttccacattgacttttgtgcagttcttgcttttrattacagtctcttctgaaaacctttcttaataaagatataaagtggcctaaagtacaagtaagcagaaacatggctcaaaatgttgagaacattcttaagtggaatatagcatgttctaaggtttcaacttgtgaaccaycttgaattagttattgcagtgcccaacagatatttagtattgctgtgtgtccttcaaatgtttacaatattccactgtgcctttgtgagttcactgcagcacsctgggrcacctctacacacagtttgtgaacacaggggtagatagatcctagaggcattgaaactacacggaaacttgaatgacgttagggatcccagagccactggggaatcttcattagggaagtgcaacaacatatgaaatagctcattaaactttccctatcaaaaaaactgaagtcagagagatgaattcagatgcttgatgagaacctacttggtaatggatttgaaggagagagtaaacgttaggatactgaagggattctaagagagtgcagaagcgagggcaaggaggcacaaaacgaaggcggcacctggaacatggaggagtggacagatggagaagaggcagagaattctttatctaaagcaagaggaaagggcaacgtatactcagaatattctcaaagctttttccctgaataatagcatccttcagaaaagaagtcttgtaactgactcattgcaaagtctcttacacaatggtatgtactctttggggaagacacaactggaaacaacaccaggaaaagcttgattttacagcttatggaaagattgtggagttgaaggaaaaatagaaggaaagaaattttaaaaagaataagttaatattcctaggggtgcatcctctaaattgcagagtgatatcttaagcaatccttttaagaattacttaagagcctgagcgtggtggctcacacctgtaatcccagcactttgggagacggaggtgagtagattgcttgaggttaggagttcaagaccagcctggccaacatggcgaaatcccatctctacaaaaaatacaaaaaattatgcagtcatgatggcacacacctgtagtcccagatactcgggaggctgaggcacaagaactgcttaagcctgggaggaggaggttgcagtgagctaagatggtgccactccacatcagcctgaatgacagagcaagactctaggtcaaaaaataaagaaagacagaattacttaagtaagtacttgactaactggttatataaatgtgatcataaacgcatacctttagggtaaatgaaaaagacattgattctaatattgtgtaaatgggtaactgtggcttgggaaaaaaacatctagtaacagtatcctgaaaattgtttaaatggtccgtgtttcacacaacttaaatggaagtaaaacagcttcgctcatgacaattttcaggcaattcaaaatacgttgtaataatggcaaacatgagtatcagagatacacaaaagagtttagaaaaaaatcattttatgaaatatgagctaaaacaatgttttactattatcgctattattattagccctcagcagaatagggtaaattatttctattccttagttcatgttttatattatcgctgacctgcatgaggagcccctatttttctgcgtatttatttgttcctcttttcccccttcccacctctaattcctctctcatagtattttagtttatgtcagggatccccaactcccgggctatacaggtctgtggcctgttaagaattgggcggcacaacaggaggtaagcatcaggcaagtgagcatcactgcctgagctctaccgcctgtcagatcagcggtggtattagattctcacaggagcaggaaccttattgtgaactgcgcatgcgagggatctaggctgcacgctccttatgagaatctaatgcccgatgatctgatgtggaacagttttatcccaaaacccctcctctgtgtccatggaaaaattgtcttccacgaaacccatgcctgatgccaaaaaggtggggagtgctgcaagtttccattatatgtgactttattataaataggtatgaaaaacacattagcaaatcaagtatcataggtgatctttttctacttcatctatagtcgtaacagctttgacattcaaattatacacactttgactctttttattgacaaaatggaaaattatccttaattcaaaatgtattttatttgagcatatgtggtgatttcatatattaagttgatatttttctttcctttttagagaagccatattcaagaaaaatagcatgtaattcaaattttaaataatcaaaatagatttgaaagctcaaaattttggaacattataggcctatgtcccaatattcttcccaaacctcctttcaaacgtatttattaatttagaaaattctaaatagttcagtccttgtttgaaatatatacaacataaaacttttttttctcctgcctttctagaatccttttattgagaaaatgtgtagctgatctgaagaagcatgctgtgtgaaattttgaatgtttatcttaatagaacctaaaatcttccacataggttcacccctcattactcacaataatgccaagtgctgtagtccaggcagatatttattattttatatgtgaaaagacattcgaataaggccatttctcagtggattaggggaatcagagttttctgaatttaagttccttatagagccccatgtaatgagctcttagaagacattgcagagctgcaatttaaaatcctgtttaatcagccgtagcragctatgtgccattctctgtggaacactaagaggaatcagggttcttcctcctccatccagtacattcccaaccaggaattgctgtctggtcagggttggacgtgaaaggccatagagagccaaccctgcgaagccaagtctctgcatgtcagcacagagcaagcagcagaatacagatcatcagctttgttttatgaatatctctatttacagtgctggagtggaattttaaaaaaaggattgcagcatttgcattgaatctgtcactcacagcttcaattttgattcctgtcctataaatgatcttgctttcctatttttttctgaatttctacaaggtgactgtcaatgtcagaaaatgtaaacctcaagtgtacattgcatggggcttggcatgtatattagaaagaaagaagtttgcttaatgaaaagaggataatatttattcaaactaagcctatttaattgcacagaggaaagtataccttctttgcctgttttgtttgaattttaatataaaataaaatttgctgctaaccttttgttttwctttgaccaataacatttctcagcttagtgtatgggctatgtaaagtgcctgtcaaatggagggatgtctttgtkgaaagaatccagactcacagaaagtgagtgactttctggtcagatggttagaactctcccaattttgacaaagatcgttctctgtttgggatttgtaaagctcaaactgtagactaagatgatgacaggaggatctgctgtttggcttcatggaacttaacctatttcagcaagcctgcaatactggggaaaataatacatatatttatgtttatgtcaggcttgcagttgatgggtaaggttcataaaaggttactcctaaataaatgcctatcattcccactccgtactccagtgatttctgcgtcttgcaaatactgccctatagaacaataaaattcgtatacaacagtaagtaaaatatgatttaatagcccatctcctatcccgtaatgattatgcatcttctgtcttgtagctcccagcagtaggargacagttgacatttaccatatcatatgaccttgaagaagaggaagaagatacagaacrtgttctccagcttatgattatcttagaggtagagtactgagagcatgttcacccgtgttacttcctgatgttacttamggttaccagtactgtattttttacctgcctggtttgacactgacttacaggactactaaaaaaaaatataccttaggagwtttttgtgccactcttttgtttcactctgagacatatctagaagattgagtatatttgttgggtttgaatgataaaggagaactttagaccagacttgaaattaaatttcaaacataaggaccatatttccaaaatttaaatattatgaaagtgtttaggtacatgctaatttacatggttgtgtttttcctgttttctcttgcttccagatagattttattgtctactcccttgtttatattagataaaataaaatgaaacaggaaacttgtttatttagctatagttaaatcttgacttcagaatcctgttttaggtaagaaaggtacaggagaaactgctttcaagatttgaagggccataggcaacttcaaaatgctcaaagcctgaagtttccttagaggctctctgccaccctttcttatcatatccattctttccaataatgtatctcctccccttgacactgatacgtattcagaggcacacacatacatgcatgttcattattccaaatgggtagatgttaatttagcaccaggctctgttgtttyctgtcttgaaactttcatgcatgtgaatctatgacaaaatgaaaaattcttttctcaaaatggacattttccagtattggatgaagtggtctgctctctctctttctgtctctctctttctctctctctctgtctctctctytctctctctctctctctctctctctctctctctctmtatmtatatatatatatatatatatatatggcaactagatgtatactttggaattcctttaaggtgaaaagagttctctaaatgtaaagtgttgagtgaaattatttagcattcatgtgaatgaactaagacaagaaggattacctaagtgtcataggtcattcaatatactccttagatgccattgtcctattttgagaattagactgcagtcttttttgttgtttgttttttcccatgtagtaagttcctttaaaataatagcttaattcagttttaagtttctttccctattgttctacacaacccacatccatctacagtttgaaatatgtaactttcgtgcacttttttcaattcaaggtgtttgtaatcacatatatgtttatgagttgtcaggtagctattattttagttaacagggaactaaggtcatgccaaaccaagaagcatatgcttcataatgcatttggctaaggctaatattgaaattgcattgccttcccttcatgtataccacaaatatattccctgaatgacagggaaagccaacctgaaaataaaagtctactaaggccgggtgtggtggctcatgtctgtaatcctagcactttgggaggctgaggcaggtggatcacctgatgtcaggagtttgagaccagactggccaacatggcaaaacccccgcctcttctacaaatgcaaaaaattagccaggcttggtggcaggcgcctgtaatctcagctattatggaggctgaggcatgagaatcgcttgaacctgggaggcacaggtggcagygagccgagatcgcgccgttgcactccagcctgggggatagagcgagactctgtctccaaaaaaaaataaataaataaaaaataaacataaatttttaaagttaaaagtctattgagggtggaggatacaaatatagatatgtttgacacttttgtaccctcttttcagttttactcttttttatttcttttttttccccctttagggtaatgacttgagcatcagcacagcccaagatgaggtgtacctgsacccatctgaagaacatactaatgtattgttacttaaagaagaatcatttaccatacatggcacacattttccagtccgtagaaaggaatttatgacagtgcttgcgaatttgaagagagtcctcctacaaatcacatacagctttgggatggatgccatcttcaggtaaaatcaagaactgcagctccaacgttcacacatttactttggggccaaggtgcaggagccgccccaggagtgaattttttaaggcacctaggatttgctgtcttcaaagagcagataagaacggagccctagttttctgaaagatttttctcttaaacctttacagttttaaatatgcagaataaatttgtctcggtttttattattattgatgattctttcacaattgtcagaacatgtgatcaataacgattcctatattgagaaatgttatattggaaaataaagtctcctttatgatggctcatagcgtgggaagctaaaaagatataaattccagggcacccctatttggaaagtggtttttaaaatatttccttccagtagttgttaactagtttctggcttaatagtatatagattgtaataagaaaagtaagtcttttcatttaagtgaccacccatctcactataaaacactttaagactataacagccatatggtataaaggaaagaatatgaactttggagccaaactgaatagaaattcaataagctttattgcttattttatgtgtgacctttggcaagtgattaagccttgaggaacgtttcttttcagtgtaaagtggatatagtaatgcctacttttcagggtctttgttaacatgatatgtgatcattaggaaagtactcatcacctagaacactttcagtttttttcttgttctccccgccccctttttttaaaagagtgaactacctgacttgaaccaaatatgctcgggtctgattaactgctgtaaggcggctttgttttttttatttttaaaacaatgacatttttatctgacagaattttaacttcaactgtgtctgaatgagctctttacgcttctcgttttctactctaataataaataacacaaggtgtcataggaacttccttctaaatcaggttaagttagacattcaaatgtgaccccagcctgacaacccggtatacctttaatgaaagcaatgtctccaatattggaktttttattgctgacaccaccacctctcacctccctgtccctcatcatttccctgtgctgcctagtttgcctttcactggtaatatttcaacttagtctaatcatcattaccatttcccaaaggagagaactgcagaatcataaacagaaccattgccaaacaatgtacctcttttgcataggcaattcttctagaagctgggttaaaatgccatggagatgagaagcagcacttaggaattaattatgtttttcacatttagcaaatagaggttgtcatgatgtttaaacagtacaaagaaatgagtcctccagctttcaaaatgaatgacaaccaaattgacaaaaaaagtgtctggggggcttatatatttttgtcagcattgcttttcaggctagttaatacaaagacatttccccctgatttatgttggacagtttcagtgtctacccgtcttaaaatcactggtttcatttgcagtcttctgaggtttcgccatacaggaggaatgcattcacagcgcggctctgtgaaatgacacaagagctaatccaagtaggtggctactttctgtcacctacattacctaaagcactgtggttcaataagtaaaagccaatgtcaaatttgaaactcctacccactcaggtgagctgaaagtcggcatgaatctggagtcagtcagtaagcttgttatattttatctttgatctactagtagattgagtcatatttgtaaaacatcacttgaattgatttcaacttgtcttgcacagtaggctttcgacttggtatactgtttgtgtacaagcacaagtaaattgaagctcaacaaaaattcatattcagacttatttacagtggatttacttccatggcagttctttcagcaaatgggcttaggttcctccagttagttatatgattagatggaattgtataacagaaggagaactggactgcgggtcaagaattttgacttttgttttcaactcagctatttaatagttgtaaacataagtatggctttgacctctttggacttcaatcacttcatctgtaaaataaggaggaggacaattgctctgccagcttcaaaargtcaccgcaagaattgaattagagagctgcaaaagcacttggctagtggtaacccagcacacaaatatgaagcatttctatcttatctacttcatcccaaaggatcacattttctccaaataccattaagacttagagacctctaaagaaaggcacatactggcatttccatacatatgacagttcttactatcatttttatccagaatgctgagacccattagataaaattaatttattttcttctcgctgtcttcactaggaagatgaaggcacaagtagaaaactcttcattcttcttttaagaatataagagaaatcaacctaactgaactgtgcatctttcacctttaaattatccaagacttggatttagtaacatccttggtctttaaatcaagaaaggcttttatgaagcacctatattagatatagaactctgcacaaagtgtattttcctctaactttacagtagacattagtagagttcaccaaatttccaatctcatctataggggatattgcatttctctaatcctggagggtagatgtgtcacatgacttggtttagccaatgaaatgtggtagaaatgatgtatttttttttttcctgaggtaaacattgaatttccaatgtgagactctctgcagcttactcagcaatcagaagattaaaaaacagcctggggccgggcacggtggctcatgcctgtaatcccagcaatttgggaggctgaggcaggcagatcacgaggtcagttgttcgagaccagcctgaccaacatggtgaaaccccatctctactaaaaataccaaaattagccagacatggtggcacgtgtcagtaatcccagctactcaggaggctgaggcagtagaatcacttgaacccgggatgtggaggttgcagtgagcygagatcgcgccattgcactccagcctgggtgacagagggagactctgtctcaaaaaaaaaaaaaaaaaaaaaaaaaaaaaagcctggaatactgatttagcacacagaggtcagctgccctaacagtcacccaggcctgtagaggattttacatgagtaagcctttgttttctgttaagccattgagattttggagttgttaccacagcataaccgagtccatcgtgacttcatcacgatataactcatgagtattgcttgaaaataaatacagaatcttttcaaggcaagatatttttacacaacttttagtgtaaattttgcggtttgggatcaaaaaagattatacagaatttatataataaataatctagaaaaattcctttgtaaacaaaggagtctttgataatcatagaaatagtattgataggtacacagtatacctctgccttctgaagttaatgatttgggtaactacattttgaagacattttactgataacactaggacttaaaaagatttttgcagctcacttggcatccggccattggtaagaggtgcagccaacattttaccctacgtttccttcccattatctttgactacctcccaatgctattccataagtgttggattcgttcagtctgcaaatatttactgagcaccttccatgattatctctgtaaatctcagttcctcttgtatacaatggcagaaacaatgtctaaatttcaattggcaattaagtgaaaacataatgtatgttaagcacctgaaatagtatctaacatatgttgggaggcaatgcagggtaacaaggagatctttggttttggagtcatgcttgggtttgaatctatgctgcaccctttgctaatggtattatgttggacaaggctctttactcctctgagcctcagattcttcatttgtaaatgtgaatagacatgggttgttacattgtttattgatacttaaatgaaatgtctttccagcctgtatcatagtacacagaaaatagtagacagtaagtagtaactattaaaaagcagtcattctaggctaggctataaggatacaaaggtggacaaatgatcattcagttcaaagaaggcattgtacagtagagaagacagatatacatatacatactgtacatttatgataatataaatagtgcagaagaagtgtgcacartgcatataaatagtgcagaagaagtgtgcgcagtgcatactggtagaactaagaaggaagcaatgaattcttgtgttagcatttaatacacttttaataaatagctgcaaaagtatcagtttctgtcagttactgctcttactcgatgtgggattgaaaatgtttaaagaaaatatcttgctatatatatataaaaaacaaattatatagcatatatatatatatatatatatatatatatatatatwgtgggtagaaaaaagacaattgtaacatcaagggtatttttgttgttttaaagtgtcatgttttgtgctggttgttttagtgtaatatagcatatcttactctggtgggaaatgtagtaaaacaaaaatattgagaacaatctttaaggcagcaccaagacaacgtttctgaaatagttccaatattattcatagtggcttgtataattatgtcctctctcttcatccatcatcttttctgtattttcaaggcataaaaataagagggaakagtcagctaaagcatttgacttagttgacaattctttgatagctcatgcatctctaaaatttagtactatattattgccaacattatgtatttaaatgaatgcagcttgatatcaagaraatgaccatactgaaggggaaaaaaaaataaactgcagccttcttcatgagtaacacttgaaactgttaaacacattaaaatcccatttaacaaatagcagaacctaatgaacattgggattgctcagtgagtactaatgtggaatattactgggaaagatgtttgagtgttgaagtttctcatagctcagaatggttacacagattaaggagaggaaygtctgttgttcaaaagacaaatgaaatttgtcagttcactgaaaatatttttgtttttgtatcttttttaaaactgtttcttaaagtagtcaactgctcattcttctattttgaaatttccagaactctttgtttaagttttgcatgtcaattttatatgagaaattcttggactgtatctagatacagttaatcaatctgctgtttagtaaattgtggtgatctattgtatgataatcaactagtgtatcaaccatgaaatcatctaattctgaaattaaaaggatcagaattataggtttatcaagtgacagtccattaattccaggcagttagatttcacaatacattcaggcgagttctggtctctggcctcaagttctaatgataacagtttccatttatcttctatgtcaaatcaaacaagtaatttgtcttttacttttctgattttattcatctgaaatgtggctagtagtctttaytgtatcctttgccatggagtttgttagtcattgtttgtaatagaactgttttccattcatctattcatttattatttaagtatttagtcagttacttttgtatacatttatctgtctatctacccatccgtccacccatccatccatccatccattcatcaattcacccattcgacaaaagtctactgaacatgaacatgtatggagatgatcatcctgcatatatagatggcaagataggtttctgttctcaaggagtagcccataagctcatgccaacataagtactggctttagtaactcttcaaaaccccgttgtgttaaggagacttatcaggcccagaaattctgtttctagatatatatccaaaagaactgaaaataggtattatgtgttcatgaatatgaatagcaatattatttatgatagctcgaaggtagaaacaatccaaatattcatcaactgatgaatgaataaacaaaatgtggyatgtacatgcagtgaacattagtcattaaaaggaatgaaatactgatacatgctgcaatgaagttatctagaataggtaacttcatagcaacaaaagcagattgttagtttacaggggttagaggaagaggggaaaagagaatgactgcctaatggattctgggttttcttttgggctgataaaatgtcttagaattagatatatgtcgtagttgcacaacattgtaaatgtactaaatcacagaattgtacaatttattttttaaattttaaataggtttgaaaattttcatcctaccccaaatgtcaaagttcctctctatgtacaacttgaaatgcttaattttatatgatgtgaatttcatctaaactaatgacaagaaaagtaaatgcctgtgacactgcatttttcattgacagggttcctcagtgargggggaaaaaagcatttaatgattttcaaatgacacatgtaacctaaacactataggrcagtgatatttgcctaatctagaaccttctaccaggttgtccaagatgtgcccctagagaatatagcactcaattaatagtgttggatgagtttatttacaggtaaagataattgccttgtgtttagagggtgccatctggcactcagcagccaggatgattccatccaactgcctatatctggtgatttcagggttaatttccttttctgcttcctgatcatatatgagctcatacatattcaaaagtactgtcaagtgtctaggattagcaaagtgggggtaaaagcaatgaaaattttagaaatctattgctgaaaagcttacaatttggataaagatcatcacttttgaagatatgtttacaccttgtaatgagccttttagctttgctctctggcttgattcccaaattcccagcattgattcccaaatctaacaagttatttggtaattgtgaatcactgatcaacaaaaatctaccatcactcctgagaaaggaactgaaaaatgcaggccatagcragaatcagttgcttctttcttatggttacaagatgccatatcatatgctataaaatgtctatcggtaatttttaaaactgtgattattatgagtcaatagtagtcatttaattatgtgctcttagagtttatttaaaatttattttcatgcactaaaatgatttggagatacaaatagtgaaaagtatatttcttgtaatgtttygtagtaatttttatttggtttcaacagtcaatgaaaataggttaataaaatgtctagtatttcataataacctactgtgtgttacatattayaccaagaagtttatattcatttccttttaaatcaagctcatggtgtatggactattatattatctccattgtatagaagaaaaaattgaggcctagaaagaataagttattttcttctaggccacaaggctggtaaatatcagagacaggatataaatcttggtctatttgactcacaaaactgtattcttaataattaagcttttaagatgtccttttacacaaaaataggaaaagcaagtaagataccaataacatttatttaaaatgtgaatgcatagtaagaaaagaaatatgtgtgtgacagcatttttttccaattttccatttggccaaaccagcttttctctaaaataatgagttatgccaaatcactctgctaaaatcaccagattgtacaaaagtaccaataaaatgaaggccatagatacagagaacaatggatttaatttaggccaaaaacaaattccagagatcattctaagtcagtcaactgagcactttgagaaagtttagcttataccaactacaaacaagcagatttatctctaagaaaaagaaaacaaaattgtttccatcttttatttcaatttaaaagctaagatggaatattaatattgcctacttctgctttccttgtttaagcactaaaagaaatcaagcagtcattggaatgttttcttttttaaaagaccctttaactatatgattttaaaaatgtctgtctccaaaaaatgaaaatcaaaacacatagccaagagccaagagacgaggaagaacattctcatatcttttcagcatttggaggtggtggtgattgtgagcactttagactgagccaacttgacctaatatgacaaaggaccagagcttttggttatggtattcatcagcttcctttctcagcatgcataattggcttatatttatgtcattgttgctgtacgattcctacagctgtataatacctaagaactttacttattcaccatctcttttttcctctgccataggttgagctctgttaaccttgaatccgctgtctcctatcctactgatggaagcattgcagcagctgtagaagtgtgtcagtgcccaccagggtatactggctcctcttgtgaagtaagcttgcaagaatgtatccttagtgctttcaaagttccctcaacattgctttcaataacctattctaataagagctgttttttttctatcaataattacacaaataatktgtatcacttaaaaacaaaacttgaatatctaccaaaagctgtggctttcaattagagtattaaccacayaatttcattttgtaactctttctctctgagatattttgcctataactgaaaatctgatgtttctgtctttgctacatatttgatctattgtatgctggatggtagcagaatagcacttcaaaatattttctcttcattttcatcataatgttatccaaaatttagcactctattttttttttacttttctctcattttttaattctgtatcacacttttcctctacttcatttctaagaatacaaccaaatcacaatcatctgaagcatataatcttcagaatgtcaagaatataatatatggaaaaaataccttgatatagaaaactgcctacaggtctttgatttgtttagcacctaatgtttgagatatttattgttgtckcaatatcctagatttataataagattaatggttcttacttaataccgcagtgtgtcatcctaaggtaacaatttttatttgcttctgtgtattttcttttacacagaaaactggtgtgaaactggttttacttgaaacctggtcaaaaaatgtgaacactatttccttgacagagcgcatggctagcagataaataggagcttagtttctttaaaatggtgcctttaaggaatcatttgagtgtactgagatgttccacttcagaacactacctcattatgccatttatagaaatactctaggcattgctttgtcagttctctcgtacttttaaaataatgcatacatctagagatacgcattatagtcatattcatgacagctgtgtttcctttaactgagctcagattcacctttctagaaataaaactagatataacttatagaagtacttgcttttccaaaattcatgtagatgagagaaaaataattatggatatcaattagctatgtcaacccaaatttgattttacatataaaatacacaatgtatttgatgaaacaagagccttttgctcttgattccaaactatttgaacttttaagatcctctctcaattggcataataaataacttaattctactcttgttttaaggcttgtttccacatactttgttctcatcctttgcattatcttttatacaaattctaagtgcccactgaatataaaattacttgaatattacaattgcttaattggctatgcttttagtctcttccttctctccttcaaaaatattttcaayacattctagatatgtttgataaattctgtaaatttacctgtataaattattaataagtacatacaacataatccctgtcctatctgtttagggagacaataaatatctatgaaaaatgggatctcagcactrtataattaagggagaggtatgtgctacagaacatacatgcaataatcattcaaagggatgagctactgcagtggagagagatgcaaagtgtcctggagtggagaaatcttaaattggatgctaaataatggtaacagatagatagaagcatttgagtgtgaaaaaaaaaggagagataataaaagcttcctgtatctgtcacacaataattgtttgataaataaaattactttgtaatccataaaagaacttaattgaatcaagagacaatgaattttggaactttggattttctctctgacttcttcatttcttctactctctaaaattcattttttccttatcaaaactttctgtccctaaattcactattattcagtcctatcctttcattatttcatttgcttttcaattaagtgtagtttgtaaggccagtcattctagccttgttatcactaatatcctgggatcccttaaaagctgagtaaacgccaaagaccattaatgtcttaattccagcttgctgagaacctctggccaaaaaaggatcaaatgactccattgtagacattctcttttacttcatttggggccayagtgttgattcaggatcttttttctcatttctacttgacttcttgtgaagtgttctgcagttaaatctttcaaaaattttcttactttcatagtgctgtcatcatagatttcacttgacagatgagacaggggatatactattaaaaagagtgttatgcaatctcagtttcttcttccatgaaatgaaaataatattaaccacctcatagaattgtttgtttgttcgtactttcatttagctgactagtatttgatgagcgtgtattttgagacaaacaagaccctacacagggaaaatagtgccattaacaatacagatattgtccctgtccccaaggacgttgcactgagtggtggcattaacgatatgccagaaagcaaatagaaataaacgtgacaaattctatgaaggaaataaacagggtgaaataaacagggttctatgataaagttactgcaagtggttgtatgaaggttagaaagtctactttgtaaaagtttgtcaggaaaggcttcctgaggtggtgacagctaaatcgagtgttgaagaatgagagggacaacgatgtaaaaccagctgctaaggaagcagcatagatcgtggagtctgtaaggactggaaagaaggagcgtggctggagccttgtaagcaaggggaaaagtgggacaagaagtgattggaaaagcaaggccatgaggagatttgcacatatgataagaaatgagcattttattctcatggcatggaacatcattacaagcctttcagcagagtagtggagtagtgtaatctgatttacatttttgggttttggggtgttttttgttgtttgagacagggtcttgctctgtcacctaggctggagtgcagtgatgctgtcatagcttgctgcagcctcaaactcctgagctcaagtgatcctcctgcctcagcctcctgagtagctgggactacaggtgtataccaccatgcccagctatttttttttktttgttttaatagagacaagatctcaatatgttgcacaggctgatctcgaactcctgagctcaagcaatcctcccacctcagcctcccaaagttctggggttacaggcatgggccaacgcacccagcctgagttacatttttttgaagaaggcattatggctacagtaggaagaatgtgtcttaggagggcatgaataataggaaggagaagggttaatatgtagttgcagtggaacacagcaatgacagtagttgctgttaggatcatggcagggaatataaaaagagttagcatattctatatatattttgatagtagaacaaataggacttactgattcgagactgtatgtcaggggagagattaaagaaataaagagtttaagaatgagtcatagatgaccagtttgaatgattgatcagttggttgtggtgtcatttactgagctgaggaatagttggtgtgtgtgggggggtgggggcatggaatccatagtccagtttagaaattttcgatttgaaaacgctgtgaagtgtaaatgtcaatgtgtatttataatattcaggtcttaaattcagcatgtctgtctggtctagagatatgtttttggaaggcgtcataaactatggaactgaataaaattacccaggagaaagtgcaattgatttaaaaaagagagaaaaatagcccagcccaagccctgaggagctcctgacgttaagaagcagggtcaaagcagaggagacagcaaagaaatatgctagaaatttgggaagtgtgatgtcatgaagttgagaaaagaaattgtgggaggaaaaggagtcagctaggcccaaggctgatgaaaggttggataaaatgcaattgcagaattgtccatcgaatttggctgcatggaatttggtgacaaggacaagagcagttttaattgagaggtggtgacacaaaacagattagaatggaatgaagtgtgaaaaagaggtgaggaatataatacttgttaagagtagtgttactgaaaagaaaaacatagatgactagaaaagttatatgaggctaagaggacagttttgtcatttgtgttttgtttatttttgatggagacactagatcatatttttttgtgctgatagtaatgacccagtagaagggaaagttattactaatccatcagagagagtgaatattgagaagataacagatgctggaatcagatgacaagtggagtaatatttctttaggaggaaggaccccacattccccacatcacttgtttggaatgggaatatggcaacaaggtttggagatatatgcttagatctctggacttgttagtgcaaaggcagctttaatttttttctgtgagtaataagttaaaatcactggctaaaagagaggtgtaaggagttgggaagtttgaagaaagaagacgtggtatgagtactgcatttgcagagtattaaaacaaaacaaaaaaacttattaaggaaaacttcatgaatatctgtctgaaaacagtagattagttctctcccttttctcaacatccttaatttctacccccttatgaatatgtagcttcaccagcttttaaaaatgtatattacagaaggaaatcacttctataatgaatctagggaggcaaaaaatgtaatggggagaaatgggaagggatttaattgggagaaatggaaacggaacaggatagaaatttgacaattttgggttggttgtgggggttgaaaaatgagaacacatggacacagggaggggaacattatacactggggcctgtcggagggtggggggctaggggaaggatagcattaggagaaatatctaatgtagatgatgggttgatgggttcaggaaaccaccatggcacgtgtatacctatgtaacaaacctgcacgttctgcacatgtatcccagaacttaaagtataataataattttgaaaacaaatttgacactttttttggtactgttcaaattaaggggaaagttcattttattttattttcagatataaagtatcagtacataaatttttttatgtgttcattattgatgttcaaatttgagagtcctcatatcctgaggcagaaggaacatttccacggagcataacacaattctatatcctttattacttcagtggtttctcttctgttttctttttcaactggaaaagaagggcttttcatgatatatgatgttgtactcgaccatccagaaatatagtaaataacccacaagatgcaatttcactggagggtgatcataagctcttagagggcagcagtatttgcctcatgcttattttgcatctcatccattttgtagtaatccccacagatggaaaacttaattaaggatgatggggaacttagagcaggcactgacacagggaatctaagactaaaataccctgttttaatcagaattcagtttttatrtaataaagtgtttcacattttaaacaaggaatgaaaaatacaagcaaagttacagaagaatgccataaaataagctatcaagaatgtgagaaataaatcataaactttttgtgtaaatttgagaaagcataataggatggaggaaatttagcatgaaatacatgaattatatatgtgtagaaattagctgtgtatgtggtcaaatataagtgtgggtgctgcctttcttccaaatcatgtcaaagattttctggaaatgatgacgttaagggcaattagtatatgggcaagtgaacacattccagagaatcaaaattgcttgggatgacatcgggtactctcttaggctaagactatatgatgagtccttttatatcagctgccttttttacagtastttttcttctactttcctgtctgtgcttttttctttgagactgtcacatttcaattctttatatctctgctttattttaccatttcagaagaaacaccaagctaatgcttcctctaatctcatacctgccaataacactaaggtcagtgcaaagccccagtgtcaggaggaatagctctgttgcaatgtttcaataatggcaatgctttgacaagcacatttgatgagtttcctacctgttattttctgttatcagaaaacaaacacaaacaaacaaaaacacctttttgttttaatctccaagactgactaaagccttatctttctctcagtcttgttggcctaggcacaggcgagttaacggcactatttttggtggcatctgtgagccatgtcagtgctttggtcatgcggagtcctgtgatgacgtcactggagaatgcctggtaagtgctctcttctttggggatgctgattgacaaggctgaaatcacctcgacagatgctacaattcagctactaccctggggaccttaaacacttgagtcaagaagtgctttgacaaagatctttgtattgaactgaattggaactgagaatgctctttcatatgtgatctccctaatgaatatgaggaagtgtttattcatattaaatcaagaattaaattagaatcagatatatttttataaggcataacttctgattggaagtataactaccatgaatatatatggtttcactttcttccataaatctatgaaaagtacagtgtacttttaaaatagaaaataatttatatccccataatatgaaaagtgtaaaatataacctttatagtaaacataattaagttttcttcatgttgaaaatgaaaacatactacatatttttatttaaaatgttcataatttaactaaatgcatagtgtcatttgtagattaaaaataaaaacaatatgtaatacatattcaccagagctgcttctcctttgcaattaagtctaagctttaaccagaaaataggctttacaaagtgcaaagcactttccatcctgctaagaaaccttaggattggagaattacactgaatagaccattctgattaactcaagggcacattagttttatattgtctgacatggcatgaagcttgaaacaacacttctcctttcattagtcttgcagaaacacaatttaaaatggtgccaattaaggaggatattatactctcatttccctgaagaatttaaggcggattctgttacctgtaattcttaatgttctatctttctcttgctcattttcccccatttctcttctacttaaaagcttctgggaaaaatccaaaatgaaaattcagggcttttgtttcagtgtaatttggcatttaggtttgttgatgctctttcccttttctctatataagattttgtttaattgcattgcattatgaagcatgagagccttaatttgtggatcagtggatttttgaaatgacatttttatgaatagaaagactaagtgattttcattttaattatgccataagtcttttaaaatgtrctttgggaaaaatattgggttacmtttaaacacttcactaacatgcagtaggaaataatactcagcccaaaactgacatggaattgttttacttaccctaagaagacaaaaataagtatgtcataataccaaactcatgatgttccatatagtcatatttcatgaattcattaggataaaatcaaatcaaattttcatgctgaattcattaggatgaaagcaaattagtccatttgttgatgtgatatttctaaaactagaagccttttttaactaataaaacagtgtcattcagcataattttgagagaaggaagggagagaacagaccctactaatgatgcctagtttactgattttgtttcatgaacagggagataggaggtctccttcaaataacagagcgatcttgaggaaacagtggacatcttgatgataaagacagaatctggtgtttcctgaattttccatcatagctagtaaataggtgatcatgtaggatatactgactttcaagtgccctttctccaaaattgtattgataactaagtgctgatattccattttgagtatatgggttctgatacaatacacaaagaggagaatatttgaatgttgctcatcaaggrcattcttactgttcagctgaccctgcattttagcttcttgtttatttttcatggttttaacccascattaagtagcatggtttttagcatgaaaaataaatttataaatttataaagcttaacttgctttaaaatttgattataaattatctgaaaaatatttttggcaccagaacaaaatctaaacttctgcaatagtgtaggtstatatttaaaagacattttaactcaaagtccatttgaagtaagccaggaagtattcaatgtcacatgggaagatttcatgcttgcttcttctcatagttcttgtggtatgtaatgtgagcaaaattttgtaaagcactttcgtaacaggacacctgtaaaaataaccaatccatcagagtgaagcttccatctttttttttttttttatttccattatataggttgtctgatgcagttttctggtttccactacaaaaatacttgagttttaagatgatttttatttgatgaaacgtgacattagaaaatgtaagaactacatgttatttgtcttttaaatcaataattggaaataaaaaaccctctcaattatgcaagattttcagttgaatgttagaaataccattttcaacatgtttaaggcaaaattaatttttgattcaattttttaaaacccttaagtatttgaagacataattttagttgtatcagtgagataacatgcaaataattttacaaaaaaacaagcaattcttyagtaatagcttagtttagctaaacttaaaaattgaaaggaagtaaaacaaaaatcaaatcggggaaaaaatctttcttcaaatggatccatgttttgcacattaaatcccaatatactgcattattaaggcaactattcatagtgaagctgaccttaatgctatcttttaaaaagttttgttaaaaataaatttgagaaagaattttaaataacttagagaaaagmctgttttcaaatatcaccagttactacagaaatacatatccacatttagttgatgaaattggcacgtgatgtttaaaatttttcaattttctccatgtttaattatgagtcaagcaagcttctcacagatgtaatacagtagtgcattgtccaaaccatcagagtccactgaggccaaaattcatgtctgagctaagaggccatagccccggaggatttctatgattagccacagttcccattaaatcagcaatttcaagctgaacaattgatttttacctagaatcagctacaatttccattaaacatatgttattagtgctctatgactacacacacacacacacacacacacacacacacacacgcaatatcatgtattttcttaaggaaaataaagaaaaaatgaagtaagatttgyataatgaaaaacattaaaatgaatttcaatcatctttttgtaagtatgcatatgctgaaactactgtgttgtttataagctagatattaaattaactttcaatgctatttctctgctgtaaaattgaccatttaacatggaaaaattattcttgctggcagggagcagactaatgacttcgtagacctatttttggcaacatgttgatccctgacaccaaaataataaactctgatgctcatttctttctcagaactgtaaggatcacacaggtggcccatattgtgataaatgtcttcctggtttctatggcgagcctactaaaggaacctctgaagactgtcaaccctgtgcctgtccactcaatatcccatccaataagtaagtaacaaacttaccccatgaataagctcagcatccatttctgcaagtacacttttcatagcaaatatacacttccttttatcccatgtaaataaataataaacacagacatgaattttttcaggaaaattatatgaattttttcaaacctaagatatttaaaactatgaggatttctaagaatttgtaatttttttagctctagttttggtgatttaatttctaagagtagaactcaaatagaatttctacaccaattccaaagaacataaatattttatacaaacacatacatgtgcatgcatgtacacacctacacacagacacatacccatcttcataccttaataaaaggatataaatacagctaatttgggttctaccyatacactatttttttgtgaatcttgggcaagtcgtaaacctctcaaaaagtaaaatgaagggactgatttaactgacttttaagtacccattctatcccttctttttagaaaaattcgttgttcacctagaacaaccacctcttagagcagatttaaaaaaacaaacaacaacaagaaagaacacttgacttcctcatttccttaccttttagaggaatgctatatccagctgcttgaattcacattccctcagggcagcctctctcagtaaacagctaagcacaccccaaccaaaaatgttgttttgtttttaaattgggatacttttttttttttttttttttttgagacagagtctcgctctgttgcccaggctagagtgcagtggtgcaatcttggctcactgcaagctctgcctcccgggttcaagccattctcctgcctcagctggactacaggctgtgttgaataaaaatcaacaatttttactcaaaagtgattataaataactatacttttaaataaaaggaaattmttttctgaagaactctcttaaaggtgagcttagtgcttaataaggttcatatcgtattgtacactttccagctatctctaggcactgtgacaacactgacagagcaaaaattttcaatgatctttaagggaaatctgtcagctatagtcttttaatgtgtagatgtgatcaagtaggtcatacttcaaactcttacccagaatgcgcctaattaaaatggtcttttgttagattcaatgaatactataagctaaagactttgagataattctaacattaagtttaaatgttctccttgaaactgtgcttcctactgttaatccacatgaaatgcttatcctcccaatgaccttctttactcagaattttttaccttactcattgtttggaaaagaagagaaagcactactatttaataaaagcagactactatattctaggccaaacactgtatttggtattatttcaccttcaactataactcagtaaggtagatattattatcctcattgtatagattaagaaatgaaggccattagtagaaaaatggcattatgatgccaattctggagccagactctttggtttaaatgctgggttccatactttccagctgtgccactttaggcaagtcactgaaactctctgtgcctcaattttgtcatcattagttataataggactctcatagggttgatgtgggaaagacataattaaaatgtgtaaaccacctaaactgtgactggatatgatgaacccaatctaagagctgattgttattaacctgctcagagtcataaagtattaaagtatcagagttggaattttagttttaaaatccatgtgctttccaaatctctacggtctacaatgaagacttctttaaaaaaaaatacacactgcattttaagtgataacactaaaagcagtaattaattcattggataagtcaatttatctagcaaggttttgagaaaataagacattggtttaatgcaggggtcctcaaccatctatagcctgttaggaaccgggctgcctagcaggaagtgmgtggttggcattaccacctgagctcagcctcctaacagatcaggcaggcattagattctcatagaagctcaaaccctattgcgaactgcacctgcgagggatctagcttgtatgctccttatgagagtctaactgatgcctgatgatctgacgtggaacagttttatcccaaactcctcccctgcrtctgtggaaaaattgtctccaacaaaasaagtacctggtgccaaaaattttggggaccactggttaatgtatgttagtgatcagaacatttccagggcctaaggcatgagcctgaatgggctcaaaactgaagattctttaacaaccaaggatgttagagaagaggaagaaggcaagagagaaacctgttggaaaataattactataggagaacaaatgaaatatattccttcataattaaaggctactcaagcctatgatagtcataacatgacacaaaacctgcactttggtatatatgcgaagggttagatcacccaatggaagacctacttgtttgccatggctgaatggcattctcttaaccatcttcatttacatgaaactcattgttcacgactaacttgcatttgaggaaagcagaagtattgcatctggccactcgtattgcatctccttctcagccaagatgtcatgagcattagcaccactatcaatccagcagagctggctgcccattgcatcatgtgaattccagctgaatacatattagaattatataattgattgagtatgcaaaccckatggatttaccctcaagtctgaccaacattactataaatgcagaggaaacattagggagataattttgcttggataattataggcattcatgacccattgttgtctctttatttrttgtgcatttacttggataatgggttctaattgttgttcctgaaaaagaaagaaagtctgcaagcattaaaacacaatccatcagtgccaaagggattgggtttccagtgtccaataatattatttcctaaaagatgtatattctaatttggtataattaygttgatcctgatttttaaaaatgcatataacacagtgataacaataccagtaacaccaagtatttaatgattctttcattttcaaaatgttttcacttagagtaagcaattaataattattagtaaatattaataattaccaaattatcaaatattaatataaaatattaaaattagcaaattactaaataataattttacttctagcagtagaattgggactagaatagcaatttattttaaattccagctttcaatgtggtattttaacaagtagaaagagagggcagtgataattcacttagtttataaatcctagaagttttgtgagagggttataatgtcttttacatttaaaacaattttacatttaaaacaactagaaaattatcatggtttagttgcacaactgtgatgagaaaaatccattttcatctaacaacctgaaatgtttaaaaaaaaaatcactaaacaagacacttaatgacctagggaaactatcctttttaaaaatattttataaaaaacattactgttataatgtgagctagaaactctgagatatgaattgaatmtttgcatacaatcctgaagacgagattttaatttccacaggttattcagagaaaaaaaaaaagggagctaaaggttgacgcaaccttcatgggaagtctaaagcttagtgatagttttaccttggtgatttatctatttaatccctggtcataaatcttatagatcacaagcattttggctccaaatttcttagataatattgctaaataaatcaaatatgtaagaagatagagatagattggtataattattatgatgtatgaatacagagaagcatataatatttaaattatacatatatatcaacttcatcaactatttatggtgatcactatgcttggccttctcatcttgttgatgtatatattctagctataggttgtaactaggcagtaaaagttatctggagagaagcaaataacaatgtaactatttcgaatgtttatattctttaatttctggcatcacatagcttataggttaaataaaatatgaaagagacatgtgaatctcwgcctttgaatacttaggatgtgtttgaatatataatattattgaagttgttatagattttcatcagttatataataaaatatattattggcacaaggctggacagagataggacctcaataagttctatctactaatatcactgtaaatactactggtttgtgtgggtcaggaatgctgaaatttaagtttttgaaagaatgaaactcaaatttgagttgacctttgggctcactcaagagatcatattgaatgcacgttgttaaaattaatatagagaaatgtattccaagacaataggtaaatttaaggaaacawtcaattcagccatattctctagaaaattgagaatgctctagatgttttagtgctctttcctacacattgttttatgtgcacatgggagattatgatgggtcttcctggttccatatgccaaaggaaaaaactaaagttcagagaaattaagtgccttgatagtgattatacagcttgcttgtggcagaaccaatattggaactcatatattttgactcacctctctgtgcttcttccaatggggctacagtaatagaaacaattacagaaacattgaaaagaagcaaaaaaaaatcaatagaatttaatgtcagacaaactgtaaatgttcactgtaaaaatcagtaaatcttcactgtttggcaagagttatgttaattatgctacatagttacagttatattaacagctatgttaatataagggactagagcaggatgagaaaactgcagatttaattctttaactattaactaaatacctttcacgttaaatcaacatatcttawtttgtttaaaaatttgtaaaaaaaaaaaaaaggcaaagttttttaaaaaattaataagtcgtatctataatttattatggcaatatgctttcatactttttcagtataaaagggtttatcaaatcaatcatattattccattttgcagaatgggaaacaggtttagagaaatatatygttcaaagacatacttagaaaataaatcaagtctaattaagaaatgcaattgtggagattaaatcagatttcatagtacttaaaggtaattaaagaaataagtgtttgcttaatgattctcctgagaataagtaggagagatcattgaactgaagaagaaaatacttagaaacttcagaaatttatgacgctaacaccaaaatcatgaagtaaatgaattttttctttttctcctcttcctctcagtccctgccccttttcagttatgtgtgaatattctcattaccctcatctccagcttctccactgacattgtgtagccactcaaaatggtttctcttatcctacccaactgttcaagataataattagttgaaaggagtcctgatcccctgttgtgtatgcaaatacagaacatgccctgattttctaaccctaatgatggaagttttaattttatacccatgattaaaggagtgcttgttttatatcacatacaatcccaagaagcaattcattatattttatttcaaatgcatgacagttaaagacacacaaaatattctcacacattgacttaatatgtgtttaattttattttagagtattggattaactctctgtgggagcatttaacgttagaactgaatttcaggacccacagaaggacccacagaagaagtttccctaatgtctgataatcaggaattgttgagcttctattgagcaattgttttgcttttggcttctggctgctctgaatcatttacctgttgattgttcccttttgcattagctgtgaaaaacctcaaagccaaatgttgatccacccttatcaaatgaacatatgttataacatgcattttgaattctaaatacacccttaagtttatcttttttttagtatttttttctctttaaccwtgctttattcttaatgcacatattttgacagatagaattaaattctttttagaacaaggttaattgtttctctatgtatgcattcacatacataaacatatatagattgttgacatagtcacatgtatacacatgtatgtacacatatatatgcatacatatatacatgcttataagtagattataaaaataaaagtatatattcagccattaagagggattattttcatgtccagctttttattggttatcccaataacagcttcccctcctcccctatttgtggaaaatgcccgctgctcttggctttcttgtgtttcctgtggcgtggtttggataatccgggatgaagaacattttctgctggtgtggagctagccaaatagagttaaatgacataatcttggaatcacttgaggtcaatgatgatctcacaatttcctctttgtgtcacggaacaattagcttcatgtcttggccaaaattagtgctaagtgactgcatttgccaaggcaaattctgtagatgttttttattgtgcatgtttatttctcactctaattttatttttgttgttgaatgccatcttctgccatagctgtaactgcaattacagcaataagagagtgaatcttcagtttatgttgttgaaagaatatcaaagcacaaatacagatatattttatgagaaagttttatttggatgcgttatgtygagtatctatattactagaaacttaaacttacttaattcttaccagtaggtttcaatgacaattggttataggaagaagagaatatcacattaagaatctaaagtcctagatcccatactaaattctcctggaaattttgtatatgaccttggttaagaaaaactgtgcctgccctaaccagctcataggattttgtgaaaatgtgataaaattgtaaaagtattctgaactgtaaggagctagtcaaatttaacatatttttattgcctaatttttttctcgaaaaagtgttgatttttgtcagtgagcaccttttacttatgttggttttaactgacatgtgagtgtatttaagaatctgaaatctattttatgaatagctttaaagtgtcaaggccaggtgcaatggctcatgcctgtaatcctagcactttgggaggccaaggcaggtggatcacttgaggtcaggagttcaagaccagccyggccaatatggtgagaccccatttctactaaaaatacaaaaatgggccaggcctggtagcacctgcctgcaatcccagctactcaggaggctgagacactagaatcgcttgaacccagtaggcaggggtttcagtgagccaagattgcaccactgcactccagtctgggcaacagagcaagactctgtctcaaataaaataaaataaaatatttttaaaaatgtcagaagccttgtcaaccaccattgacaagagttatgataaactgatttaggattataaaaaacaattggtatggttttctttcaatcagtgtagtcccacagaggtgggaaacccagtgcttctggttggagtcagtttctcagtagatgatgagatagttacagaatgccaattttcaaagaagacatatatatgctacagagatgcagttctcacttttatgtctgaaaacagtaacagcaaatcaccggatgtggatgagaggaaatcctttttttttattttattttaacctgtgcatcttcagtgcaatcacaatcccgtcaagaaaatcacccatagtgaactgtctttgggtcatgcgtagcaaagtacaggatgctttataaaaggagattctttactcgcagtgcacacgctgggtatgtcttgtctgctgttcatcacagctaccagaactccttaatgtggaatctttgatccagataatatttataaattcaaagcatcccagaccagcctttatctccttgacccagcagattcatttagactttccactgagttgaaatgtttaaaatgatagacttacctggtcctaataycttgctagtatcccaaaaataggaagaactattaaatctttacagaactaccctgagttaagccagagaaatactattcagaaatagtgttcatgatctgatctgcaccaaagttaagaaagtatttcaaagtaattcaagtgtcaggagcaggatcaaatcaggacttggaatgtttaatttgttgttatgtctttaattcatttagccrtcaagcaagtctctattgaattgccctgtcatatataatagaaaacaaatctacttagggaaaacataataagagaaagattaattgagggcatttccctttaaaacrgtagcgcaacagaccttacagaattcaaaatggttgatggcccttcagagagccagtcgagaacgcattaccgtgtgtcaatcttggggtaggggttcatgtatgagaggtgcctctcacaaggcaaagaagcatggctggagtgaaacatgttgctgaaagctaaagctagcacctgagttctctgttggttcttcatctggtgttcagctctattgyttcagacccaaattagaaatatgtgcaaagagagaagtgaattttgaaacatgccagagggtatgagatggcaaggttgcttttgtttggttaggtttatgataagtttaggtagaatatgcacacttgatctcttctgaaagctttcctgaggattccatcagtgtgagggcatacctgcaaggaagcacatgccgcagcctgcacacaggcacgccccactatggcagtagctgaagaaggaagcactgccaccaccactaccacatactgagatttccaaaatcactaacaaatttctccaggctgcttcaaattcagagggatttggctacagaagaaagtatgtgaggctgcatatgtgccaggcctggaggaatttctaaaaagcagctatacatttccacttgttactgatgatcactactcagagcagtcraaagtcagttaataacatgtcacagggatactgctctccactgggctatattcacgtctgcagaaatagcaatgtcatttcatcctccattggccagacmctaatctctgtctctggggtgagaatgaccagcctgtactcttttgtcagagcagtagtggagagagagaaatgagaaaatgctaatgactttgtgtatgtccttcttccttgtccctgttttccgcaacaacatcaacatagctttagcccaacgtgccatttagaccggagtcttggattgatctgtgatggatgccctgtcgggtacacaggaccacgctgtgagaggtaagagtatactacactgtcttgcaaaatgatttctaccttgggagttataaaaccgcagatacaatcatcctttgcatcatcctttggagaaaaaaggccacactcaatgaggtgaaataaagtttctcaacgcacttgtcaaacaaatgcattatatttttgtaatttatttatttttcagaaattgcttcataaatcttcattcactcagagaatatctgattaatgttttaatcttaaaggttaagtattaacctacaatctttgtagaaagcattgctcaagtggaaagtcatgcactttaagatttatcttactgtctgtgtaggcaccatttatttttcataattagctttttgtccttaaaatgtagcttaaatgcatagttcatagttcagcaagtggttcataatttactttaaatatacttgaaaatagaaacaaaatgtaatttattatcatgatttatatcctcttctaattgctcctaaaccagtattttaattcctgttgattttactgggttgctttgcagcagaaacaagagtattattttatgtaatttgtgtgattatatttccttctgaaatgtttttgaagaaataattcttctatatattcagcctcagcataaaagtgatacaaacttcccccttgacatcattgccaaaaacaaaaacctccctctggtttcagcactggaaatagtccctgctgccacccttcctgggagggaggggtgcaaaggaagtgacctactttcactcatcatcactgaggctaaccctgaagagggctgtttctgcccgtcttttcctgtcatcttggcagctatcacccctgtttcaaccaggatgcataaaattaatgaagcaggagcctatcacccagagagaatttagctagcaactagcagtctgtggacaaagtgccaatgacagttcctagcagcaacaagtactatttgtgagtatggaagcatctgtaaattaggaatgaaagaaaaaaaaatgaaacaagcagcatttatttgcaatcaagaaactagatatctttaattgtgtgtgtgtgtctgtgtgtgtgtttaaagaaaggcatgtgcrtattacttactataataggagaacatatcattgccaagacagatttacatcaagtgcctaaaccccccagttcactacaggcaacctttttttagcaactggaaaatgacagctgctctgtcatacaaggctattaaatccacttatctaggtgagcataatctctgatgtacttatattgctttgctttatgtactatactccctatacatgttagacaatagtttctgaaccatctataatttaaaaccctacattttatttaacaaacatctgtttagcaactaccatgtgctgggtacaaggctagacattggatataaatagatgcattttcccatccttgccctcagcacctcacatctttctttaatgcaagtgaggatggttgcttgtattcttgggagaattccatttgaatagtaaaaatcaccaaggagagaaatacctgacagaaagtatgatttcctgtctaaaatctgtattaatctgattcagaagatggcaacatgcatatgcagtgtaatgaatggcatattttatctccagctcaagtttttccacagttgataccatatttttctagccagaatttagattagggttttccaggaatatttaagatttataatttcattgtatttatgtaagccaaaagaacaccttagatagatctaaaatatgagggaaacattttttgtttgagatgtgcctgttgaagtagaagagagggaagataagggtcagggtaaggaggagatactggttgcattaaaaatcttgtaatcaaaaccattctgtaagtgatttgtgtgatcagcttatgcacatcatctaaataagaccagaatttraaaactaaatcaacatttcccaaattgtagatgttcctggaataaagaattctgtgatcacatgagtttgggaagcatccatttgcatgttaaaagttctggcatgtcctacagtgtgtaattaagaaatctgttcaatttgtttagctcagcatttcctaaacttatgtggccataaaccctctgctttaactatatagcaagaatatatctcagactacagctcaggtgggacaagagttataactttatagtctttatcacaatttaatttctattttgagacccctttctctatatgtgggaactgtgaggtcttagaaacataatctgagcccatttcaagttgttttcttctcctctctcccagctwgaatcaaagttctattaagcttacctagtaccaaaggccttatatgcaagggtagaggggagggtataatgtctgtgtgtatatgttgagcaaggggacatgtgatagggccagccagtactgagtatttcacccaagcatgtttctgctgacctatccctttttctccgtcctcctaattacctttcctttcaggtctagaaagtctctcaactactttcattccattcttagaggcacaggaatcattcagcttctttcattccatgctaagacccaccaacatctctaccatcatcatttttccatctgcctttccaaatccatcccattttctatttgaaaaaggatgagctacatttgtggaactggtggctttcagagctcggggtctggcagattcctatgtctctgccttttgccctgtcaaatcccttcattcaaacatgtagcacaagatggccttgcttcttgaatcgagggggtgaagagaaacagtgaacaggggaatggccaaacaagatacaacaaaacatggattggtattctgtcacaagttgaacactagttacagcttggaaaacattcacttagggccaaaacaccactatttttgaggtatcactgctttgctggggaatgatttaaacaaaggaaaaaaaagagtcagagagtgaggggagaaggtattcatgatgatacctttgctaagattctagacttttatcatctggacaagaggagaayaaaaataacaaagagacagaatcttgaagggctaaaagagattaagtaagcaattggaatatcaagagcaattaaaaagactgttgagctaaaagtgagtcaaatgctgaggatacctgcctgatcggacactaagttactttcagaataagtttgtaacctcagcaacatgtcatacattatggagaaggcatttcaaaaagrcaggcaagttcatctggtggattctataggacaacatgaaacttaatgggatacatagacttcttaagcyctccccgctccccagctggcaaatttttaacaacttctccttaagtgatgagagaggggtcaaaagccaggactaatctcacaattgccactgaaaatgtggaaggtgtttgaayctaattgcttaatattttgaaaattcatctacagttttatcctcaagattcatactagatatcaaagaaattcctttttgtatcttaaatttcagttccaaaatcccatttagattttgtctgcttcagaatgtctgaattcgaatcaagtctaatcacccctctgcttactatgctcatgggaccttctattcacttgtgagtctccttgtgcctttgggtcctgaatgcagagcatgggctacagaaataacagaggaggggcagttatacctacctgtagtactgttagcaraattgtgactccagttgaggtgtcaagaggccactcatatgtggttgtgcagtttgtacactgcacaaaggcactcagggaaggggaagattgagggcttgaatccagtttaccctcttcttttccatgaagtccctgggtgtctagtctgtttactttttctgcatatgtctagaaaggacaatttcttccaacttgtaaaaggcaccatktgagcagggaaacaccctcagtcttttgctgattatgtcaaatgggaggaagtaagaacacagcattacagccacgmctctttatacagcagccaccctcttctgtgcctttgccaatacgttccctctgcctggaagattgcagccctttcactcctccayccgagactaactaatccctgttcagctcccaaaagtcagcactatcatcctgaaaatgtccttgattgggcctaatctgagttggttgcccttttgtgtgctgccataatagcatttgcatatctccagttgttctactgctacgttttaaaatgtgtgttcattctccatggactgtagtgtgaagactgtaccttatttgtattagtaccgtgtaaaagtgctcagctgattttttttaatgggttgggagaaaccagagcttttctaatttgcttggctagattaagccagcattatattgtttcattgttttcagtgtatagataatagaaatgtaggccgtgattttagccaaaagttgctgaaaaaatgatggggcagaatgagacaaaagtctcatcagtgtggttgctttcttctcattgttgcttgtctgcacgtccgctctttttctacctctccctctctctcttcctctctccctccctccctctaacattgttcctaaattatcaatagcagcaagtgtaacaaataactgcatgtgttatctggagtcttatttacatttaaacggccctttttcaaaatattgcaatttgatttgaaaaagttaacagatgtggaaaggaacaatgcctttgttatgtcaagatrtccgtttctagcaaggcattcattcgataaactatttttaaaaatgcactcattctgccttgcatatgaaaatgagagggcttgacatttcacattacaattatttttggtggagtgaaaaaccaaaggactgtgatttaaactaattttaattaggtgaatccaacttgatcagactctaacacactatttttattaataaaagttatatgattagcagtattatattctctgaccctcaaattactttttaattcctaacggaacaccttcagaaatctctaatactgttctctgtatagaaacacacacccgtacaccagtaatgtgctgaagtgttgcagaaaatagtcccactttcagtaacatggcatatgaattttctatcacgtatattcacaaattttccttacatgtcctgcaagaaaaaataaataaaagacagatgcttctttagttattctatttaattatagttattttcctcctgaaatgagtttttttattatggagaatttcagtcttattaattgctatctaagttaagaaaaattcccagatctcgttatataaagctatctctccaaagggcagtaactcatcttgaggaaagtgagctgaaaataataggttttcgtttgctgtgataatgatcattgtatatccttattccagtggcacaaagtcactctcttagtggtaaacaaaatgagatgtgaatatatgtggatgtgatcataagctctgaatattaaataagacaagaagaatcaggttaaaattcaaaagaatctccttcttatctttatcaaatgcctctcttgaagggattttgggggaattttgtgcactcaaattttattgcatattttataatacagaattaacaaacaattatatctgtggttggcaatattcttctaagcagtatttatacaactcataagtgtataaaatcttttgtgaatataagtaatttcattttaaaaattatgataaaacatcaaatctatgaattatagtacctaagtacctatacattttctagaaaacttagaatcatcaatgtatctgcaccaaattaatggctctgccccagaattgggatttgttaaagtactctcaatataatgtactggatttaaaccatttttatttcaaatggtagagagcctttctctaaataatgactgcatatctgtgagtagatgagcataaaagtggtgtactactgaggaaattatattctcccacattgtttttgatccccttcaattttgacacttgctgcaaaagactttatcttgrtaagatggcaaagataacagagctagcctgaccataagattcagatgccctgttctgtttctcctttggcaaatgtggcttagtataaagtgtgagcaaatgtcattgaaagagaagacagagcagaatataaataggcgctgcctataaggacgtttctgcacacctgtagcagtaagttgcattttaaaacataacatttaggtcagagaaaatttgctgctatcgtttttaaaaatcttctttgccatgccctataaacaaacttttgtttttccaataatataatatattatataaatagttttatattatattatatttatataatatatataataatatataatatattatatttatataatatatataataatatataatatattatatttatataatatatataataatatataatatattatatttatataatatatataataatatataatatattatattatataataatatataatatattatataatatataatataaatagtttttggtaagaaagaaagagcaggagacaaagaaagaaagaaaacagagagggaaggaaggaaggaagggaggaaagagggaaggagggagagagggagggagggagggaggaaggaaggaaggaaaggaaggaaggaagggaggaaagagggagggagggarrgagggarggagggaggaaggaaggaagagagagagagaaagaaaggaagaaagggagaaagacctggagtttgctaatagagttggcaggcacagttcagtatcaccttatggcatattcctataatatgcaggcatgctttctcagacttccctttagtaaagccttcaatgaaaatttgcctctgaattcatatgcaaatacatacaaatagattattaattcagatatacccacagctcccatccaattaataagaatcttctgagtcacagtttctagttaataaattctgaactcttattactgaatttccttgcgagcctgtttcctcataacaagttctggctgcaacaacaacaaaaaatgtgaaccttacatatttgtagagaaaataaccaattggagtagagacatatgatgtgttgtactacaaaggctttccaacatggacctggattcctccagagtgccagcagcagattcttattatgctttggtctcattttcagtgccagtgacaagattatatatttttttcgggctgaaatctaattactagtgggctggcaggatatcatcttgtatctacactgcagttgtagaaaaacatttttttaatcaygttgcgtttgagaaaaggaacacttaaaaggaaaatccatcatcctgggagaaggggagaatgaaaaatatgtaaacattgccccaactgaggtccccccaaaggctcactgatgaaatttcttgccttaggtgtgcagaagrctattttggacaaccctctgtacctggaggatcaygtcagccatgccaatgcaatgacaaccttgacttctccatccctggcagctgtgacagcttgtctggctcctgtctgatatgtaaaccaggtacaacaggccggtactgtgagctctgtgctgatggatattttggagatgcagttgatgcgaagaactgtcagcgtaagtcctgaactattgatgcccctgacagaaytgatgtattgtacctcaaagtagctgatgagttcttgagtgtggattgaagagtaggaaattatgtggaatacatggttgatagatgcatagaatatacagagtctgcatattccagaacatttccttgtactaactaatagagtaaatacctttaaaattgctgtggtattgaagcatcactgttttccaaatgataaacatgtttttatttacatgcggaaggaagatttttttaatgaacttatgtccacagcaggaaagaagaatttgcatattagatagacaccatgtatccatttttttatctcaattctaatcacttgctttaaataattttttctgcccatgatayttcagtagtagccatcagaaggtgttaatcagttatgctttcatatgttaactttacagtgtcgtattttgtaataggtataaaattctgccaatattttcgcacacaggcatttgtcattgttgaatgattaacctcattttagtttcataatagtcatttaaggactatttctagaatgctctttcagtgttttccttccacaaaattagctactctagggcttcatccatattagtataatacatttctcccctctttaccttttttgctgtattaatactacatagaatttccaaatccttaatgtcagtgggattagaatatgaaggcggatcttgttgcagaagatcaaatggaaagtgaatccaatgttagcatttggccatcatcagcttcatttactatcataatgtttaagcagagtaggttatgagaccagcctatccattcatttctgtcaaatttatgtgagagactcttccaattattcaggtgggtcccaggacatgcagaattatagaaaccactgtaaatgtagcctattatcaactctactgtaagcaccaaagacccagtagggtaccctatttcattaagaaatgtgtctctctcatcacaggtttagaagatgagttctagctttttgttatttaataatgataattcrttgaatcaaaaccaaatcactttctggaccaactggcagctgttaatataacctgtaaattgatctttttttaaagcaaaatttccaacagctcagtgcctttaaacactggattcctgacaaatgtataaaatcatagaaagcctaagaaattcttcctttcccacagatcatctaggatctacattttctagctgtgtgctcctgagcaagatatttgacctccttgagacacagttttctagtctacaaagagagtcatgaattttctgtggggactaaaggatttggcacatagagggtatccagtgagttcccargtcctggagatgctcacacatggtagctgtctttggtagcagtgctcatagtagctgtgcatatcagttgttcaccagtgaattctaaggctaagttagtcatttactgacattttatcctgtcttccaataacccccacccccataaagttagggatattattccactaattttattatggtaatttattgtgggattattttattatggtaattaattattattttattatggtaattaattattgtagaaaattattatgggattattttattatggtaatttattatgggatccatggcatgaagtcttaagaacataaaaaagaatgtgagaataaaaacattttgaccattaccagttttcatactacttgccgtgagtatagatgtgattataatttttaatgctctttgccatataatcacaattaaaagtataagaagcacatttattacttatttttataatttttcatggatacaatatcacttctatgcataagtggtaaaacctcaaggaaagaaagttcctggaaatacattattttggttacctatagatttgttcaagaaaagtacaccactacaaagaaatatattttgcattttaaatttgtgtatatcgttggtgtcatatttttccattaaaatgacactttagcaaaactttatactgctttgttgtttttacgataacattaattaattaccatcatatttatggtaaatttaattttgtagtttacactccaagaaaaagtgactcctaaagtctaaataatttgatattttaaaaatgtatgatatgcataagaaactttcataaaataataaaagtatatacaaattcgataaatcagatgaaaatggatatttaaaggaaaaattttcagcctttccttgtatttcagctatagactatccgtaggctctttcagtttctcaatggcccttactctagtatccccttggcagacactgaagacaaactttgctggaagataaattaagcagtttttagaaaagcagttcttttgtttgtttatttgtttgttttttaaaaggagaacctagagccaggagaataaaatattagcataggctgatagagtacctgtttatagcwtaattttaggttgtgttcaaatcaaaatattcagaaatttaacaaaatcatctatgagtagcctaaattcccatgtcatctcctccttgtatttttattctgatataaatgcaattatatgtaccattaaaaatatagggtacatagtaaacaattaattactattctatttgtgaaaaggtcacttaagctttagactgatttactctacgttttagaataacctcagacagctttataacaaagcaaaaaagacaaaagattacttaaatgaaatatgttttgtatgtttggagatagcatataaactgtaaaataaaagtgattcttaaatgttataatgctatagtcttaagatacttgaaatgatgtttttgttgtcttttaaacttctgaatcttaaaaaaggcataaatatttcacctcaaaccattttttaaacttaacacaaaaccggcacacagtaaatcattaaatcaaaaaaactaactaaayttttctagattaatagtaacattaaaattttgccaggggtgctattaattttgaaaattcctcaaaaytattttagttctaaagtcagtatgcattacttacaatgggataatagtattttaagtgttaccctgatgtatctgtaaagaactaaaacagcgttacaccttgagtcaagaactccaagttcctgtcacgttctggactcacctatatgacacagcaggcatgtggacttgtataagctatggcttctttgaatttcagtgtcttcatgctcaaaattggaatgatgatgatgacattaatattttaatggcatatgatgggccagacatgatgctaaagcctttatgtkaattatccctacagcttgtagagttgttatagggattaaatgatagaatgcctaacagggyacttaacaaatcagaaaacattctgttactgaacttaggcgtccatgttaccatgtggggtatattattatttaacaagcctattaagactattagaaagttttcctgatcacaggtctctcttctctttgcagcctgtckctgtaatgccggtggctctttctctgaggtttgccacagtcaractggacagtgtgagtgcagagccaacgttcagggtcagagatgtgacaaatgcaaggtaaggagtagaggctgacccataaattactttctccttacagattttcactggcttttcatgacatgttttgtataccttcgtatattaaaaggaaggtttgggattatctaattctacaattgaaatgactgtgatcagtgaaaagtttttttcaaactagaacaaaattcattgtacattaccatttgaccttaaacatttttttttggcagtgaatgtgtattatattcgctttaattcagacatttctgaaacaaatagcaggcgaatttaatcttaatctgtggagatactctttcctttgcctttacatttttggcagaataaaatgttactcttggggctgggcgcggtggctcatgcctgtaatcccagcactttgggaggccaaggcaggtggatcacgaggtcaggagttcaagaacagcctggccaagatggtgaaacaccatctctgctaaaaactacaaaaatcagccaggcacggtggcaggtgcctgtaatcccagctactcaggaggctgaggcgggagaatcgcttgaacctgggtggcagaggttgcagtgagccgagatagtgccactgcactccagcctgggcgaccgagtgagactccatctcaaaaaacaaaacaaaccaaaatgttactccctttgctttttagcaaacaccttcttctagttccatcatttaaaagctacttcctgtgagcagtctacctaatggaagtttcagtagagaagttaatcaagatatttttaaagatgcattattttgctaaaacaaaatattcaattaaaatacarcatgttgttctcagtccctgaacataccgattgccctgctttcagtatggcaagcaacttcagattcctccatgagggtggacagatttgctctagcgctttcacaaaaatacattgtatttgtgataaagacagctaagcagaagcaagcatttctccgatgtcaaactggccttactgtaggaagtttgaaaatatcatctgcttctgtctctkgaataatatcattgctctgttttgtttttattttattttatggttggtttttaaagcccaatatgtggcgggatccagagaagcgattctgtgtgctatgtgactgcgatcccgttggctctgtgtcaccgcaatgtgatattacaggaagatgtgtctgtaaatcaggcttcgtagggaaacagtgcaacctcggcaggcaggtgcaccaacaggaggagcagccgcggagagcgcaacgggtgctgggttctcctcagaggtgggctatcggcagctccagcgggtgccctcggggagcctatcgggccccagctccggtaatcccagaggcgctgcatggctcatgcctctgcatgttgtgttctgtgtgctgtggctgaagttccctggtggcattttaccaaataacagttgctaagtgtgcaaattgcaaatgcaaagattagacaattcctaattgaacccttgcccttttaaaaataaccatccgtatgctttaaaaagcatattcaagttcatagggtcataaaactttcaattaaccaaactttcaattaaccatgaatatgtggaaatcaaataaaaatctacttgagagaacctataatcttagaaatggaagagacttcaggcaacctttggggaaagctaactttaataaatgaacaaatgaaggaaaatctagcagagaaattgatttgtccaagaaaactcagcccatttatcaggcatttcatcataattaagaattttgttaatttccacatcaattgtgcttatgtgtacaacaaaygcaagaaacacattttcacacactataaatggacaaatacccaaaacggggaaagttgtttctaattacaaaagtgtggttctcatatcacaggacaaaacaaaacaaatgctggggaagaaggaagagagggagggagggaagaagaggtcccaggctgagctgcagaagagtaggagacaagacttaccagtatagagtcaggacctgtagagaattgaggatagggcatagaagaaggagagatggaaataaaaagtaaagaagaagaagtaaaaaacaattcatggttttatttcttggctcattatcacacattttttaaaaaacaaattttgatgtcagactgccttagatcaaatcctggcctcattacttcctagctataaattccttgaatctttctgtaattcagcttcttcatctgtagtaagatccacttcagagggtttatgtctgcttacgtactccaagaagcaaatgccaagaggtttcctgggggaaaggccaacgaagcatgaagtgggagacagcatagccttctgctgcaatggggttctgactcccgggaaaacacagaaagaaagactgggtaggaaaagccttgtttggtgcattttgtcaaatcttaaattcttggccaagccaatgggatatacccaagcaaattttacccactaaaggaatcctgaattggtcagggaggttctagtatcttacagtaatcagcctgagagaaggatactcttgtggaagctcatcttaattcattcagagtgctataagagcataacatagactaagtggcatgtaaacaatggaaattcatttctcacgattctagaggctgggaagtacaagatccaggtgctggcagatttcctatctagtgagggccctctttctctagacagtcatttacccactggaacctcacttgggggaggaaactctctgaggcctcttttataagtgcagtgatcccattcatgagagctccattctcatgacctaatcacctcccaaaggccccacctcctgtctataccaccaccttgagggttaagatttctacatatgaattttgggggacataaacattcagtccattacagagcacctctgatgggtccaaaagacaagaaactggaggctttcagtcagtaaaattccacactgtaggttgtcttgcaggtagatcggatgaggcgcctccaaggctgtctcagggtagcagtgagaacagtgcatcaggcaggagcatagagagtttttagtaaatgttaggcctgattactattattattaccaatgttgttaaatgaagaaatgtttaaaataattttttttcaaaaacaaatgcatacatttacaataaaagaaaaagataataactgattaaaatgtctccwaaatataaatttagcagaaagtcaacgttcattcaagccctacatatcttacagtactattgtatgaagcagggttttgtcccgagactattttttcctctgcagcagtatgtgtgagagctgagagctcagactctggagccaacctagctgatctggaatcttgactccacaattggttagctcatgaccttaggcaacttacttaacctttctgtgcctcagtttcaccactcaataaaaaagtggtgagaatgacaactstctgccagggttgtcctgaggagtaaatgagtacatatttgtaaagagtttagatttgtaaagggtttagaattttagaattgtgctttgcaaaaaggaagcacaatatatgaatgctagttcttattaccccgagagagacacatttatgggaacctatmcagtttctcactgggtctggatagccactctctcccatatttattttacctcattaatctcaattactgaccatgaatgtctgctccttaagtttgtttactagtggggttttctttagcctttgaaacaaatttttgaacaaatttgtaaacattttattactgaaatttggtagtatttattttgctacaacttagcctttaaagctacattatttaaatatttgaaaagtgaggtagaaccgtttcttcttgtatatttccttacataatcgactttggaatttttaaaatgatagctataatttggaatctcatttgatatttgattgatttaaaggggtgtacacacacccctttaatgagtaaatcaatatgagagtgtggatatatagatgtaaatatatatgagtaaatgtatatatatatgagtgtgtatatatatatgtgtttatacatatatcggcatagatatatgagtgaagacaatttctgaaataaagatgaatacaaagtattatttctatgactcagatatttttcaataccgttttaatatattatgtttagtctttttgtctatgtatttctgtttctgtttgtgtgtctggtggtatgggtatgtaattgaaatttacatagtatttatatagtttcatatttttgtttaatttctatttcatgctatatcctaagcatatttatatcattaaaactgcttcaaaacaggattttaattcttgcatattatttcataatgtggatgtcatcatttaatttattcaacaatttttataacattgtacagttaagtgcctgcatagttattcaccatgataaataatattgtaataggcatgcttttgctttaataatattccaatttctgattatttctctaagccaggtatctaaaattttacatgaatttcttttactaataatgatattatatggttagttttttttatataggtgaatttaatttcaaagtcatgtcatctgttggaactgttacatgcttttttctttaatcatataccacaatctgaattagaactagaaataaaaataaaaccaacagtaaatgtaaagatgagaatgatcgtcaaactcagtcaacccattttacattttaaaaataaaactattcttagctacggtcattttaaaaatctaattttcagtgtgatttcacttttataacttatttttaaaactactaacaataatatctaaaatatataatgaggcttattaatttctctttgggtggctcacgttaagtggcaagatttttttttaccaagaagcaattattaagtctaattttccaaaataagaattatttttacaaagaagtaattaccgagaataattttccagattaaaatatcataataatgtgacatgctttatatttttaaaaaataaccctgaagtattttaagcaggatagatgattttcatttttctgctcggagtgattttttaatccatcagcattttctaacgtttcattttaagcctgataacatgcatttcaagaaagtcagccgaagctggtaatgcaaacttgaccgtaaaagatgatttgttatagatagataagagatatgcatatgaataactcatcagagaatgaaagtttacttacctgatctggtgctttaatacgtgttctcactaatcaatttcaattgttagaatgaaacctaagaaatcaaatgtttgttgaaccaattatttgatcagtgtaagcataacctgaaaattatatttataatgtgaacactatagcaatgattaaaagtatttatggatatgtgacaaaattctatcaaatattagggcaaaaaggattattttaactttaggctgctggtcaataatgttgaaagtatttttaccaagtaggagtccatagatctgaaagtaatcaattcagattactaaaaatgaagaagtaaaattttaaattaagactagaaataccacctataggtcctttccatattgctattgaaatcttgagaagtactgggacaggctggtgaaaatacaacagacagtaaaggaagcgcctaattctgcagttaattttgataaaatttcagaataattgaacttttctctttggatatcatagaaaaggtccatttgattgaatgaaaacccaattgtcataacatcagtgaggaatcctgataactcctaagttcctctgttcccacctgatctttggtattgtgcatcttgcttcacttcgagttaactgatttaaatttaatttttctctcctcttccattgccaggctgggacctttggcctacaatcagcaaggggctgtgttccctgmaactgcaattcttttgggtctaagtcattcgactgtgaagagagtggacaatrttggtgcyaacctggagtcacagggaagaaaygtgaccgctgtgcccacggctatttcaacttccaagaaggaggctgcacaggtctgtaaatatgacttaagtcctacatattcactctgatagttttagrgtctgacttctgtaacagtttgttcttttaaaggaagcacagattgatacaacgtatttaacataatgagtaatgtctacttatttttacrttacttaaaaaatgaaatacatgtcagtttgaaacactgccttaataactgtgtgcaagtactcagtaaaaatcagcagatgctcktttggttgtgtccctccctgtctgtgactttgattcagccagtcactcaaacactgctacggcttgaaagttaaatgttcgatttttctggtaccagtcttatcttagtttaagctcaaaccccacgccaatgcatttcaactttccctttttcctattgcaaaattggtatccggatcaagaaaagtcaaggtgttttttttttcctggtaccccaaaaacatcttttcatctacttttggctgccttgaaaactatgatgttctaagagagaaataggttggctctagatatttagttcatcaaaaaatgcaggcagaggtttctaaccatgattccctcaagcagtattcttatacatccagccacagccttcacccaaatcatgagctaagaaaatatcacttagcattctgcagatgaaagtaaagagtgaacattagccttgatttatatgctgctaatttcgaactgacccttattccaacaatcactagtttgaatattacctttgtttactaatgtcatggattcaacctggataatgctcacatactctcagcaccatggtaagattttaaaacattgttattcactgttgtggcaaatttaagtaggaagcagtaggaataatatttaaaactatttaaagaaccaatatctttcagacattctccagcactttagatatgtggattttaccataaattaagccatgataagttattctaattgataagttattctaattgataagttattctaaatgataagtttataattgtagatcctctaagaatctgtatatctctaagccaatatctgtataacttaaaaattataaagctgtattttaaaatatactctgttctttaaatccaaarctcactgacatttttacttaatatgaattaatgaggtagtattatacatttaaatacatatagtaacaaattataaatgagaccaagaatattattttaaattatagaaagatgacagcatttaataaatgcagacctactagcattctggcccaaagaaacaccatagaaaaaaaaaagcacaaaacaggaagaatagtaatatgactgaggacatgacttgcacaaaatagcctggatttgtctaaatggctccttcagtaactagttctgggaccttgactgagtaattttgtttcattttccatctgcaaaattcatctattaaattaagataataatagtatctaccacacatggtttttgttacaattagttgagttagcggctataaaatatttagagtaatgcctagcatgtaagtgctatggaagcatttatcattattattattatctttattagttttattaattgtgttatacattgtgctttggcacaggaaaactagctarttactcaggttttctttctatttagtgttatgattccgctgaagaactacttaagataatttctatttgcaagtaatgatttgcactgtcccatgacattttttagcatataaatttaaacataatggtaactatttttcttcttaatgaaggacacatctaaaataaatcatttggcttaaaattagcaacaacagyaataaccaaaacagcaatgactaacatttatttagtgtttactcggtgtaaagtatttttctaaacaccttccacagctggtgtgtaatgctgtgagcaatgaatattgtcatttcataaaaagtgaatttagtcaaatattctaaatatattcagtgaaaatgatttagtcatcatataaccaattaaaagtttactcataacattagtcttccatttgaattcaagtatttgggtttcttccctcacttacatttctttgacatgaaacgctgcactagaaatattcttagtagctgggtcaactgccgctatgtggcatgcattccttgtcttggatggctttgaagatattctcaaacattatttttgcaatctttgaaaaagtacaaaaggtagataactttgtacyctttgaatattgcatgatagcaacaaaaatgaaaaatctatagaaaaaagtcaggtggtaaataaaaatcgaaagtatctttatatataaacagtgtccataattcaaccattttaaagtatttgcaaaattggattattctgttgtgtgcgtttctaactatatacatgatgtaccgaatttaagaagcttattaagcttattrgtttttactgcagatcgggctcatcaaggaaaaactaatccgtacagcataaacaaattagaaatgaacttaaaataaatatacaaacaaaatagtaaactttgtagtacccgaatataaggtgttacagttaacrtggaatctgataacaccaattctttcctttcttaaacttcataggaaagctaaaaatactttaacttttgaaattaataaatgaaatacatcttatatttattgaacagctcctttctgaaatacattgtactataatrtaaaagatgaatgaagtaagtttttatttccaaatatccttaagtgtagaactgaaaagaaaataagacaaaccaacacaatataaaactcaacactttgtgtcaaatttttactatttttccccttctttgttttccctcttataccggtgaagcttgtgaatgttctcatctgggtaataattgtgacccaaagactgggygatgcatttgccctcccaataccattggagagaaatgttctaaatgtgcacccaatacctggggccacagcattaccactggttgtaaggtgagtgaaccacttttttgctctgataattttttggrgagatttttgttttgtagagctctgtaaytgggcatttcaaaattcaatattacatcacaaaataatgtagaagtattactataatgtgattacagatattaatcaatatcttacagtttacttgtaggaaagatgatgaagtaaatatacatttatgcagctgaacacttgaaatctacaagaggggtaaaaagaacaaarattctgtaataataccagaaaagagctataacctcatacctaggcacaaggacatacatgtgcaaagtatgaggatatgaggaactaattaattttccaaaaatctatagaaattgcccctgaattatgactaggttttaggtttcaggaagtagttgagatcattctgaagagtcattttaacaacatttagcttggaaaataatcattttttcccattggtagaccatagaaattgacatggccagagtcatgttcagagagatctatctagcatcagcagggatggtaacaatttataaggctgttgaagaaatattaataagagatgccaaaagcctggacccagtcaatgagcgtcagtgaagatatatagggcgcgagttacattttagaactcaggctgatacagcctggtgaattcattgatttggggaataagaaagagaagacttaggatgactcctaggttttgctttgcaatggagtagatgataataagtaccatgtgcagctataggaattataggaggaggagcaagttcaggaaggaaagataatcactttgcatttttatcagctttttgtgaggtattaataaaataaaattcacccatttatagtaatgaattttaaccaatgattacagtggtgtaatcatcccttgtgccccattgcagtgaagtccccatcaccccccatgtgcctactgttttgccttctagcattataattttccaatttctacaacttctkaaaaatagaatcgtagtctgtytttttgagggggggtttgtttgtttctttgtttggcttccttcacttggtgttacgtttttgtaattcatccatattgttgcatgtatcagcagtttgttctaaaaattgcttaataatattccatttgtgtaatgtacagtgacttgcttacctgtttaccatttaatgggtgtttgggtmatttctagtttggggttacaattttgctgtgaacattagcatacaagtcaaaagcatatttatggacaaatgttttctcttttttttcttaagaacactccacatctttgccaactcttggacttttaacccttttttaattttaagaattctgatgcatgtgtatttctcttgtttgcatttatttaatgcccagtaatgttgggaatcctttcatttatttatttgtcatttatacatcttttttgaagtgtttacaaagcttatgcccatttctattttgagttgtttgtttccttagtaatgcattgcaaggattatttatatattctggatacatgttctttaacrtatgttaaagcttgcttttcatatagattgctttttacctagtttcatcatctaatytttataaacactagcttattatctttttcttctatagtccatactttttatgttctacccaagaaagacaaggtccaaagatttctctcccatgttttcttcaagaagttttagagttttagctcttaaatgtaggtttggattccattttgaatattaatttttctatatatcaggtaatggtcagagctcactttttatggatacccaatttttcaaacattatttgttgaaaagactatcctttttcccattgaattactttgactcctttgtcaaaatctatcaactatatatatgtttatgcatttctggactcttttctgcttcaccgatctattcttatgttaatactagttaatatgttaattattgtagctttccagcaagtcataaaatcaggtattgtaaattcctcaacctcattcatcgtttccaataccttttgagtactttagctcctttacatttccacataacttttaaatttagcatgtcaattctttaccaaaaagcctgctaggatttggctgaaattatattgaattgatagatcaatttgggaagaattgacakcttaaaagtattagatatcccagtgtatgaacatggcataactctgcatttttttaggttgttataattttttctcagaaatgtttgtagtttttgatgtgcaagctttgcatatatattgttaaatgtatccgtttcatattttttatcaaaagcaaatgctgtgttccatttcagttttaaattgcttgttactagaatagaaaaatacaattatttttataccttatccttctatactgtaatcttgctaaacttattagttctagtttctttttggtccatttagtgagattttcttgtagataatcatgtcatctgcaaagagagatttacttcctttctaatctgtgtaacttctgtggcattttcttgtcctattgtagtaaactattgactagaagtggtggaagcaaatatccttgccttgttccttagtttaagtggaaagcattgtcttttataattgaaaatgatgttggctatattttacctgtaggtgctttttattgttttgaggatgccccctcgtgtttttagtttgctaagagcttttatcaagaatatgtgttcaattttgttaaatgacttttctgcatctattgagatgaccatatgatatttctttttaagctgttaatatgacagattatactgattgattttcaacatatcaatccagtcttacaatcctcagattaatcctgcttggccatggggattatccttttaaaattatgttgaatcctgtttgctagcattttcttaatgattttggatctacgtttataagaaatattggtatgaacttatttttcttgtagcgttgtcgtcgggatgaggtactgcaagcttcatgaaatggattcagaagtattccctcctcataatttataaaagcgttttcacaatcaatgaggtagaaaacagaaatactttagaggaacccaaaagctcactatttgaaaagatcagtaaagttggtaatattctagaaaggttaatcaagaaaaaagagagaagaaacaagcaatcaaaatcacaaataaaagggggacatcactatagatcctatagacattaagataataatatggtagtaataggaacaagttttgcctaataaatgtgataacttgcatgaaaagaacattccttcttttgcttactttgagtttaattttctcttgtgttccaagtttttttgttttttgttttttgtttttgagayggagtcttgctctgacccccaggctcgagtgcagtggcagatcttggctcactgccagctccgcctcccgggttcacgccattctcctgcctcagcctcctgagtagctgggactacaggtgcccgccactacgcccggctaattttttgtatttttagtagagacggggtttcaccgcgttagccaggatggtctcgatctcctgacctcgtgatccgccagcctcagcctcccaaaatgctaggattacaggcgtgagccaccgtgcccggccaattgtgttccaagtttcttaaggtgaaaccttagatcattgatttgtaatcctttttctctaatatgggcatttgatacatttttttccagaaactactttgtttgcactccacatattttgatatgctgtgttttaattttcacttggtttaatataatctttaatttattttggggataatgtttagtttctaaatatttggggaattttcaaggtatcgttactgttactagtatctagtttaattctaaattgttctgagaacataatctgcattatttcagaccttttgaaaattattgagatttgttttatggcccggaatagtgttcagtttgtttattataacatgtgcacttgaaaataatgtgtattctggagttgttggatgaaaacttctatataggtcaattatccttaacggtttttagatctacatgttctctcagttactgagagtgttggactataactttgtccgtttcttctttcacttctctcaggttttattcacatgtatttttgagcagtgatactaggtgcatgaacatttaggattgctatgtctttttgaaaagttggtgccttttgacattgtgaaatgtctctctttattcctagtaacattccttgttcagaagtgtactttttctgatatttatatagctattgcaactttctttttaatggtgtttgtgtggtatatatttttcacaccatcatctatttcatctccctttttagtattttaatgtgtgccttttttttttttattctgagacagggtcttactccattgcccaggctagagtgcagtggtgtgatctcagctcactgcaccctccaccttctgggctcaagaaatcctctcacctcagcctccagagtagctgggactacaggcgcatgccaccatgcttggctaatttttaagttttttgtagaaatgagatctcactatattgcccatgcttgtctcaaagtcctgtgctcaagtgatcctgcaaaattctgggattacaggtgtataccaccatgcctagcttaatgtgtgtgtgtgtgagagagagacagagagagagagtgtgtgtgtgtgtaaataacatatattcagatctttatttttcaacgaatcttaataatttggccttttaatttgaggagttaaatcatttccacttaatgtaaatattggtatgattggattaagcctgcactttgctatttgcttttgcttgccttatctgctcttgccttttttttttccttattgtcctgccttcttttgcattaatttgtataacatcttctcttgacttttggattattaaatatacctattcattttatttctttggttttgtctaggaatatacatctttaactttccagaatgtacattaaaataatattataccactttacatttagcgtaagaaccttacaacaggaaacctccagtcccctttcctatcctttgtactatattgtcatatatttttacttctatatattatacatctgacaatataagcttaygattttgatttcaatagtcaattatctttttaaacaagaaaatttctcctataactctttttccttgtgtatatcaattttaatgctttaaattcctttgtgtacattaaaattttcatttcatatcatttttcttcttccattaactacttcctaatctttatcattttattcctgttgtttcaggtctgctgacaataattttttccttttttttttttttttttttgttccagaaaggttttttttttttttccgaaratgtttttgcagagtatgtaatcctaaatactggtttgcagcaatttaattatgctttttgttttctttttgtgtgtttaataattattttttcatgggattagttaratctgttggccctgtaggattatagttttcatcaaatttggaaatgaaagttgtcagccattatatctttaaatatttttttgttcttcattcttattgtctctttctggaaatcattttttgtatgttgggccaattgatattttcccccatctcactgaggttcttatttttttaattatttttgtatctgtattttttatttctgatagtttctattgttaagtgtccaaagtcactgattttttaatgcagcctaacctgtttttaatccaattgagtctattttttattttaaacattgtatttttttatcttttaaatttccttttggacattgtatatcttttatttctctactatactcacattttttcatttattcttgaaaatataatgtttataaacattagcatttttaaaatggtcatctgcaaattccatcttttttattgcaggactattcctactgactgacttttctcctgtttctgagtcatattttcttgattctttacatgcctgataatttttatttggatgccagacattatatacttttcattgttgtgtattggattttattgtatttctttaaagaatgttgaactttatgctggcaaacagtttaggtagtcacgggtcacttggattcttttgaagcttgcttttgagttttgttagggaaggtgcagcagaacagtctgaaagcccttctactaagctgtgaaacttctgagaatactacctagttggttactatgtctctttactctggctgttgaaaatatggcttattccaagctttctctgggctgtaagaatttttgcagcctagggttttccaatgccattttccttcatcccatgcatgcacctatcagcattcagtcaatgactcaagagaacgcttctgcacatctctggaattacctttctatctaacttctttctttttgaacacgtattctatttgccatcataagtttcagcagcctcggcttcctcaaactccactctttgtctctcaactcagctataatgcrggctttgggtttaccctctctgtgttgcagcctagaaattgcctctgtacactgcttcatgtttttttccttctctcagaaatcacagtcctgtgcttcctataattcaatatctaaaaacarttgtttcttggtttgtatttttattttagttggttgtgtactttaacagcttaacaaagaagaataaatactgtaaaaactaagaagaggctgttcaaaagaagaatattcttcagtgcctaatgcaacacaaaggtcaagtaggattagtgctgaagttgttcattaaattgaagagcaataataagggcatttttttatgttagtgggagtcgttccaattgattccactgggttgtgaaatattggaacgtgatgaccaagtgtggtcctgtttgaccctatagcagtaccctatagagatgtaaactttttttcctgctgagttagcacagatgaaataatagactctaaccaccttcacatgtatgataaaacatttgaacctggtctagaatatgctgacctagaggaaaacaagcatattgatgattcttcaaggaagttcagatgtctgacttcaattagacatgtgattagaaaaaataaaaactggacaggacattcatttttctattgtcaatagcattattaagtttaaaatgcaagagagctacatttttagaaagaaatcaaaaactcctcagaatttcaaagtgttcttatgaatatgaacaatgctataagtgtctatgactgacttttgcattttcagcttcaaatccaagcatccaccatatcacttggactcaggagtaagccctagggaaacttacaagagttccgttttatccacagaatgctatgatatagccaaactctaattaaactcttgaaattgaagttgatacctcatgttcaagatataaatcaggataaaatacattccaagtttctatgaaaacgtagttatatgtttagtactatcatttttactgatcattagataattactctgttgactaaagttgactgaattttttgattactttaaaatcaccatcaaaagtctagacttctgaatcgagaaatacttcaccattatgaagaattacaaaaaaaaacaaaactcatagagcctgtatcagacaattcttgcattgctataaagaaatacctgagactgattataagaaaactggtttaatgggctcacagttctggagggtgtacaggaagcatagcggcatctgtttctggtgaaggcctcaggaagcttccagtcatgatggaaggccaagcaaggacagacttccacatggcaggatcaggagaaaagcagggatgccatgcatttaaacaaccagatcttgccggtaggaactcatggtcacaaggacagcaccaagccctgagggatcagcccccatgatccaaacacctcccaccaggctccacctccaacactggggattatattttaacacgagaattagtggggacatatccaactgtatcagagacctctcaagtaatttatttatgagcatgtgttttactgtttttaaaactgggatgactttaatttaaatgaacagtgatttgagatttatagcttccctttctttrtgtcatggataatttctctgtgctaaggtgtgagcatacacatcatttgggctgttaytgaagtagaatacgaagcctgccttctttcactagcaggggaatagtgagtaaattctctattgctaaacaaatattacctctatttatgatttaaatttgatgatggccatagtgctatctaaacacatggttaatggtctggtttattctccactataacttcctgaataaacttcctgatttggaaaggtcccaatgtctatttgtactgtcaacaattttgtaaaaattcatgctttggttttatacaattatttggataacttcatattttagttaaagataaagatgcctcacaggataatttaaatttattatttgattatagttttgataacatgattttctattaatacccgattatggcctattttgtttaagtgagttaatacatactcaaagcagttggcaaagaaaaactatgtaagtgaatatgtaagacatcctaattttgaaatttgattctacatctgatgttctttaagttacttggcggtgaggttagtgggttattctatgccttggaagctttgtccatatttataatatacaaataatcacattttagatctttgggtttaaaatatcttctagaagccgcccttattgcagcctttctactgattagcaataattagatagaaaaatacttacctataaagacaagaaataaagctaatcctgataatcatttttttttttttttgagacggagtctcgctctgtcacccaggctggagtgcagtggcgcgatctcggctcactgcaagctccgcctcccgggttcacgccattctcctgcctcagcctcccgagtagctgggactacaggcgcccgctaccacgcccggctaattttttgtatttttagtagagacggggtttcaccgtgttagccaggatggtctcgatctcctgacctcgtgatccgcccgcctcggcctcccaaagtgctgggattacaggcgtgagccaccgcgcccggccgataatcattttaataacagaatctgggaagatttttaaccaaatatttgggcatgaaagacaatagaggaggaactggtgatcttggaaatgataatctcataagcaaactactgttagcaggaacagaaacataatactcctggtaatggtggatataagaattaagctgaggagggaaagtgtgagatacacagtgagatgcagccagacttggatctaggagtttggccaggtgctatgcatatgactttaccactgggctgtagatctgagaaggataatagaacagcaccaaaaagagttaagtcacaaagtgcatacaccatatggtggcaaactcagacagagagaggtgataccctttgtaatgccaagtcatgctctgcttgggagacagaaactacactggttttttaaacagtgaaatggaattgttaactggtaaaaggtggttggttactaaaaaaggataaaagaaagctataaggtgtcccgagtacaggtacagaagagcagctactccctctaggctgagggaggaaagacagtgaaggagttaagggctaagagagggcatgctccttctccccacttgcagcaaagctgaggttcagaaatctttcaagagggcgttgctgtcataggaatgtacagcctatggatggtcaaacaaaaccaaaaacaaacacgtcggagtttgtaggcaaatgcatgtctgtagaagctgcccaccgttcttggaggataggagcacgctgggctactgagaagccgacttcaaggtcagagcgtgtgtgcagaccaaagcaagtcagaagggtgcctatggagagacaatgtgccctcccaactaaaggcacacctgggattctttctgggccactgggctcccgtgctaaataatacaaaaataatgatgaagattctttttttttttttagacrgagccttgctctgtcgcctaggctggagtgcagtggcgcratctcggctcactgcaagctgcacctcctgggttcacgccattctcctgcctcagcctcaggagtagctgggactacaggcgtccgccaccacgcccggctaattttttgtgtttttaatagagacagggtttcaccatgttagccaggacggtctcaatctcctgacctygtgatccgccctcctcggcctcccaaagtgctgggattacaggcatgagccaccgcgcccggcctaatgaagaaccagaactcagcttggaagtgtggtgggccgccattatggacttattgggtccttccaaggcctctattgactaagcctatcattctgccaccggatacggagaaatgtctacggggtctacctactgtatcacaaagcagggtgaatttggagctcagaaacagtagatgtataattggcacagctggtccctgaaatgacttattccaagatcctaaatgacattttagaaattcacttggcatttttattaaattgcaagaagatatgagctctgtaaatcaagagcagaaacctttaaaaggataatgtaagacaaaaagacaaatggataagcagaaattaaagatgagagaaataaaattattcaaaagaagttaagattgcaatagggtaatgaaaataagcattggtggtatgtgtatacaataaaacttttcctgtaaaacaggagctgtgaaagtaggataccaatttgagaggtaaatacagcaagaaatgtaaaacaaaggaaaatgattgcagaagacattaggatattatagatttggcagagagaacagagtgatgtactttaagaattatagatgatcctgaaaaagaaaattgattaattagaacagatgtaaaaatcaaaaacaaatctgaagaagaaacagtactgaatcaaaacacaattatgttcccaaactgaaagaactatgttccagtaagttgatggaaaaaaaaaaacaaacccaagcttcagaaaattctagcaaaaatatgaattatgtaaataaagagaaaatcgtgtatacatcttgggcgaagaaaaacgttactaacagagacctcaaatcagaattgtatgcaagaataaatgccaaaaaacaatatactagatgttacttctcttcaagctctccttggattccccaagtctagtctgatgccctttgtatgttcacatagcattttggacttctcctattatataatgcttattctatcatgttatgctaacatatttacttgtctccctctactagaccgtaaggtatgtctccaaataaatgtttaaatgctacaattatgagataataaggtaaaataactttgtctaaaatttaatctttgagacaaagcagttggaaaaaacccatacccagcccctctctacctcagaaagagagaagacacattttctttctaattcacatagcattatggtttctggacgatcatatatttccataaatgcaggaagcaattttaatgtttatgttcactgatgtttcccaagtgactaaactagaatagtacaaagcctataacagatacatgattaatatgtgtttaatggaagcatagaaacattagaattaaaattttaagatatttcccataaagttgtgttaatgrttgctgtttttatctcctctataggcttgtaactgcagcacagtgggatccttggatttccaatgcaatgtaaatacaggccaatgcaactgtcatccaaaattctctggtgcaaaatgtacagagtgcagtcgaggtcactggarctaccctcgctgcaatctctgtgactgcttcctccctgggacagatgccacaacctgtgattcagagactaaaaaatgctcctgtagtgatcaaactgggcagtgcacttgtaaggtatgtgctgctracatgcagctagggaaaacctccctcaattctgtttccattgctcagttttaacttcattcagtgtttgttatacctgcttcattaagctaaacaaacagatggacaaaatctcattgccagacatggagttttcattgrtatgcatttgttggcataccgataaacactgcttttctagagcttattttcaacccaaacccacctttttttctagttggtggagatgatctattttcaatggtatagtgattttttaaaaaatatattagatttgcttcgataaggacaatctgggaggggtggcagggaagacagttcttttaagcatcatcagagaaaatcacagctaaataataaggcttataaaaaccatttctccaaaaattaatctgcaatcgctgtatactagaaaatatatttactgctgtggaagtttagtaaaatttcaacacatataaacgctgtcattacaaacagtgactatgtgcaaatttcagccctcattaatatggttaaatgatgtagaaaaagagccaattaaaaaggtaaaaaggatttttcccctcagatagttctgaaaaatcaattccaggataaatgcagtttaaactgtgtcagaggtatcttttcaagataaaatctrtgcaaaaagggacagaggaaacaggaagataaaatctgggtagtggttgttaaaatggccttgagaattgaggaaaatggcagtttctaccatcaagggcttcggccaataccgagtacaatgctgcattcttatatctcgcaattatgatcatatatttaatacatgttatgtgtgtatatatattacaataattatataaattgatattttaacctgctgcctatttcttacagcttacaatagcaccactgtttaagactcaatgtttttatgttgcttttgaaattttcatgagtctttcatattgctcagagcagaactgtagaaaatgtaccacttacatttaagaaacaatgtacaggccgggcgtggtggctcacgcctgtaatcccaccactttgggaggccgaggcgggcggatcacgaggtcaggagatcgagacaatcctggctaacacggtgaaaccccgtctctactaaaaatacaaaaattagctgggcgcggtggcgggcgcctgtagtcccatctactcggaaggctgaggccggagaatggtgtgaacctgggaggcggagcttgcagtgagcmgagatagcgccactgcactctggcctgggcgaaagagcgagactccgtctcaaaaaaaaaaaaaaaaaaaaaaaaagtacaatacctttagtcttatatctatttaaaaakaargcatttttaaaagatccatgaactcctaacaatgaggttaactacatgtgccatttgagatgtgagtctaatactcagtgttcttctgttttgttttaaattttttaaaaagagtatgctcccgttatgcattctcagggtgatttctcccctaactttgccgttataaactctgagggtctcttgtctttcctcagrtgaatgtggaaggcatccactgtgacagatgccggcctggcaaattcggactcgatgccaagaatccacttggctgcagcagctgctattgcttcggcactactacccagtgctctgaarcaaaaggactgatccggacgtgggtgagtagggaactgctgagccatgtaatggtataatgttagttcctgctggtgtcttttagtcaggcactgaggggtagtagaaaatggcaaaacatttaagtaaccttttcctctgtgaacatttaggaacagcaaaggggtcacgtgccattagagagttggagtaaatgcctttcttatttgttcttaaaagtagttcacttattgataaggaaatagatgccaagtgaaaaagaggaaccttgtccgggaagcattaygttttgagatgggaagagtgagggcaccagagcatgaatgttgatatgagctaacacaccaatgagaaccaggacttgtcacacattcattccaaccaaccttaggcaatcatgatttttggagtgaaaacatgttcatttttcattttcctttaactctttctacatttagattcaatttgtgttagtgtgaaaggctccagtgtccacagatattgtggctttcactatgtgaattagtcaaaaagatttacgtcctgccatgcttgcccactgcgtgtgagttctgttgcttgtgagaacatcatcagaatgggtataggaactgcagatagacatgcagttcgtaacttagttttaaagaaatgtccaaagcgtaaattcagccttctgctgtattttgaccccttgcaggtgactctgaaggctgagcagaccattctacccctggtagatgaggctctgcagcacrcgaccaccaagggcattgtttttcaacatccagagattgttgcccacatggacctgatgagagaagatctccatttggaacctttttattggaaacttccagaayaatttgaaggaaagaaggtaagcacaagaactttaatgtcaagtgagaacaagataaaatctttttagaatcacaccatttggagatttatccaattcctcattcttctttttattttgtcagttgatggcctatgggggcaaactcaagtatgcaatctatttcgaggctcgggaagaaacaggtttctctacatataatcctcaagtgatcattcgaggtgggacacctactcatgctagaattatcgtcaggcatatggctgctcctctgattggccaattgacaaggcatgaaattgaaatgacagaggtaaagttagtcattgtttggtgcaaagatacyaatcaatggttttgcattcagttttgtcatagtgatttctcttcttgttaacagaaagaatggaaatattatggggatgatcctcgagtccatagaactgtgaccygagaagacttcttggatatactatatgatattcattrcattcttatcaaagctacttatggaaatttcatgcgacaaagcaggtaaactctaatagaaaatattcaagctcttattttagagtctgtaaggaaggttattgacctacagatatcagrtaagaaagattggaaagtgattggttttgcagtataatgatagaagataaaccatggaggcttccctgtgacctggaagaagctactaccattcatcagaaaagaaaaatagcatgagaaacacgttaaagggaaaaaaaaatatggaattcactgcagacatagtgagtttaagatgccagtcataaattcaagagatcatatactgtagatcaggtaaaattaactgttgtggtataaatggattataaaagtgctgagaaagtgacctcttcacccatcaggggaaccaggcagggccaagttggtccagtctcctccaactgtgagcattctaatctgttcaccccagtgtgccatacaatgttgtcattttccctrtgcatcatgttgagaaatgattctgaatcactttgaaaaaaatcacacagaacagcaagaatgaatgcaatgttgtcgaacctacatgatgggaatacttcaagggagtattccgtgttttcttatgaccaaaattggccaaytgaaatgaggcttgttgggtctgacacttaggaccacactggtaacattcatgataccggtctcagtgtcctggggcagaattaatctcaagcttttaaagaaagaatgtgacacatgagcccaatattatgagtgtaaactattattttccatgaatataattgtaaaaagaaggaataacatattgtcaaaagtaaaaagatgattgtttaatttgaaagagtatgtttacagaacatgggaatggattagtaatgaggaaaatattgaaatataaaataaagagagaataactaatagaggaaccaggagacttccacatcatggaccctcatggtcatattctttgagtagacggttcaccttatccaatgggataaaatgagaaatcatacagatttaggtaagtttcataccatggaggcagaaagttgaactgagttcatataggagacctcaatttctctttcatgtcagtctctgttacattctatgagaatatagaatcgatatatgtttgtaaatagtcttatataataaattattagacctgcctaggaaagcaaaacagaaaaattatgaagtctctcaatggccaactaatgaatataaaaatactatttttcaaatgtttatactggaataagcacacaagacagcagaaaaycttttatttcatgcagaagatccataatgcttttctgattgatgtagagacttttagtaaaagagtaaattaaggaccaaaattcacttttatatatgtattccttgggtttccttttgatatttctcactataacaggagattatttttatatgaaataataaaaaaaawatacttaaaaaacrctgttatctatactgttaattattttagaatatcacatgtaaattaggtggcagaagccatagcagatttgcatgtcttagaaaatagcaggtaatttcgtgagtttgcaaatagattattttgcaaatggttctgtactgcagtaaaagagtttggtagtaaacagaacatcttgttagtggaactgatagaaacaatattgtcattcatctttaattatactttctttgcttctctcacaccaatttcaccttcctacactgtgacactttgtcttttttttttttcccgccctatgtctttttcttttgtcacactgttttacatacctcaccaaatgagatcttttggtttaagtgaccgtttttttgaaactttagaatacatttttcctaatctcagtaaaaactggggtcatagtctcacaatgctaagaacaaataaagctgtcatcagcatttgattttgtaaggcagtggaattgtggcaaaggtttttaaaaggtttgaatagtccccctaaagtaattaaaataaccttgtatctttatttattcaattataaatttaaatctcaaaagcagagagtttaagagtttatattctgtttgaggtatgaactttgtacattgtatcagtgctggcattatcttttttctttgcttttgtttccttttataaagtttaatttaaggaaatagcaacttttgcatttcagtagttatttaaatggaagctggagtttggccaaatccctgatgcaatcaaagccattgctctctaatcccctgaaaaaaaaaatggtgtattgcagaaatatttgttgttgctgccattcaagcttcacttgatttgtaaacacttgcgggtctgttatgtgcattcatgtgcaagagaaaggagaatgaagccagtagctcctcgggctataaaattccatggagatgccaatgcaaagttaccttcttactcccacagagagcccagagaacataagggagaagtttttcttgcagaaggggagtggtttgcttacagctcaccaccactgtgtgtacttacagggagcagagagtgaaacctgaattttaattgaatgtgtgtttcatcaagaccaatcttcagagtgcagattacaatgctagcaaagaacatgcattcataattcagtttcaataaaacctacctatgcttgttataaagtttatgactcaaactccttaaactcctggaggtaacttttatttgaagcaaaactattcattgtcacattttaaagtttatttcccaaacatgtttgtgttaccagttagtccatcataaaatagtcccagtttatggactacatttattttttaatgaaaagggtattaatatgttattttcaattatgattttcttttcaattataatgactatttcaccatcagaaaaggtgagttaagttacttgaaggaattatttaataaagttaagaaaatattattttgaaacattatcctcagaaagaaatcaatattattagattatgcgtgatcattattttctaggtggttttctaaagttcctgaaaggtcattcagagcattgggaagaagaaatttgsgatagtagtaaattmaaagcaatttcaccagtgcctgtacgaaataattgaatggggaatgaccttgggttgtctgtttgcaagaatataaatgtctaattaattggccgtgtctacctgaagccactcacattttaaaaagtggggggaatatctttataataacttttcaacaggatatcagacatccaatatactaaacttcttatgatttatgtgaatattttgctaatatgtactcttaacatttgaggaagcaaaaatgcaatattaggatttggtacatgagccccagaaatttaaacagcttcaaaacaatgttaattatcttgatttaatcatcccacaacttatctatgtatcaaaatatcacattgtttaaataaatatagttgacccttgaacaacatggtggttaggagcatcaaccccacctcatgcagtcagaaatccacatataacttttgataccttcaaaacttaactactaatagcctcctgttgaacagaagccatactgataacatagtagattaacatatatttgtgtgggtattatatattgtattcttataataaagtgagctagagaaaagaaaatgttattaagaaartaataagggctgggctcagtggctcatgcctgtaatcccagcacttcgggaggccaaagcaggcagatcacttgaggtcaacagttcaagaccagcctggccaacatgatgaaacccagtttctactaaaaatacaataattagctgggcgtggtgttgcacacctgtaatcccagctactcaggaggctgaggcaggagaatcacttgaacctggtaggcggaggttgtagtgagccaagattatgccactacactccagcctgggtgacagagtgagacwctgtctcaaataaataaataaataaataaataaataaaaagaaaaaaraaaagaaaagaataggaagagcaaatatattaagtggaagtggatcattgtaaaggtcttcatcctcgttgtcttcattttgagcagactaaagaggaggaggaagaagaggagggattggtcctgctatctctgggtagcagacgtggaagaaaatccccgtacaagtgaacccatgcagttcaagcccatattgttcaagggtcaacttatgtacaattattatttgtcaattaaaaacaaaaagacaatagaacatacttgaggttgacaaaaacgtgagaaggatattgctgtaggattgattgtttactaggtgatcttaactgactgtcatagtaatctaagtacattctcgctgtttctaggatttctgaaatctcaatggaggtagctgaacaaggacgtggaacaacaatgactcctccagctgacttgattgaaaaatgtgattgtcccctgggctattctggcctgtcctgtgaggtaagctacctcctactaacctgcttaatctcaagtcacttcaggagctaaatggaaatactcccagaagtacctttactgcatacatattcttaatctattttatttaatcttccactcacagtgtgagacacagtggcaagaggataatgttattgatatttagtacaaatcatacctgaagggaaatagttgatcaaaaatttaaagatttgtgaaaatatttaacaatcaggaattaagaatgttttaataagcctatttattatagctgatctattttcttggaccacttctgaagagttagagacatttaaactgcaatgattaggagataggattatactgggttttgaaaatatttttatatagaacacgacaaaacttgtacactaaatagcaggctgttccctttaacataagcttctcagggaaacatatctttgttccaacagtgctgctatgagtcattacagttataaaactatcttttttttttacattttaaaagtaattttaaaactgcttttcaataaacttgctgagatattctcttgtctgccttcaagattgtcaaatttcttaggatctaatttctataattgtgaaatattaataggaacagtacgacttaagggaggtggaatgaatagatgagaaactggcctgrgtttgaatctcgacttcaccatacagtaagcctgagaccctgcactgggtgctacacctctttaggctttagcaggtaaacaccaagtccctgagtaactaccactacactttcacctctcccgcagaccccacagtctgaagcctggcatgcatggggcctccaggactgctccagccctacagctgggattctttctcattagtcaggctggctggtgctcacagcataccagttagatattattaaatctccctcacctacagcctgagtcttatgaagactaaatgagctgttaatgttaaggattcatcacagcacctggtgtgtagatgatgtaagttttgatggttaatattattattaatgtaatcactagttatatacccatgtattgattcagttataaataattttatacatcttattttgtaaataggatttgagaagttgtattaagtatggtacatgagacagatgattccactaggtcaaaactgaagtgcaacttaaaaataatgagtatacatttcttgagagggacatggcatcatgaaaagaaaaaggaatttggtttcagtgaatcctacctagctgcactacttggacaggttacttgctctgtttttgctaaatcttgggtttttacctatacatcctaaggattgatttaaatggaaacgtatgtgtgaaaatccctttacaaactgacatgccattcagcttagttaccatcacatggattccatatagttcaaggaaaaagtttataaaataactgcaactgttttgtgacacatgcttaaaatgattttctactctttcctgtgacttctctgaagggcaatatttatttacatgtgtccattttgagctaataaataatcaagtaatccatctccttattaaattgtatttcctacatctatttatacacacactagtaaacttatactggtaagcactgcttatacagtaagcactgctctttccaatatacatatgtacacatagtgtatgggtgaaaactgagactgtgtggcacatatgaaatgartgacctttccagtgagcattgaagattttaaaatggaggacagaaagaatgtgagatttttctagacaagagatggaatttcctttatcccaggtagcgtttggttttacttttaactgtgtgcacttgatcaatgctcttaattgctgtagaccttcgttattatatagctatccaatctataaaatgacagattgagttgaagttctaaaattctctgattctgcaatattattttgctatagaaaatattctgtaagtagtcaaggttgacctttagatatcttgaagagaaggttattacagctatatttttctgcatttatttgaaataatactgttcacttgtgaacaaaaatgttagtagaatagcaaattattttcatgcaaccaaccttccattctggatttaaaatgttaaaaacctttcttcatatgattgatagactttttgaatagtacattcaaatacatgctttcccattaatttgagtcattttccatcattatatgaaaatgtaaatgagcacaaataaaacaaatgataaatgaaaatcaagaaaaactaagaatatgtacaaattgtcatctgcattagtggcttcaccgtcccatgactttcacttaagcatctatttacagacagtaattgcagtaatatcttagtagagagattacagagataaagacctatctctcataataatgtacctgaagtgttttccacaacccatggcctctaatccattatacctcttatttataattcatcttgattcctaagtgtaattacccaggcataaaatcttatcatcaaagcaagagctaagggcagttttgaaataatacatcccattccagtaacatatgctttgggtcatgaatacacaaagcagttcctctacaatatttttacaaaatgtatagtattctagagacatctgcatctacaggctattttatttcatgtttttatccacaatatggttgcaagtaaacaaaattaagtatcagttactgctaaaatatagccagttgtaaagactcttagcctttgcttgttacctgcactgttatgacagtgcaggcctggtcattaaaaatgttagttttagaaatgcctaattattataatttactatttgcagaaggggccagattaccttcaggagtcaaacaaaggacaccatttcctcaccagatttcttggtgttggagccattgagtttgttatactttatttaacctgtctttgagtgacattaaatataggttattgcccaaactgacctaaactgagctttatgcagttgaaaggttatatgcaggtaccattcttacttatgactttctttcttaaatatggaaaatattcagccttgcgtgtgcagctctctgcagtaatacggaaatcagaaatttgtcaatgatctctaggtcatgttttgatagtttcagcttctatcctgtcttcccatattttaaaagggctttaggcttgcagttgaatggccggtgtctattggatcgccactcagaagctgtcccttgtggctattaaaactgatttttttaaatctccaaataatttatacctatcgtcaacacataaagcccaaaaggcaaaatgtgaaaatagtcttagctacttacatatgcacacatctatcctttatcacttctgttgcacaccagagacccaaagtctctgttttcatgtacagacaagtgttgaggaacatggcatgggtaagttatgttataattttgtttacaaatataacctaaaacaatcatggtatctttatttttagtttatttccagcaaacatagaaaaaactatttgagatagagaaacctattgatttatgtatgacaattattaaacatgctttatctcaagtaatcctcagatccaccctatgaaaagcagaacctaccaytgattgagtgcttactatctcctgtacacttcctaatacagttacaccaacatcatcgactataatttatgatccccattttacgggtgagagaattgaggcccatgatcacacacctacacagcaattcaaacctcaatgaatctgtttccaaaacctaggtaaacttgtactcaactattatattatgcagtcatgtgctgcttaacgacagggatacgttctgagaaatgtgtcgttaggtgatctcctcattgtgcaaacatcatagagtgtacatacacaaacctaaatggtgtagcctactacacacctaggctacatgggatagcctgttgctcctaggctacagacctgcacagcatgttattggtactgaatacagtaggcaattgtaacataatggtaagtatttgcatatctaaacatatttawacatagcaaaggtacattaaaaatatagttttataatcttatgggaccactgtcgtacacatggtcctatcattgaccaaaatgtcattatgcagcagcacatgactgtacaatattcctacattccaggtgaggaaaccaaggcacacagtattcagaaccttactacatacaaagtggtgaaacaggaattaaactcgggtctgcctgattgcaaaatccatgcaaagatacaagatagagtgtttttatgagctccagcacaagcatctatttttattactaaactctgaagaaagaaaggagcgcagtgtgcagccctgagcctaggataggataggtctctacagtctgcttcattctctcctctctaccctcccacatttttgtgtaaatttaatctaattttttgatgaaacaatatattatgaaaataaattaaagatagacgagagcagaagaaaattgagccatgaataatttcaayagtggggaagagaactttggaaaagtttaaattagagtagaaatgggtaagaggagctcaggaaagtatttatttgcttttctttaattccccattgtgttccagawaggattttagatgggactcaaaaagtaacttttttgcttccaattccaacataatcattctcacraacttttgtctcagttcaccaagaggaaaaacattcaatattgacaaacaccctaaaaattatttaaattgaaagaatagtgcaaaataatcaaggaaaagagagaatttctgttttttttttwaaaaaaaacagcacgttttaagtttctaatctttgcgttgtcaaatactctctctctctcttttgctacctcatagaaatttaatccatcaggatacgaaataaatcaaaactaatctaaaatgttaaaactgaaagacactttagaagtcatctgagttaacctactcatttgtgggatgaggaaactgggtctcaaagtaacttgcccatatctctcagacaaaactaacataaaatcaaggcttccctattcattccttttatagtaccaaggagtggtatgcactttttatgtatttatttatttttttgagatggagtctcgctttgtcactcaggctggagtgcagtggccagatctcagcttactgcaacctccacttcccaggttcaagcgatgctcgtgcctcagcctccagagtagttgggactacagacacgcatcaccacgcctggctaatttttgtatttttagtcaagacatggtttcaccatgttggccaggctggtctggaactcctgacctcaagtaatccagccacctcagcctcccaaaatgctgggattacaggcgtgagccaccatgtctcgccttttccatgtgcccttttaaatgcacacatacacaacagagaataaggagcttgccagtgacgctgcgctctaattgtctgttagacttttctaagagttttaaaacaaactcgggcctcaactctcccccagaggaattgactccacctcctctagggctggacyggaccacagactcccactatgggcgcttgtctattgtgtcaggctgcctgtcggggaaaaccacagtaataggaaaaatgtgttgtgcgttagagtagacttcaccttagggctcgccttcacatttggacctacaacgctaaactgtacaattcctcgatgaggagtattacttcttgtgtttctttttcttctaagatttattttaaacttttgtttgagcttcaaggaaacttcctctcaatttgtgtgattttttacacaaatttttacagacagtaattacagtaataacttagtagagagattacagagataaagtcctatctctcatagtaacacacatgcatgcacctagcaagtatgtcaataacacaacaattttatatatatataattttatatacatatttatatattatatatattttatatattatatatataatttatatatataatatataatttatatattatatatatataattaatatatatattcaaggatgaaatccatgcacagaaaatccagttttattcagtggtcagcttgctaaagaattggaataacccacactatgaaccacttttaaatagatcttggtttatttcttcagttatgcttaaactaattcttcaaccatcatttccaggacttattcaataataatggcaaaaatgaaccttgctttttaaataatatgtataaactttattaaattatatgattatgtccaccataagacaaataagactcaaaatagtttgaatactattctcagttttatcagcttgctcaaagttgggacattattaaatctcattagaatttattttaggctgtgataaaagcagagagtctcttgattaagtgcttaattgaagtacttttgcattatccaaatcaaaataaacaaggagggtgctagctattaagctagatctttttaaggagcttctttgtatatttgtctctggactgtctaggccagaaccaaagggatgtggaggtactagaaagttcttaatctgatattttttctggcttagtcagcaatcacttttctttcatcaatgggcataagatttttaagtgaaaaaaaaaaattctacttaaccaaggtggtaaaatagtccccttgtaattctccatgggatttgaaaaactgactyctaccttttattcataaatcaagcaatgtctgcagctatgcatgaggagaggactgagcctgaaacacaagacggttytcatcttcgtgccagagctgtggactaccttccagaaagccagagatgtttgttgatacattttcataataaacccaaatgaagatggaagtcttgattttgcatatgtcagcttcactagaagttttctgtttgctttcagatttttattgcaaaaagaaaaaaattatatcagggaaagataaattttattggtggtctaatagtcgcaagacatgtacagcttttattattttggatttcttacttttatagtctttaaattatatcagtataaataatgcatccataacactttttatttagttttttgctgtgtttcattggacatttgctagttatccatcaagcacagtaaaagcagattttaggtgttaaagacattggaattatctttattccatatgacaatgttatttaaaaacaaacatctttttcaagaaaaatactctttggagctttttcaggctgaattgtatctacaaataaaagctttccttggttaaaatctgattacacatggatgccgcccgaacaccttggagaccaggaagaaatacacattaagtatcaaaatcggcacttgcgtttgtaagtgatgttgcccctgccgcaggtgggggaaggccagtctgtctttgcagcyactgaagagctcaagcgttgctaatgcagtatttctaactttgctgtcctaattggcttccttttctttcaggcatgcttgccgggattttatcgactgcgttctcaaccaggtggccgcacccctggaccaaccctgggcacctgtgttccatgtcaatgtaatggacacagcagcctgtgtgaccctgaaacatcgatatgccaggtagtcctctgagccttccttgaacaaggtccatgtgctcattcctctttacacatgctcagcatctgcatgcagaggccagctaaactgtaagggaatgcaactgtgtgtgtgaaataaaatatgtaagggaaaaagatattcacagattctgcattttaaaaagtaaggaaaaaataactgggagaaccactgagcatgtcaagaaatagaattttagcagcatcttagaagagcaccagaagacatacctatttaaaaattatgtgtgcctttttttctgattattttcttataaataaactttctataaaatttggaaattacagaaaagaattaagaagaaaaaattcacccaaaatgcaacataacattttaatgttttaagtatttcccaccaatttttacatgtgtttatgaataagatttatataacaccatggatgcagttttatgtcttgtcctttacatttttacctatcatgaggttgtattatgttgttagatattatttaaaatctttacgatctttgtttggatgtcccataatttacccatttcccttagaattgaggtagctcttatttttttatgtttctgctggcaccctgcactctctaccaccatctgcattagaacaatcagaacaatcatgtgttccaccctttttatcgtagtcactgtaagaaattcaggttgcccctgtcaccacttgtccctcaagctgtaatctgcccacagctcatctttgttaagcccatctcccacctctgctcaccttctgaaaccattctactgagccttgtggaactcatggtcaaaacaggcaaaataycccgcagaatcctcctcttccctcagtgttctcttcatcatgctctgactgaaacccaactctcactttgcatgctgctaccccggcagccctcttaaggagtagccatcacctttttgtttttttttycccctgagatgctgactcactctgtcgtgcaggctggagggcagtggcgatcctggctcactgcaacctccgactcccgggttcaagtgattctcatgcctcagcctcctgagtagctgggactacaggctcacgccaccacacctggatattttttttatttttagtagagacrgggtttcaccatgttgtctaggctggtctcgaactcctaacctcaggtaatccacccaccttggcctcccaaagtgctgggattacaggcatgagccaccatgcccagctgcagtcgccatcactttctttcactcccttcattcccctgagtctgaaggtgggggcaggttttcctgctcctcgctgccagtttcatattatccatcctcctctacatcagggtccacaacccctgggccacaggaggatattggtccgtggccttttagaaaccagaccacacagcaggaggsaagcagcaggcaaaggagcaagcgcagcttcattagcatttacagctgctcctcattcctggtattactgtactgcctgagctccacctcctgtcagatcagagacagcattagattctcataggagcacaaaccctattgtgaactgcacatgtgagggatctaggttgtgcgctcctgagaatctaatgcctgatgatcaatgatctgtcactgtctcccatcaccccaagatgggactatctagttgcaggaaaacaagcttagggcttccactgattctatgttatggtgagttgtataattatttcattatatattacaatgtaataataatagatagtaataataataatagataataaagtgcacagtaaatataacatgcttgcatcatcacaaaaccatcccccaatcctagtccatggaaaaattgccttccatgaaaccagtccctggtgccaaaaacattggagacgctgctctacagcacccagctttgactctcatgcttccctctatgtgccccctctccatctgcttgtcgaagtcacctactaacctttaaataccccacatcattccttgctgattttccctgtctaattgtcattttccctagcactactcctgtcatcattcttagtgattttaatgtccatgaacttaactcttccatactcttcactttcagtttcttgtgcctctctgktctccatttgaagcgtttttttgttgttgtttgktttttktttktttttttttttttttcccactgtgtcgtttctctctagttcacttcttctaaatacttccacttcaatgtgtgtaatctcacaattgatgcacacacttttttcttgttccttatctcatgctttcactgtagtaaccagcttaatagtcatgatctttcattggtattactgctttgcaacgctcatttccctggctactcctttacttattttttactcaagtgaactccaacactgtgagaatcctaccatctcctccatacctgcaccttctttttttttttgagacggagtcttgctctgtcacccaggctggagtgcagtgacgcgatctcagctcactgcaagctccgcctctcaggttcaagccattctcctgcctcagcctcctgagtagctggaactacaggtgcccaccaccatgcccggcttctttttttgtatttttaatagagacggggtttcactgtgttagccaggatggactcgatctcctgacctcatgatccatgattcgcctccttcggcctcccaaagtgctgggactacaggcgtaagccactgcgcccggccacctgcaccttctaagctgaacgtggctgtagaaaaagacaattgtgccatctaatctcaccttaaattcatgatccctctcttcaaatggaccctttgtgctgctctgcaatcatgccacttttctctcatcctttttcttttccacattcctaggtgattatttcatacctccccctccatcctcaagcctaaacctctcctctcaccccctcccatccttaccctcagttgatggtgttgcctcttatttcattgagaatttagaagctgtcagaagagaggtaacaagctcccactactgcatgcacccacttttctgcatctgtgcccaattattatgactcttttctattactttggatgaattattcttgtttccagaaaagatcacatcttccccctatgttctcaattctacccctctcccgcttgatgacatcactctggctaatctctcctccttcttatattgtcactttttttttccatcttaaaagcaaaaacaaactctcctgactcatttcctttctaagtaaccacttcattcttctccttccatacaatggagagctgtctatcccgtctataatttctcttcatccattctcctttgaattactaaaaacaggctatcacctcctcttctatactggattcaatggctaatctacagccaccagtgttcaccttactatatctaacagccatgtttgccactgtgaatcaccccattcttcttgaaaccctttgctcaatttgctttccagcccatggcattctggagatgttcaaattccatagtggctccttctcagctttcttcattactctgaaatctacatagtggtattcctgggactcaatccttggagcaatttgtttctctaactacattcattcagatggtgatcttacccaggcaygtggctttctgtactgagatattttgatattgacatcccacagtatttactattaagtttatgatttaattttatatccactcattactatggtgtggggaggtaatttttctgcagatatgtattaccactgtaaagaaacatttactgattaatatttccttttccccttgatacattattgtatctgaacatacacaaatttatttcatccatattaagatatgtttcagtataatccattttgttttacttaccttttagctcttattacaatgttctgcttaccttcattttatgttaacatatctgtaaagcaaggtcctttatttctcttctcttctaattaactagaygctcttacatattcttccagctgacacttttatgcactattttaatctcttccacaaattttaattacaatcaaaattactggaattttgattgtaattaaattagcctatttgtaaagaattgctatatttacactagtcactcttctctcttcagatattttatgtcttacagtaaactgttttaaggttgtctatatcaagcacgcatttctcatwtaaaaattctttctatgtatcttacattttcattttaatggtagtaaacattacctgttttgtttcaacatagtaaatgtactaactggtcattattggtaaaccttaactattagaataggtgtttttacatgtatttgatatccaataacttttattttagttctagaagtttatcagttgattcagttattgttawgtttaccattttttttttttttttttttttttgagagggagtcttgctctgtcacccaggctagagggcagtggtgctatcatggctcactgcaacctccacctcccaggttcaagcgattttcctgcctcagcctcctgagtagctgggattacaggcacctgccaccataactggctaatttttgcattttagtagagatggggtttcaccattttagccaggctgatttcaaactcctgacctcaagtgatctgcctgcctcggcctcccaaagttcagggattacaggcatgaaccaccaaacctggcctataatactattatttgcaaatattataattgtgctttcacttgtcaaaagctatatctgttataataataatttcatgtttttaaattgtctcccaaaataataagctttctattttattactgattttaatatgattgccttaagtctttcaccattaagtatgatgctgatggttagtataagaaaaacatttcttgtcatgttacgaaaactgctttctattcctagcttcttaaagatatcctctttcaatcaggataagatatttaaattactcatatgcttaattgtggagagtggagtgggaatgtagatgcatttaagaggtgatcatatataggtttttcaccttaaacagaaccataaatgatattattgactaaataaataacttaatattagccatccatgaattccagaaataattactatcttgctttagtatgctattttttcatcaactgcttgcctgacaaattcaataggcaatttgagaggaaggggttaatctatacacattcttaagcaagaattaaatgtatatgtcttatgcaatcttcactggcatttttagcacagttatatttgctttatatgattaatttagaagcatttataaataatgcagtttaatttcaattttgttaggattaaaattaccrtctttatactgtcctcttttgaccaattgactattatgactatttttgttctctaagaattctaaaagcatgtctattttctgaggaatccctagatgaagtaaaaaataaatacttccattaaacaaacacagctggtataaaccgttatgctccaaatttttatattttctttcatggaactcacaacttttgaatttaggcaactctgttcatctttgaaatggcctcatgaggcaaataagaaatagctgttattactcccacacagtaagtgaggaaactgaagcatactgatttctcttttatgtgcaatatggctctcagtttcatatcatatccattatacagtgcaatgccctctaccttggtatagtggcaagcatgaactctgcagtcagagtgccttgattcaaatcctggcttcaccccttactggtagygtgagcctactcaatttatttaacctgaatgaggtcttagtttcttcatttatataatgaaaacaataatagtggctactcacagagtttttgtaaggatttgatgaaatactcaataaaaggcttagaacattacttagtgcatggtacgcttcataaaagcaattatgataatgatgatcataaagatgataattaccatacacattatctaccatttatagtcgaagaaccaatcagttgataattaatcaaaaaataagtaaaaaaaattcatgtctagcgctatgctagattttcttactgtctcagtccatttcggatgttgtaacaaaatatcataaactgggtagcttataaataacagaaacttatttcccacagttctgaaggctgggaagtccaagatcaagtctccagcaaagtcagtgtctggggaaggcttctttcctggtcatagctgaccccttctttctttgtcttcacgtgttggaaggcactagatagctctctggggtctcttttgtaaaggccctaatcccactcatgaggctccagcctcatgatgtaatcacctcccaaaggccccatctcctattactatcacactgggagacaggatttcaacatacaaatttttggagaacacagttgttcaggccatagcaagccttaacccccaacatgatgatatttggagatgggcactcacttatcttgtttttctttatcttcacacctttccctgaaaatataaagtgcataggaaagaaaactgtagaaagctttatagactaaatattttaaagaaacccagatcaccttgtaactatgctcttcatcatacctaatgatacttgcaagataattgttgcttcatcctaggcattaataaatcctgtacataggcatgttattaygaatagctcagtgacattgctccttaagaaaaaaaatttttttgaagactaaaacctatgtaatactgagtccaaggggatagcgggaggtaagtgaactaacagtaactagtacacacacataggtagtaagtaggtagatagatagatagatagatagatagatagatagatagatagatacagaaggaagatattttcatttaatcattgctacaccctgtagtcagattatttctcctattttttttttcacatgggaatattgaagacttagctagctcaaacaactttttaaagataaaataatttgtggaaatattattttcactctatcataattcttattttaaaaagaaaataataaaaataaatctctataactgatcattgctgttgcctgaaacatttaaccaattacctctatcttcagtaaatagacagatttgtaactagaattcactattttttgttttgtaaaccttatttaatctacctaacaaccttgccagaatagagattgttagcattatactaagttctggaaattaatgctaagaaaatgtaagcaacctataaagccttgaacaaaaagtattagaagcaggtttcaaatccaccacaaactgcgttctccagacggcaagagagtgtaaacactctctgctgattaaatgagtttgattttacaagctcaagtgaattatatcttagagtcgggacagaatctgcaaaagtgactaggggtcatgtatggaaaacacttgagaaattgtgagaacataaaatttgtcgcaggatagtaagcaataaaacatctttccaggttttataaaggaaaataaaatgtaggaaactgattgtcatctccagtgaaacttaagtattgcttacttaacaaatatctgtcaactgtggaaaaaataaacagtgctcattaggaatcagaataggttcactttgtcagaggcaatggctcatgcctgtaatcctagcacttttggaggccaagagcggaggatccaggagttcgagaccagcatggtcaacaaaggccctgtgtctacaaaaaattaaaaattaaaaaaaagaataggttcattcaaaataacacatatcaaactaagtgctaggtttactgtatatataatatctgaaaacctagttttctaaatcccagtaaaatatcaagtttatcagacaatgtgatacatcatatctcaaattcagcaaaaaataataactgctattatgtgtccaaaactgtgtatgtaccaggaccaaaacaggtcactgtacagagattttctcatttattgttacaataaacttatgagatagacaagattatttcttcttttattgttgatgaactgatgctagagaaattaaataacttgcttaagtcataaaacagcagaggccatatccatgtttcaaatgctggtttgtttaaatagatgtttgatgagctatttcatagtatccttgygcacaagattgaaaatatgagccagatgttagccagctgataggttgatgggcatatacgttgctaaaaaaatgtgacccagagtacactctagtgatatctccaatgatgaggcrtaagctttgtatttgaccttgttgtgttcaaaatatctgtaaatgctttggatgatatctatcaaatattcagataatataaagctgaaagtattatctaatgtgttggatggtgggaaaatatcctgacagatgatactatgaattacagttaacaagatgagattaatagaaaagatttgaactcaggtaagctcacttgtttgttcattcctgtggcatctgttaattatgtttccaacatgcaggtctatggcctatggtagatagtaagaatatgaagactgcatgggtcttgccctctaggagcttattctctagtttaggggaaagaacagaggaaatgacacatattagcaattcatgtgaagtaagagtccttacttgattgcagattcactaggtgccaacacagggcattgctatttgtataagatccaaatcaagggaggaagtacatttaatatatttgcaagtcacagctagagacttataatctactatattttgaaagaaaccctgagtaagattgctaaatgtttagcttgaaacaaagatttaggaagtaatagtattcttagatatttgaggaccttccctaggaaaagggaattagacttaattttcatagcttcagaaggcagaacttggatcactcactgaaaattagaatgcatcaaatttttattcaccgtaaggaaaaacttcacagcttatgcaagacgaaaaaagctgtcttataagaattcatgcatttaatgatatctcaaggaaagtatagaaggcattcctgtatggcaagaaggttagattaagtaatttctcaccttaggcctgagatactataatattaatgttatagtcatttgattttgtagaaggaatatataccaacagttttccagtgtgcaaaaaaaaacttaacaaatctaatatattctgatgtattattgaagagatactagcacataccactcttgagaatataattaaacttctcattaggcatccaaaatataggaatttcccctaatggctaatttttatataagaaaaaatactatgtacactatttcaaagcagacagaaaagtcatatgaaaagggtatgtcaaaaaagtttcaaaaagaggctcytgatttatgtgttgtgtgtttgtggacctaaccaggacatttgattcaattaaccaagtttagtatgtcagcaaccctctgaaagattgagaagattgactgtccagagaatattacaatatttgctttctctgttgaagaaattatgtagacttacaggtataagagaaacaaaatcatatttttgaatctcttatttttagtaatgattattggctttaaggattttaattcagttactaatgttatatttaggttacataaaataattcattatgcaattattttactgcaaaagcaaaaggctgaaaattattgttgaagatcccatgtatttttggcacattcatctctataaaatawgttcttaaaacactccccagttaacacttattcatcagcatgacaccttgctgaatgacttgaaattataattcatagataattattttatcttggagccattatctctcataatgctactgttaaatatggaatggctcttttattgcttaaaaatggtggttcctttggatggttgaataaaagaggattatggcacttaaatcaatggcaaaatatgacaaatcattttgccctgctaaccacttttctgcaatgacacttgaaatttgggctttttcatctgaaaaagcctgaccagtttcatctatacttcctggaacatgcattcattcattcagtcattcaaaatagtcatcgaatgcctcccatgtttgatgaactaaaaggagcatttaagccagttttaggtcatcggggaatgtttctcagagaaagtgacatttaaaatgagagctgaaatgaataagtgctagcctgatatacactgtagagctaaggatttgcaaatgaaaagtcccagcagtgataaagagtatccgcataatttgagaatttcagatggccccatgtggctacggcattatatgcaaagaaagcagtggctacagctacatatggaggggtaagcacagtggtggtgaaggcgggggtgggggtggcaggtaatgaagctcttccttgccatgctaatgatttgttattcatcctgactgcatttgggagctagtgtaggctttcaagcaagagaaggkcatggtttgatatgttcataggatgatcactctgattgcagtgtggagaaatcaccagataagaaaatatggagacaggatctttagctaaaaggctattctaataatccaaataaaatatgacagtggccagatgaaaatagtagcaacaagaaagtcaagaaacagagagtaatagactcatggaactgatgatctaatggatacctcggataagagaggcctctaggttgctgaccttggcaattgagtgaatgacagtgacctcagatgaaacgagaaatacaggagtattacaaggtttagcaagagatgaacttcattgttgtcatttcaaatttaagacgcttctgtgttatacaatatttaytcaagaagcaattagaagcagaagtctggaacccattagagatatccaggctgaatacataaaatacagagttttgggcacaccattaactgaagtcatagtaatggatgaaatcaccaaggtaaatgtggaggagaaaaaagagatgaggaccaaagttagaattaagggcgtcaattatattgaacagaaagggaaggaagagtcgataaaggagaattcgagtagcygcagaagtaggagaaacatcaactggcttactcttaaagaagccatgggggctgggcacggcagctcccgcctgtaatcccaacactttgggaggccagggcaggcagatcacggggtcaagagatggagacgatcctggccagcatggtgaaaccccgtctttactgaaaatacraaaattaactgggyatggttacgcatgcctgtaatctcagctactcaggaggctgaggcaggagaatcgcttgaacctgggaggcagaggttgcagtgagctgagatggtgccactgcactccagcctgactacagagcgagactgtctcaaaaaaaaaaaaaagaaagaaagaaaaagaaagaaagaaaccatgggaagagagtatccagaaatatctatcaatggctacagaaaacctacatatgaggcctgatgattgtaagttttgctttagcaacaaagatcttatgggtcatcctggtattatgtttaatggtgaaaccagaagcctgtttaaagggagaatgggagatgaagaagtagagaccaggartgtaaacaatgtctttttaaaagcttatcgaaaataggatagaaattgtcaagcaatttgagacctcacagattttttttttaagacaggaaaggcttgaccaatttcaaatattaatgagaatgagcctgcaaaggagggaataaagatggtggagaaaatggggaggcaggaggaaaggaaaccaatttaggagtggagtagcttcagacaaaggacggaaacaaatgtcaaagggatggaaaataatgtggcaatatactgaattgtttgccaggaaaccaagggagcatccaaattagagctttcttatctcttaaagtagggtaaggtgtagaagtagaagatttgagattggctgggcacgttgggaggctgaggtgggtggatcacctgaggtcaggagttcaagaccagcctggccaacatggtgaaaccccatctctactaaaaatacaaaaaattagcctggcgtggtggtatgtgcctgtagtaccagctactcgggaaggtgaggcaggagaatccctttaytcaggaggcagaggttgcagtgagccaagatggtgccactgcactccagcctgggcgacagagctctgtctcaaaaaaaaaaaaaaaaaaaaagagaaaaagaaaagaaaagaaaagamaagacttgtaccttgtcatattggaaaaccagattcatttcacattgttataaaatctgtaaatgtcacaatataatttcaaatataacaccaaaaatgtaaaaaataaatgatctaaaattcactgtggcaatgtcatagtttcactgcaagaaatagcataaactctcaaaaagagttaatagaagttttaaacaaacattaattccatggcaatatctgtggtggaaatgacgtcagctattgtttgttgtgaattgccacacattccctaccaacaattgtctggccattagaagacacatgaaacataaatacattcttcttgattgaytaaatgaagcagagcccagtctatgggatatcatccaagttcaagctggcggcttcgtggctccagctgagattatcaggaagtcaattcactaacatgtccatctagtttgtaactgacttttttgtttctcaacttttctttcgatattgtttataagatgtaagtcactattttgaccactccaaatcctgtcttataaaatccagctaaaattcaattccaaattcccttcttcctttttctcaactctcaaatgcaaggatcgcattcccacaagataacattcaatgttgcattcttgctgccatgtttattttttgtcaggtggtttttttaaattattattttcccaaagtctaagtaaatttctagaaggtaggatgttctttcattgcctgtttcagtgcattccatgtagctcttcctaactccttattgcataattgattattgtgttaaatataattctgcttcatgaaaattttaatttgaagctatttgcacactattctgaagctattctcatttctttgtggaaaggtgttaaarggtatcaccccaatgtctcttattatgcaagcataagaaagaagatatcgatctgagattgctagttttagattgactcctctgtatttatgaagaaccacctacatctatgctttccaccttgaggtggtttcagaaagcccactagtgggcatgtgccaaggccacagtatttgtagcacctttttctaacatctcatagagctaaaacctgggatatgaagaaacataaatgcctagaagaaataataaattttagagactcgaagtctattccccaatttagagtaggagaaaaatttacatagagattgattcagggaaaagagaatagcaactcttattgtcagtgtagctacgayagcacagtattagtttctcaaatcaaagagttcctttaaaaatatttatatcaaagactgagttctctgtcagtgataaagtgtgtgtgtgagtgtgtgtgtgtaagaaagtatatgtgttcatagacacacattcatagctagggactgtatgataaattacattctaactatcactaaattaaaaacaaacttcttctcccttttcctttacagaattgtcaacatcacactgctggtgacttctgtgaacgatgtgctcttggatactatggaattgtcaagggattgccaaatgactgtcagcaatgtgcctgccctctgatttcttccagtaacaagtaagattgagaaatataaccatatttcccaatcagaaacgccatctgtctagcacatgggctgtctatgatttggctattttttccatgtagacaaaaatctcaatttaagatagagatatttttaataatatagaaacatgacaaaagtgagtatataatgctctatggttcatttttcctttgaaactctgtcccaagtaaataatacttattaattaaaattgaagtaccaatattaatgtaagacatatttataaaacaaatgatatatatatacaaatatgcatggtttcataaatataccagtctaatgcttgcatatagctctgcccataatatcatctatgaaggattgttcgggtgcatattatataatttttgtggctgtttccatttattttatgtgtttaattcaagattgggaaataattatcaagaaaacattgaaaaattgtacaattaaagcaggtgacttattgttatgctccaaaaaawgtcatctcccggaatcacagcctcctttttcttaagatggtctgagcttggtaccatggaaacacagccctaagaagaaacaaaagctggaatatcttatttcagtgctgtctgaacattctgcactggtttatacattgatgaaaaccctaggtgttttcatttacctttttgcccacactacctgcactttctgttaagtgatttatagacttcagtaaggcagggtagttttactctaagaatttgcttttgaaaataatgtatggcagtttgttcagaattagaattctggacactttatcttgagtgttaaacagccacagagcaatttggacaatgtgatctttgcacctgtgcctactcactttcttcttaatcttcggctttgtgtgcattctgaaaacatttcctgtaaatcatctccttttcctctgaaagctcctcttttttgttggctggaatcacaagccttttacagggtgtcaaatgtcaatttttaggtaagctggatattgaagaggataatatacatggtcttattgttcatccagggaccaagtagtatgtgtatgaaaaataacattatttttgtctctctttccctaatttctccttgatgccccgatttatttaattgttttaaaaagtaagccatttggattagaaaaatttaataattaattgataattccctggtgagtacactataataaaagctacaggagatatacaagagaagcatgccattttttggaggagctcactgtaaaacctgtgtgttaaggggtatcaacttaaatgtaaagaaaattcaaaggcacaaaacaccacacttaatactggaagcttcaagaacatatgaaaagaaatagtagcatgtataatggrtcttaaacaattaatttcaggattttcactggtgggaatagtaggaaattatatgggcaaatgcttacaaaatacaaggcatgtgcaaaacctaataagtaacagaatttggaacatggcgttcagacacaatttcatgatcacagatgaaaatgaatgggagaataaagaccatattgtagaaatccttaaataccagtctaagaaatagttatttaattttctatgtaataaggaaacactacaagtttttattttgaaaaaaaggttaatatgattatggccacattttaggaaaactattatcatagaattgagtataatgaattgaaacaggcaaatgagaaaagcatagagaccaattaaaaggctagtatactagcatgggcaaaagataattagaaccagaagtaggtaatagtaataagaatggagacaaaggaatgaatgtgagaaaatggtttaatacagctttacagattcggaaactaattagatgtgaggggtgagggtccgggcagaagttgaagacaggtttttaggcaggttacccccaaaaatggtggtgctattaactgaaatggagaaaccaggagagagccgttagagaagaaagataatttatgtttcaaataggttcagattgatagaacatatctgtctgaatggaaatatgcaaatagctgcaggaaatggaaatctgaaaattgcaggagcagatgaaggaagagatatgttaataagtgaattaaagttggataagatttcccaggctaatgttatccaaggcgagtatatagaaagaatgaaagacaggactttatgttgggaaaggagaaaaagaagagccaaggcaggagcagtcagaagagagggaacccaggcggcactgccattgacaccaagggagagaagagcagtgaacagcatcagttgctgctctcacaagggagacccaatgaatatggtggcaattgactattgtaattgagcaaataaatgggcttgccrcctgaagcacatagaagccaataacgttggcactggcttcggagaaaagaaaggctttactgcaaaattgttcagcaaggagacaagagtcaggttcaaatctgtctccctaatttgggatatggggaaggttgcaagggrtcagaaggcaaggcaaaggatttagaaatgctggcttggcagagtctgattggagggcttcaaatttgatcacttacagtaaggtatattgaggcagattttagccctggatcttctgggccaatggacccctcatttctgaaggagttccaatgtccagrttttgattttgtccctgtcttgttggttcaaggggaggaatagttggttcctggtgttgttagagktcaaaatttttctattgaacatgcctgggctacatgacttgcagcttttggctctgttatacctaaaaggtaacttgacattttgttatcaacagggtaggcccggttttggttggtcctgtagttacactctcagagtcattgatgaattttgaccatcaataatgaaagcagaatttgaatttacagttttaagaaatttcaagaataaaatgatagaatactaccctgattggttagcaggatcaataacagggtgtgttttcatttttgtttcattgttgttttatatgatttgtataatttgagtaaatttttatgcaaaagaccctgaaagaatcaaaatatcaaattaaaatggcaagttcagtggctttcaaactttattgattgcatccactgtaagatacacttttttatatcataagccagaaacacacaaaaacttgtgtgtgtagatatctaaatatatgtattatacaccatgccatttatttaattttgttattttacatttttagaaaaaaaattttagccaaaacctactcaatggatttcatgagtcacttatatcaccatctaaagcttgggacgtattaggctaattaacaaagtgaagacctataaattgtgagaagagaagaattaaaatgtgaagcaaagaaaccagccagggcaaagaaaagaggcacttctccccaagacataaaaacagattctgaggaatagatggaggaggctgagatatctcaatttatgacttcaatctgtgcagtcagtgagaaatatggaggcatgatgagtgattactgactcatttccacggcattagttcaagtcctcattatctcttaccaaaacaaatatggtagaaatttaactcttatgayggagtggcagtgctcacacacccttagaagtttccagtgccttcccaaggaaagatcagactctttgagcattasaaaccctctgtaatctgactacctttccaggctccaagccctcaactccattctatataawgccaagtttggcatttcttgcacttatctagacatcattagcagtctgctcttgctattccctcagacaatccctgtgaaatctaatttatttttaaaggcatttttcaaaccctacctctgccacaaaacctatccatagcacagaatgtattttgtacattttatatacaacgaacacattttactatacagaattatttcaatcattctttcaggagatgaacatttactaagcatatacttcatcccaacactatgaataaaagataaaagatatgtgtcctgtcctgtatgtgtacatatctgtgtctcacacagaattgtaaattctttgaaggtaaacataatgtcttatttctttctttattcaagaaaaagttaatgagggcccaactcaatgctaggcatggctcttcgtactgggaatatataagtgaacaaaacggcctgtgtttcctagccttctggagcttgtattttttataagagagtaagataaagaaatagatatataatgtaatatcaggtaatgacaagtactaccaggagaaataaaggagactcaaggaacttagagtgatgaaggtatgattttagatgaggtggtccatgatcttcacaaacagatgagacttgtgcagaaatgtgaatggtgtgagccatgtgaatacctgcaggaagaacagtcccctcagagaaaaaagtcactgcactggccctgagacagacccatgcttggcagataacaggaggccagggtggttggaacagagtgaatgagaagagggggctaggagatgaagtcagcaaagctctaatgaatatctaactctcctgagggctaaaaatcttccagtggcaagaggtggcttggtacaggataatccagtggtgttattgatggaagcaccagcagcatttgcagataggagataagtggagtgtgagagaggagacacggttgacaccatggtttttggcagagcaaatggaaacatggagtggctgttgactgggatggggaaaattagggaaaggtctggtgtatttttggagggggagaaacttacttttagatctgcgaaggtaggcacaatatttaaatcccttaggactaagtgagatcattcagaggagagaggagaagggaacagaaatcagaaaactgaattgtgaagcacgttaagagatcaaggacatgccatagatccaacaaaggaaactgaaaaggaacaaccaatgaactgggataaaaaccagaaggaaatggtttccaggaagcccatttatctctgcagtgtccataggagatgacacagagagcaagctctgtaaattttaaaaattctgttgaggggagtttggaattagcagccatagggaaatgtaaaagatggtcaccatgagaaaagcacaaggatttctgagtagccctgcagacaaaatgataattgagagaagattagggagttgtgaacagaaagaataaactcaagcttcaagtgagatggaatccctactccctccrgaagaccttttatgtgatataaggaaacagtgcaatccaccataatatcataatttgaaaaaaattrtatcaactattcaagaattactacattcctatacagtaaacactttattatttttttattgacatttcattattttactataacgaaatgtaatttaatcatactggctctttagagtttctcttgaaatgtctaaaatctgtttcttagagcccatatatgtataagagtgtgtgtgtgtgttcgcgtatgcgtgcatgtgcgtgagtgtgcatgcacagatgcagtcagtatcaggctttaaatgaatgagctaaaaatttggcagagtgtgtcagttataagtttattttttgtgaaggcaaaaataaatttgttggataatgcgtttgtgagtagtagatcaatttgttcacatattttgcaaaagttagagcttattactcattcatgtactattgatgtaacgcattagaagacagttaacattagktcctaatkgcacctgaccaaaaggagctgtgggcctggcctatacaccttattgcctgttttcagcatcaactgatttagtgaagcagcaaaaagaaaaatggtgtgtgcagyattatctttctgccacagatacatgtttttaatttccaagtttccaatrcatcattcagttttatctaaygggaatgcagctgagagaagtttgtaacaacccaaaactacatgctaatatagtttagttttcaagtcttgtggagtctttttttttttaatggaataagatcatcagaaatccaggagcaagacagactggctgtggtctaccagcattgtagtaaaaacattggggaagttttataagacctaattattagaaaataccataaaatagtcattttcatagaaaaagctttccctttcctcacactgaatcacattactttgtgttcaaggtaaaatgtagtttgaaatctggatgtaaattagaaaagatattattttattccaagtgaaacatgtattcacacttcacgtcttgaagcaccagtggccatttgggctgagttttcaagaaaaaaaawttatatagattttatgccctttttttaacctaagagatattaagtaatagctattccactatcagacaatgtgcataaattctagtcagatttttcttttgattagtgaacaataggacaattttgctggatgtttagtatattcatggctgtcacatcattattaaattccagaatattaacatgctttgtgtgatgcatttttaatccatcataaaccaaacaatatatatttgtttactgttattaatggtttttcattgtgacgtcctagccttaaataagaacttcagcaataattataaagatggcatttattactacctaaaagtatgtcccaataaccttgatcatggataggaatactattttataaaataaatggattaaactttttttgcaatccttttctttctgattcagtttcagcccctcttgtgtcgcagaaggacttgaygactaccgctgcacggcttgtccacggggatatgaaggccagtactgtgaaaggtaccaacagccatgaaaygtacagagtaatgatatgtagggactatatggtaaagggtcacaataggaaaacattcattatttgaagaacttcaatatttgcatatcctttagaagtttaaattacaatgctttcaaaaccacttgtgtatcttagaatttgtccaaagaaagttgtttatttccaccgtatgtttagactttatcaaagattccaaactatttacaattatctaacttatgctttagtatatatatatatataattttatatgtaaatataacatttcataagaataaatcaattttcaaaagcttagcagtagttactactaataagaaactggctacacttttcttattttaatgcactggaaaatattgtctggaagtaactgaattcacgtcattgttctgaacactatgactacaccagcaagtgtatacataactcaaaatataaatagtatcaagaatttttaattagtacccagacaataaagtatttgttattcagttttccttttcaataggcaaacaatattatttaaatgttttctcttaccatattgcttatgaaatctcataatgcatgtatacagctgttaaattgaattctcagtgtaatccaaatggtaaattaaggagtacagttccaaactgattgtctagaaaagttgcaattaatatcttccagatatatattttctgtaagatcagtatcctggatattcaaacttgtcaccaccacttttggtatattttagatattatctttaatataacagagagttactaatgttaactactaacattatacacacatgatagttttagcataattgatagcagtataaaagttttagaaagatccatagacttcgctcaattccaacagttcagctacattccattttcctcatctataatctcaggaatcattgataggccacctactttacactaatattgtgacaataagtgtgtaaaggacactgttggtgccctgcctaggcacctacactgaagccttctctccaacagaagaggcagaaaggcctgaatgtttmcccgcccttcctgcagtggcccatgactaaccagcgtgagagtacaaaagtccagctctttggcccctaagtggaacaagttttgagatcttattttatgctccagagcactccatggaatcaggctaagactgggacatcacytgaaatyataccyttgattagagcttttcttttccatgtcctgcttcacccactcctttgctagattctcctaggaacacttaaatggtaagcttctttgtaaatataaactaatactaattatcagcatccacttaagagtcttgttttatataaccagcaacagctgtattaatcatggcaataagtaactaaataattagggttaagctttataaatcccaatgcaatttttatacatttgtaaaatatatttctaaataaatccgtatgtggtaactctaaacacagtatccaatatttgcatatatataaaacagtggattcacaatttccataccaacagaaattagcagcaattaaataactcatagcaacaccaaatctaaaaatatttccatttgttctgaagatatatacatcttttggatatagatataggtgatacaagtacatacttgttaatacccaccagtgagctttggtattcatggttagactaatatttatttcctgtacctttaaacaccagtaggatggtgactaaaagcatcgctggacaccaaaaagattatctacagtaattcatgaaaaaaaaattatgatatagctacatttatacactgtagttaccattttctacaaaagcatgtgtatagaataggctagaagggtacactaaaataacaattattgtgttaaagcagaatgattacagaaaatttatttgttaatatccagtagtatttaatcgataaaagctgtcagtttgtgtagcatagagatgagcagggccatacagtatcaaatgtgagtgacttaaagtgtttttccagtcctcaaacattgttatagctttgcattcatcatctctaacatataaatgatcaggttatatttctctgaaaaattgctttattcagctatattaaaccaaagttcttggttaaatttttattgtaaccttccaaataaatttgttccagtgctgagagcttcttaaatcatttaaatcatctttcgacctgctcagactgatcaggttaggtctaaaactgcttaaatttcttgagtatccctgtaatatagaaacctctcctcatactttattttcaatactcttgtaataaactctttgaacatttaatcaatctgaatctgcttagaatacaattattttacctataaatgttaagaagccatttaagtggacttacttaaatgctactttcagtatttgtactctttcattgaaaaaaataatcaaaaacatgaatgtataaaagcctaatgtcacaaatcgttttcttcatgttttgccttttctaaccagcacagggtgaattaactttcacagtcagccatgcagatttcacagtctcaggcagctaaagatggtctatgattatcttgccagtatttatagcttttggctccaatcccctactgtctctcaacttcctcacatacttgcctgttgaacaaaaattctaactgtttgttatatttacactgaccatatataaaacttgttgtccaatctgggacactatattaaaaacaggcagtgtttttagcaattaagccaaaacaacaggtaataggaaattgtcctgggcaaaccagaatgtatggccctgctagcattgtgtaaagttaccaaacttccagtgtcataacmcggagtgaaatacacttaggtgaatggatgcatagatacgtggaagagtcaattaatggactgcatttagggttcatccagttggattctctttctacttttccaaatcagtgttatatattttgtttgcatatcattaacccacttccacagatacacatgaaaaatccatcttgaggaagatatggcaaaaagaaaagatgaataaaagtaaacagaaaatctgagtagcctattgccacttaacttgcctcttttgcctcattggtaaaattaatgggttgtattatttggttattttgagatctgaaattcatgagtatagggaagcccagaagtcaatatagaattgcactcatctctaattatacaagaggacttaacaaaaaagtttatgatctagagcagtcacagacaaactatgacccacaggccaaatttggcccatttctgattctgtatggcactcaattaagaactgttgttacaggtcagcatttacaatcaatttgatgacaggaggcactaagttataacccaaatgaaggataatttcaaacctcaggaagaatccaattcttctcattagtagcctgatattacaaagtaatttaacattattattattattattattaatgttttcaattccatcaacaacagcagaatgctttagaattttatttctttttcacggcataatcttgatttttcctatgtcctgcaaagcctactgtttactatctgaccctttacaggaaaagttaactaatgtatggactcttgctatcagttttgttgcatcaaaacaaaagaccacacacaacaatgtggagacatgacttgctattaacctcttttgctttgtcactgtttcaattcaggtgtgcccctggctatactggcagtccaggcaaccctggaggctcctgccaagaatgtgagtgtgatccctatggctcactgcctgtgccctgtgaccctgtcacaggattctgmacgtgcygacctggagccacgggaaggaagtgtgacggctgcaagcactggcatgcacgcgagggctgggagtgtgtttgtacgtatactaactttgctgttagttttggaggccttgattccagttctgtctcatttccaatgagaaagagtgactctccccgcccgcctttttttttttttttgcaatagttatactcttcattctttctgacactatctatccaccttctgctgttcacctgctgattgcgtgtccatcctgctgagccaagaacagctgagaaaatcctcagtgtgctttagtcagttcattgaaagacctacaatgaakctcctggaggcattttatttgatttgtccatctcagggtttacagttttgcctcaagttggcattgcctttgtgacagattaaagatgtgagtgtattaaaaaatttagaatcctcctgaatttgtaatcgactggacagatactttaagccttgaatgacaactgatgtttcttttcccagcttttatgaaaatccatgggcatactgcttcataattttctcttgaactacaaaacccgtaagcagtaacaatgaagtcaagtatttttactcacgtacagtaagtggagagcagtttgctctcttgctgtctctcttttttcttactgattctggattcgctagtgccatattgaaagtacattgaaatcagtagctaaatataattcttggatcttgcatacattcaaatccaaaataggttatttataaatttaaggaaggagtgctcttctatagtattcttttcctcaaggaaatttattttagcaccttttatttcaacatttacctattgtaatagtatttgtgcatgtcaacatttcttgttttagcatattgtttgagtctaaatcttaatagtatcttaaatagaagaatttttgtttatgttctagttttataagagttaacctcagaagctaaagctggattaaaaaatacaccaaaaagttaagactgggtgttatttgggaaaatagattttaaaatcattttttctttgtattttaaccatctttaatgaaaatgtattacactgaaaataaatgtgaaggtaggtgagaggggagagattaaatgtactgtcaaatacatttatattgtcatatttagttgatagtatatacacactaattcttcccaagtataatgatatattttaatgataattaaagaagtagactatcaaagtattttataatattgctttcaagtcaaataaattattaacatgcacataattaactagataatatatagatattcttaatgtaaacagtccttgaattattaatcatcacttttattaactatccagaagcaaacttgaaataaaaagatcatattaatgttaagcacaaaaattaaacaatagtacattaaaatctggggtagataatataatgggattatttggggaacatttcttttaaagagaattggcattctgcccatcaacaacaatggctttttcatttattgttgatgatcaatacttttttaacattttgaatacatttatcattagaaatcgtaattcatcttttccctatcacatatgtgggtttctaatctccacttgtcccatgtgatattaagaaaagggccaatcctccagttacaaagctacaccagttttataattcttatttgctttattcttgccccacaaggaaaygtatttacaggggttatacatggtatttagttcagttgctggactggaagtgtttatattctttttaaaagaatagcagtttttattccagaaaaaaatattaaattataggattgtttttgatatctagactcttttkctaaagcacagttaattatcttataattatgctgtatagattttccatatactgctcttaagcattagtgatttccacttacttctaggaatgttttctcttcacctttcactaaactaactctaagaattgttacacagagtatctttagacttttcatcttttctcttcttctaaaatttctcccgttatggaaaaatatgccatgattctatgatcttggcctttcccaggattcggtttctacttctactcctagttttgaaatcagataaaataagacacaagtgaggatgtaattctgacttattctcaattttccttttaatatatttctgtatccttaagctaaattagtgcaagagaccaaaaaatggattcacctggggtgtttgatctgcaggacctgttttagcacatgtaatcatggtggaattgcataaggcctgggggtgagagtaagggaggtagcttggctctagcaagagaatttagatgtagtaagagaaatgtctgcagtgcttgttgttagtatagtactgactacaggaaataaactttctcctattgcttagaataagtaaacactcagtttagtagcatgtattgtacaagagttaattttgcttcctttagttacttccctgggaaatataatttagactgatccacatcatggatttgtgtatttcaaaaacagaaaagaaaagaaagagagacagaaatgcatgataaatgacctaagcctgatcattgtgtgatctcaggtaatttgcatattggtgaaaggaatctatacactcactgtaaatttagtttaggctcttatttctcaaagtatataaaattctgctgaagagatcaggcaaaacaaagccaatgcaggaactgtgaaaggacttcccttggacaccttggtccctaaaagatacttatagcttccagggacagttgccagtgacccctggattttactggatccaaaatggaattttttgcagcacacaggccttttatatgtggattttcactactatcatgaagaatgtatacaaataatctgtgtccacgttaggaacctatttagacatcacagtctctcatagttagtgacctaaattcagccccaccatgcagagtcagttcctgagcataactaagcaatttattcaccttcaaattccaggcattctctaaagtcccttttaccacacagggttcatcataatagtaattttatttaaaggctcaccttgactgagaacttaccatttgccaggcactatattaagcattttacacgtggttctttcattcttgtaacattcccattccttatcatccccactgtgtgataagagaactgaatttaggtaggttaagtcattttctcagtgacttttcagtagatccgtgatttgagcatgggtcagtcttacaaatcttattttcttaacctctatgctggctactgataaacagagaaagcaaacgtggtttagccagtatattcaacattaatgaattcagccctttattcatttactgcttccatgtttagagcccattctacctcgattaaaaataaatataaaackagctaaaattacaaaatgagaaattttaagtgtatgtaatctcagtaatgacatttattttctgctaatcattgagactcctctaagatttaaaacattatggcatttatggtagattccttttcatcagagattgtcaagtagagactgtcttctatgcagaagaaaagatactagctgggtgcccagattaacttcacagcctctttttttctaaaaggaattatttgggacagctttacaatgttatgtatgttggtgagttctgaagagatattttattaatttcccaaattaagatttcttcttgataagttaatacaaatccatcctcctctttcaactgtcattcatagttcacatgtcattttataaaatgagaacaactaacctgccttcaagaaacttaaaaatgaacaaagaagccattatttgcttaacagtaaagtttagtattttgaaacacaaaacttggatttgttcatatcctattttctgtaaactcatatcattaacacagaataacccatgtgatgtttaaaatagattatgagtggcatagtaaaatgtattactctcctagagaacagaaattaaaattagtatctgttggcaagatattacttcataaaaattgcctgaaatagcattttataaatatcaaattggtgttgcctatttttaatcactgcatagtggggtttttgggatatatcagcttttattatttatagtcacaatttacttaaattctaacatatatttatttaaaataaaacatacactttgcttgccaatttgcaaaagtgatcatgaactatgttttctacttgcaacctgagataagcctagctaaatgtggtaattttccttaactctgtaaaattggcaacttccaaccacttggtgaaaccggaagtctgaagttttatcctatcttgatctacagagatataatcaacattgtygtttttaatagccagttgccaccaaagatctgatcacaataatgcagagacctttatatattatcactagaacactgttgtacatttataatcaaaaatgattaataatggcagtgattgccccctatatatgggagcagaaacaaaatagaatgtggttatcactgtaatgaaaacaggacttactattctgaaaaatgatgataaacatcagttgatctccagatgctgattactgatctaacactttgcttgttgtaccccctaaatgtcatcctctctctgctcgtactcactgctcaagtaagttyttatttgaaaggacagtaagtatgtcatagttttctrtagtctaagctgtgtcatgttgttcacatccaggtgttaggcaatctataaaacatcttctgttcaccttgtttgcaccttctactcatttgttttgttagtaaaagatatttgagtttcttgttgtcaaccttagcattggtccaggctaacaatgtgtggaatggcaactatcaccgtgattctagatgattttcctagttgttagagatcagtctcagtggtttgtatattattgaggaagctgttctgctagctgattaaggagttgcacagttgaattatcgtatagagacagctgatcactgttgcctttgttttcagcaagttttatttgaagagtaaactaaactctactttgattgcaatttctactctggcaaggctcaggaggttttattgaccttgaaagacaaactaaaatcacataatcttaaagttggaagaaataagtaaactagcctagccttctctttttctgtgacatccacaaaacagacagcatcctaatgcaaggaagcatggtgttatgaagtggctacagaaggtttgaaacctagcttgcaatttgtgtgacattatttaatttcctaaacctcattttcatcctctgtaaaatggatgtaaaatgctacatacatgtatgtgaagtatctaagcataataggtgctcaataaattctaggcattgttatcatcattgttattatgtgaccatttttttccccaaagacctgatgttttgtgcaacgcatcagtttctgatgaaatattttctttagtttaggctgactttcagtttcctgttactatctctaattctaggttcttcaagtcactgaaaaccacttttatggccaccttacatttctcctgtctttaagcccttcacatgcattatttatagattcataaacactctggttgtgactatttttctcatctgtaaaatgaggatatgaatggtacttacctcatagaattgctttaaatattaagtgagataatgatggcaaagtataatacattgccagtcatgtagtgactgttgtgtagataaaaactattatcccattattatttatagtactttcaaagtttccattagtgttttgaagagttacaccatctttgaaccacattgaacttgttttcccatgtattatatatagaattttatttaatatatataaaacacatatatcaatatttaatatataaaaaatatataaaatatatacatataaaacacatatcataaaacatatatataaaacataaatatcgttacttggtatgtcgacaaattcatcagtctcagctgaagtctacagctttcctctctattcaaagaaatgacaggttaaaaggtcttcttaatgactctggaatcaaatttttatttgagaagatatttattttaaaatagaatgactaaatacatcttaataagccctaaatatatgctaatgtaaaagtttctttttgaaggggaaaaagggaagtgagaaatagaaaattcagatccagggaaccgtcaatggcattcatctaggagagttaatttaacatacacacattaacacataattttatcttttgttaaaaatgtgtatttactcattttattcctatttgattagagcagagaatttatgtatcgctacctaaaattggttaatagctttcgccctttcaaaaatactcagtgtcctcattttagcttcagcttctttggtttggatgcagtgtgtgattttttttgtgacagtaagccagtagttattatgcatggggaatcctggtagaaatgcagtattttgtgctaattgctaacagaaagatctgtaatactggctgcatgatttgccccttacatgtgcccagccataacaatctgaatttagtactgtgtttgttaatattagacacaaatttatcctgacacttttataggcaaagcctcggaaacatttagtcatgtaaaatataatcatggtcttgaaatatttgcttttgctcctgtgcattttaggcaggatttcactttgtaaccttattagtattgctgaatttggagaatggtttggaaaggttctttgaggtcctgattgtaagataggtgttcatttacactgagccattactgcactttatcaaagaacagttgtttacagaatgtgaatattccatgtctctacacactcttcagattttccctatgatagtaaattacatttggttttaatttgcattccatttccaatgtttgttgccagacactttggactttttgagggcaaataaaagtagcttctggtgtaagtgaaatattttgtgtcagaataaaatagcaaaccattatgtaaagggcactttccccatgtgtttaccttataacttcatgagctagacttgtacagaagctttgaaaaaatccccatggctgtcatattcataagtctctctgacccattcagasagatgttagtatattgcttggagcgtactataaaacttacctttcacttatggaaatgtgcttgtactttgttccccaaaaagcaaatacagataccataagacatgggataataataaacctttggacacagaaacataaaatggaatgtatgagcccttgaaagagcaattaaatacattttcatttcaacagctgaagatgaggaaccaaaacagatgggcaggggatagaataaatgagagaaaaatcagtattcatcatgcctcttggcattctagtacaccgtagcatattacagtacatcagctctagttctgcattctggtccctgatttattcttgtatgaagtaaaaactgagaaaacgataggtactttccttggaaatttctggaaccatctagtaaggagtatctagccatcctgttatcaacaaactgattcaattccttcttggaaataggtaggttatatattattaaataaattaaagaataatttaatgtttgctatcaaaggcacacactgccctaaaaagcatggtgaaacatcctattatcattaccaagtatctttaaagatcttggaggtgaaaaaagagcaaattgcttgcttgcatcctaggaacatctgcccaaaatacatcttcactagaggtcaaatggaacttttaaaacaatgatgaacttgggctcagtgagagaagaaccttcctattcttcataattcctaataaaattataattgttactactgctgtttttaacctatgaattgcagcttgaaagtctctgatctgaatcacatgtgcaaaacttgaaaaagtgtgtcagttatcgattgtatcagttatacattccaaagtttagtagcttaaaacaacaagtgcatacactctcatgattctgtaggttggcaatttgggctgagctcagttggacagatcttccactgtcacgcctaggggctcccagatggcctcaagcccaaattggggcctcaactgccctttcctctctcacgttgcctcccttcctcaaggaggctaacctgggattgttctgaaggcagcaggggtccaagagtgtgaaagcagaaagtgcaaatttcaatatgttgctctgccacattctgttggtcagagtatgttgcaaagctaacccagattcaaggggaagggaagtagacttcacatcttaatgtgaggtgtggcaaagaagtattaacagtaaccttttttttttttttttttttgagatggagtctcactctgtttcccaggctgaagtgcagtggcatgatctaggctcactgcagcctctacctcctgggttcaagtgatactcctccctcagcctcccgagtagcgggactagaggcacatgccaccacacctggctaatttttgtatttttagtagagatggggtttcaccatgttggccaggctggtctcaaacttctcacctcaagtgatctgcccatctcaagcctcccatactgcttggattacaggcctgagccaccacacccagccagtagtaaccatttttaattgtccccagaaatgatcatcgctttgatctgtcagtcatggtgttctttcctcctaaagttttgtgctgattttcttcccgtccatctctccctttcctgagtcaaaactgaaatccttcaggcaggtatctgaatagtcattcttgttgatcggacagtctctgcctctgcaatcacaagatagttctctttctgtctctaaaccattgtttttaatgtattctcctgttcctcacacatctgtgaggttttctatcttgttctcacattcagaagttttcttccggccaaccccaacctcttccctcttcccctcttcccctctctcttctctcctaacattctacctccctgatcttctcactatttcatgtacttgggcacatgccatgctcaaacattaacccttgccattctctttgtccaaagtgttttgatacccttctctcacaaaaatattagcccacaaatatttactgaatattaactgtgtacaagaccctttcctaggcaccataaccaaggtgtttaaggtcccttctttaacgaggaagaaagaatatataaataaattaagtaataatgtagcccaaacaggcataagtgttaagaaagcaaaggaaatgcagtagtgactggcgcagggtatagggctgggggtggtggggagtttcaggtaacagtaattttagaatcatcagggacttgctctctgaaaaagtgacacttgagcacttgacctgaacacctaggaaccaggtgggagaagaccaagggagaagaattctaggtagagaagacagcaagcaaaaggacctcttccaaatccttgctcccttgaagattgagcatccctataatttatcacctggtccagtggttttatcctttggctacatggtttttcaattactggaatatttttaaaatacagtggttcacgcctatgatcccagcacttggggaagctgaggtgggaggatcacttgaggccaggagtctgacatcagccagggcaacacagcaagaccccatctctatgttaaaaaactagctggatgtggtggcatgtgcctgtagtctcaaccactcgggaggctgaggcaggaggatcactttagcccaggagtttgaggccgcagtgagtcatgatcacaccactgtactccagcatgggtggcagagcaagaccctgtctcagaaaaaaataaaaatagaaatactgatggttagaccttaccacagacccatcaaaaatcatattctgtggtggtgaggagggaaagagcccaggcatctgtattttataaatgttcatgtgattccaatgggcagccaaaggtgagaaccactgatccacaccaatgttgtcacattctaatgtgcagagataatgtgggacgcagattctgatttcctagatctggggtagagcccgattatacatttctaataagcttccaggtggtgccaaaactgttggtctgattgctactcaaagtgtggtgcacagaccaacagtagcaatatcacctgggagcttgttagaaaagcacattctcagtcagagactaagagaaaccaggtgatcaaatcacctcctgattcagaaatactagggggtgtggaccagccctctaggatttccgaaagtcctactggtggttctgaggcccactaaagcttgagaaccagactgtggatcttggtgtttagacacagtcaatttggcacttaactgagttctatgttgtgttttctctaattgtttaatgtggacaagtctgttgaagtttgcattgaacggggctatgaagccaaaataatcttttacttggtttccatgcagtgcaaatttggtttcattctggctaggagaagagtaagagatatagccctagttccagacttctgctctggcctccaaagcctctttgttcattcagcttgtgaagcatcaggagcttgcaaagcccctgcaggtgacgctctacagttgtcacctgcaagaagctgcaggtgtcacctgcaagaagctgatttattaaaagccctgccagggcagtttaatccctgtgaagtgatattgtaactcacctctagctgctgtcctatcaaaaaatcactctccgtcctccttctctttgtttacaagcaccagttaatggttttctctccattaagcagctcaggggactgctgtttagagacctaattgaattcttgccaagtttgggcatgatccagagctgctccaattctcggtattttccatgctatgtattttcccctattctaasatgtatatagcattgatacctctatctgcagaatgtaagaaattgtaactgtatacatgagagtatattataaatgcagtagttcctgctccttggcrtgcagatacacctcattactctgcaatgcaaaactaaaaatatacatgttttttaaatctgctaaaagattcaatatatgttaattttggaaattatacgactatttatgagatctattccataatgaagagtcaacaatccatttgtctctctaccaattctaccacctatcctggcccctaccaccaaatttgaatagcacctctttgatggccaaaaatattatggtgagtgtattagtccattttcgtattgctataaagaaatgcctgaagctcggcaatttgtaaagaaaagaggtataattggctcatggttccatcaggctgtacaggaagcatggytggggtggcctcagggaactttcactcatggcagaaggcaaagctggagcaggcatcttcacacaggcagagcaggaggaagtgggggctggaggtggcacacacttttaaataaccaggtcttatgagaactctgtcatgagaacatcactagggcrgtggtgctaagccattaaaaccactccagtgattcaatacctcccacgaggccccatatccagtattggggatgacatttcaatatgagatttggatggggacacagatccaaaccatatctggtagaatattagcattcttggctacttaaagaatatagtttttctagcctttagcaattatttatctataagactgaaagaggttaatcatcaaagtagggatttgtgagactgcatctaatcatgggtggtaatagactgaagggataaagaggaacagttggcaaataaataagtcaataaatattatcataagaaaacactatagaaagaaaagttatttttattttgactttttattttattttttggggggtggagtctcagtctgtcgcccaggctggagtgcagtggtgcaatcttggctcactgcaacctccgcctcccagtttcaagtgattctcctgcctcagccttctgggtagctgagactacaggggcccgccaccacgcctggctaatttttgtatttttagtagagacagggtttcaccatgttggtcaggctggtcttgaactcctgacctcaggtgatccacccacctcggcctctcaaagtgttgggattacaggcatgagccaccacacccggccttctttagacttttttttttttttaattattctactcaatagataccaagctaaaaatttatatactttttgaatgtgtaatacataaagcatgtggaggtcaaattactatgactttctccagtgcaatctaatggagcaccacacatttagactctggagcatgttttattccctgtggacaggttcctttcgattgctcatgtagggatttaggggrtacttttaatgttatattctatgccttaaaggaaatcttcaatacttgtgcaatacactttttctccccaaatctatttgctcstcctctttggtccctcagtttatattatcgcctctatttcaggttctgggcgacatgcatatctgttcttttgttgttgttcttatctttcctcaaccatcatccatttgatagcattaatattctgagatgagtagtttcatcttccatggaattattcttggaccataaaatatttcatagctgaattctttgaacatctgcctgggatgtttagcagaagtaactactctttgtcacttctctttcacagtttgtggagatgagtgcactggccttcttctcggtgacttggctcgcctggagcagatggtcatgagcatcaacctcactggtccgctgcctgcgccatataaaatgctgtatggtcttgaaaatatgactcaggagctaaaggtaggttggtgcagtcacaagcaagggccagggacaaggtgacagaagcttcacaagcggtattggctgtaattggtaaatgttcttcccacagccccaaatcaagggacacaactgttagggaaattcagagactttcttaaccagtgtttttcaaactcaagaactataatatacagatttctattaagggaaaagagtctcatgtaccccccagtgtctggcctaaatcagttttattatgtcacttaaatatgtgcaaacataaaatcaggtataaactctttatacttatagctctataaaattaaaacaaattartccttacaaaaccaataaaattcaaattaaaaacattaatataaagtaacatgattttggctgaatggaaattgctgcttgcaacaagaataggatattgastattttcacacagttcttccaccagagatgatgtggtaactcatttctcctaccttaccacatttgaaccagagagccccctacaaagggtcctgaaatgaatgtgagcatcacttgacaagtttatgtgactaacgtgctcagtctgccataggctcaaacacacaggcaaatgtaggcactgagatcaggtggccatattcatctctcaggtgcctagcctgggatccagaaatgcttacattaatatttaaggttatcatcaaaatgaaaacacatgattagaatcttgtactaaagagctagaactagtagacctttaaaagttcttcaacaagcaccagtttgataaacactgttctaaattgtggttaaagcttttggtagttaacgaggtaggagaaaacattaaagaaattggggttgtttcacctgatgraaaaagatgaaaggtgtcaacttactatcagtcaattatcagatatttattaagaaattatagaatacctcagcattgcacttggttccctggggatttcatgactcttttaatatcttcactacccttaggaaatgtagattctatgtgctttaaaaataatcattaaacaataatcaagcaattagcaagaatacataatgaccatgtgttttacaaacattcaaagtacattagcgcacagagactggagaaatcagtaagattcagggtaaccagagaatgtaccattactgagagtataatttctgttggaatttgaagtgtagacacaattttagtagagaagtatttgttgctttagaggaaggcatctaagatttattcactacacattggtagatattcttttaggaaatatattctttaattctgaccataacctttaaggtaagtattattatccctattttccagaagaagaaaccaataatgatgataacaagaataactaacatttattgaaaagctaggcaattgactgaagtcttaaatggattaccatacatagcttttacagaaactccaagaaataggaaagaagttgtcatggtctgaatatttacatctccccaaatttatatgttgaaagtctgtcacagtccattggagctgctgtgacaaataccataaactgattagcttataaacaatagaaatatatctctcacagttctgaggctgggaagcccaagatcaaggtaccagcaatgttcratgtctagtgaaggcctgttcctcacagagggtgacttcttgctatgaccccacrtttaattcatttaatatctggatactgaggaaaaggatagctagctctctggggtctctttaataagggcactaatcccaatcatgaaggctacattctcatgactcaatcacttcccaaaggctccacctcctaatatcatcacattgggaactaggatgtcaacacatggatattagaaggacacaaacattctgccttctgccgtgtgaggacacagggagaaggcagctgtgcttaacagagccatgtgagcagaggcagtggtgtgaattagatctgtctggcagatattaaaagtcagacctgctagtgaaagataaggctggagacttcagtgaggcagggtgatatgatggacaaccttgaaagccaggcagaggaacctgagtttaccttgtggtcctggtattcagggaagtgaagagttttaatgaaaagaatgccgatcagttattttccttgtatatggagagaatacagaaaaataaattaaactagaaaagcaaacattttagttgaacatgaaacattttaaaactaatacttaagcaatggatgatgaagtaaagaggatcctatagaagaggctccaatttgtgaacatcttctaagccaagggattcagtgacccatccacttctggctggatattgatccagatgacctggattatccttaaattctagtctttcttgattttttattttgttcttcttccatcattcacttgacatttgtatactgaggatcaccttctggtattataaaaacttaagttatttcacctctttgctcaatttctttaactatgtcagtgctccccaagcttcagccaaagaccatcaaggacacacatgtgatggaacaaagtgggatttattaacttgttgcaacaaggggcactgaacaccatgggggaattgtgggctgtctcaataagaaggtgttaggaataacttctagtatttgaggctgtgctagataacttaaggttagcactcaactgggtgctattcagaagtgggagtaattctgtgagtattttgtgaatcctatctagagggaaggaagaacagagggaggataaagctatgattaataaggaggcagtgttcattcatattagccaggaaatgggaggttggggtagttttgtggtctacacaaaacccgctatggttttgtctgcgcttagacattacagggtagtctctttttttctgtttcattcatcactggttcagagtgaccttgtctaatttagtgtcctatgagattatttatgttccataggaaaaaaatatggccctgctgttaggccagttcctagcaacaccgaggacaggccagttagttagcgcctagccaggtctctatgttaaggcctgccgttctcttttttacctgtgatctgtgtctctgttaattggaatgggagccttaaatgggccaggcaaggagtttatcttaactctaccccttactgactgtgtgatctcgtgcacatttttaactgtcttcaagacagtttgctctttcatgaaatggaataatgcttaccccccatagagctgttgtgaaaattaaatgaaaaaacaaaacataaaaagcctggcacatagtaatttctcaataagtcactgcaatttttattatttgcctgaatatttggcatgacactcaatgtgtaagtgcccagttgaaatagtttccttatcttttctttgaaggtgagaaggctaagttccttttatatacaaaaatgtgttctgtcraacactatcactgcaaggccatttactaaaaatgtttatgggatggaatctttttcagcacttgctgtcacctcagcgggccccagagaggcttattcagctggcagagggcaatctgaatacactcgtgacmgaaatgaacgagctgctgacsagggtaaggtggcaaaattatgaatcttctgaaagcagatagattatgtcaatgaaggaaaattacttcaaagttctgaaatgcaaatcaccttcttcctaattcccaatttggtatataaaatagatgtattctgacttgctaattctgcttcaaatcaaatcatagaaatcagtagcacgcagaaaaattggggatacctggaaattgtcaatggctaaaaagtccagaatgacagtgtattttgagaactttattcagtagcctccgtggtaaagtttgtatctgttctgatttccaaaagcactatctttgattgtgtaaagagaaagaaaaacaaatgaaaatrcttgtggtctctttcatctcatcgtgggatttttgcattagtatagaaatacagtgtaaatcagtctttccacacaaaagaggaaatcttctctattgtgagactccaaagtgcttaagacactttttaaagtcagaatgtaaagtccatgttgcatttatcaggctttttaaagaattggaaattttaaattttcaaaactgcgatggtattaaaaactttttgcagttagagaatgaagaaaacaacataaagcccgccatcttgtggccagaaatatgcatgaagctagaaacggggctgcaaagtacggatttaatttgattatctaagagctttaaatgataaagagtattggagctagaaggttcctggggattatcgagtccactttgtattttaaagaagagctgcctcgggccatgacagtgaaacgaattaacaatggccatacaatttgctaaactcagggacttaagctggacccagtctcaagattcccactggcccagtactttttctacatagcctgctgtcggtttaggaaaatatccacaggaaaatcaaataggcttctgagcacataatgctaaacaacggccctgatgttacaatagcatactaaacactttttcagaatctcatagcaacaatatagaatgtacagatacaacacggagtttcttgccaaatgtatgtagacattagattaaattgagtgcatttatctcatattaatttaatatgaaataattcatatttgttataaataagaattttctaacaggtcatggtagaataaatcaatttaacaagcacacataaatgttcataacatacaaagcctaagttacgtgttggcagatgaaaaatatgaatgaggctcaatctgtcttcaaagaactttgagatgtgtgtgtgtgtgtgtgtgtgtgtgtgtgtacatcagcatttaagtgtatggaggaccatattagacaactgcatgcaggtatataataaaacatgaaataaaataaagtcggaagaaattctggagaaatatttaataatagaataatttcatctgcttaggggtaattagaaaaaatttcatgtaataaatggcatttcattcattcattcacttaactaatactttttgggagtctctcatgttctaggaattatgacactggggatagaagtgtgagcaaaactgcacagtccttgccctcattggcttagtatagtctaatgatctgacgttagagacacaagaagtatttcttttttttttttttttttgagacagagtcttgctctgtcgccgaggctggagtgcagtggtgcgatcttggctcactgcaacctccgcctcccgggttcaagtgattttcctgcctcagcctcccaagtagctgggattacaggtgtgtgccaccacacctggctaattttttttgtatttttagtagagacgggtttcaccatgttcgtcaggctggtcttgaactcctgaccttgtgattcgcctgccttggcctcccaaaatgctgggattacaggcatgagccaccgcacctggccacaagaagtatttcattaagagtgtcagatctttattatgtctcaacctatactctttaccctttccagcagattgtctcatgctatgttttttaaacagactttattttttagaacagcttaaagttcaaagaaaaattgagtgtaaagttcagagtgttctcatatctactccctgcccccacaaccttccccaccagaatggtacatttattatagtcgataaacctaagttgacacctcctcatcacccaaagtccatagtttacattagggttccctcttggtattgtacattcyatgggtttggaaaaatgcattatgacatgtgtccaccgttgttgtaaaatatagaaaagttttactgcccgaaaactcctctatgcttcacctattcatacctccctcytccttgacccctggcaaccactcatatttttactacatccatagttttgccttttttggaatatatagctggaatcatacagtgtggtactttttcatattagcttctttcccttggtaatatacacttaaggtttctccatattttttcatgactttatagctcatttctttgtagtgttgaataatatttcattgtttagacatatcactgtttacttattcattcccctactgaaggacatcttggttgcttccaaattttggcagcatgaatcaagttgctgtaaacatctttgtgcagacttttgtgtggacttaagttttcaacctatttgggtgaatataaaggagcatgattgctggatggtatggtaagagtatatttagttttgaaagaaattaccaaaatgtattccaaatggtcttttctattttgcattcccaccggcaataaatgagagtttctgttgctccacatcctcaatagcatttggtgtttttagtgtttggattttgtcattctaataagtgtgtatggtatctcattcttgttttagtttgcaattccttaatgacatatgatgtcgagcatcttttcataygcttatttgccatctgtatatcttctttggtaaggtgtctatttaggtctttttccattttttcattgggttgttttcttgtcgaattcagagttttttgtatattttgggtaatagtcctttatcagatatgtcttttgccattatttgcttcccctctgtggcttgtcttgttctcttgagaagtgtctttcacagagcagaagtttttaattgtaacgaagcccagcttatcaattaggtttctccttgttgagcctttggtgttgtatctaaagactcattgccatatccacggtcatctagattttctcctatgctatcttctaggagcgttacagttttgcattttacacttaggtctataatccatttttagttaattccaatactattttaaaataaactttttactttacagtagttttagatttcaaaaaacttgcaaagagagtaccaagagccttcacatactccattcccagtctccccattgttaacatcttacattagcatggtacatgtgtcatatacatgttatatacatgtgtcatatacatattagctcatatacatgagctaataatattgaaatattaccattaacccaagactgtattcatattttttcagtgtttactgaatgtttttttactgtttcaggatcccatgcaggatactacattacatttagccattgtgtcttcttagggttcctctagactgtgacracactgtcaaaaatactgtaacagtgtttctgatgactttgagagtttggacaggttcgtgtgtttggtaagctgtccctcaattggggtttgcctcatatctttctcatgattagaatggaattatgagtttttgtgggaaaaacttcagaggtaaagtaccatkttcatcacatcaagaacccatgtgaccaatatgacttattactgtggatattgaccctgatcacctgactaacatagtgtttgccagatttttccactgtaaagttactcttttatgcccttttcatactctaatactatttttatctrcccattcttcagrttcagtaacataaaaggcgcagaaataggactactgaaagcaaagatcactttgatgggttgagaagggggaggaaatgtaaatactcattaattacttttttcctaccatatttataattasaaatatatcttccatgcagaccataaatactcaagtcaacatgaccaattctctctttccctgtggtcaagctgcatgacaatcaaaaggtgaattaatacagatggaattataattagagagttagatggtttcattatccaaaatcaggctaagcacgctaatgcctctatctcagagtcatgaatgatcctgcagttgtgaccagggtatgagaaatgcagtggccacaacttccaattacccatgactacattagaggagacagtgctctagactaggactgcacattggaattaccaggagccctatctcacacccataggttgtgatgcagttggtctggggtagagtcagaccactgggatattcaagaactccccagattatacwgataaagaattactgtgatcctgtagttacctaatagctaagactctcttccctctggaaaatgccttaattggtactgccaatcttttttttttttttttaaacagagtttcacccttgttgtcsaggctggagtacaatggtgtgaactcagctcactgcaacctccacctcctaggttcaagcaattctcctgcttcagcctcccaagtagctgggattgcaggcacctgctaccatgcccagctaattttttttttttttttttttaagtagagacagggtttcatcatgttggccaggctggtctcgaacccctgacctcgggtgatccacccgcctcagcctcccaaagtgctgggattacaggcgtgagccaccatgcccagcactactgccaatctttgttatgctcctttttctctgcttggttggctcaccagtcacttgatacagtctttagatttaagagcacatgtcaaggttgatcctgcatgactgctgtaggagctaccctctcttctttaagggcttttatattttatactcattgtttttaaatggagaaatctaattccctaatatccctgggtaaagaagacattattccacccaagaactcatatttaaaatgtattttgatatattttaattcatgtataaatataaagtaaaaaaattacataatcatatatctctttcaatgcattttgatttgttgccattttattttactcactggaagaacccaagttcctcacatatgagaatcatgtttaacatattcaaactgccctacagtatgtgtgaaatattaagatgctttttgatgatgactctacttacctctatagctattgtccttagctcctttcttttttcagagccaaaattttttaaagacttggagacaagtctgtatttatttctcactccactgctgcctggattttcactcccagcccactactgaaactgtttttataagataaccaatgacaatctggtaactaaatccactggatacttattaattttacttgaaatctctgcagctttgatctttccttccttcttaacatactgtcctctctctgtttttctcttaattctccaacctttcattctaaggctcttcctctcatcatcccttcaaagtcggtgttccttggggactaggcctcagtccatgttttccctcactgtataacactttctttggtcttcaattgccatgtacaagctgttaattcataaatctatattttcaaggctgacttcattctcatgctttggtcctatgtgccttactatggattggacatctcaaactaaactcatcatttcctcttaaagcccattatttctcctgtgtagaacatctcagtgttttatccgccagtatatgcccagtctcccaaagagaaattagcaggttgcccttcactctactccctctttcatccttcatcaaattcagtttccttctatggtgactctttgtaagccttatccaactctaacctgttgttatttatatggcagagtgaacattctaaattgcagatcctatcatstcattctcttccttaaattgtactatggctttccacttttttcaggatgacatacagtgctctcccaccatgatctaatctctgcttctctctcatctctccccactactcatggtctggtcatctggacccctacggattgagggtataagccagaaacctacaaattttctttggtgcctctttcttcctcatgatgctcctgcttatccaattcattaccacacactgggcttccacttgtgtgtatggcattcatctctactaccccactctcatccaatctcatattgtgtagtttgggattaccacatttgttttttagctggtctctctgcttttactcttgttctcctccaaatctgttctccgtaacgtagccagaatgaatgtttgctattccaaatgtgaatacgtcatcgcagtgcttacaaactcttcccctgacttcccttaggctcgtaggataaagaccaaaattctccccttggccacatctcccatcacttgtgcccctggccatctgcactccagccatactgtcccccagccactttgtcccaccacaaagcattgccacayatttctttattttgccttaaaggtaatctacctctccctacattttgttaatttctgttaactccaatttacctttcaaatctcagctcgtgaaagccctctgtgccatcgcaggggttccaagattcctcctgtgcttatcttataccactatttttcctctagtttgtagttataaatttatctacatgatcatttgacaaataactatatagtccaccagactatagactccaaatgggcaagaaacctttttgtttcttaccacagtatcaccaatattatacacataataggtgttaagtcaatatttgtttaattaattgtgaatgattttaaaagcatttgaacaacaagatggaaatgtagacaaacccaaaataaacatttattttgcactctttaaaatgtgttaaaatcaggcatatatttataattatattgttgaatattttgttttcattgataaacacctcttaactatttatattctgtaaggggagaatgctatgtagtagattgaactgtataaaatattaaaattttgtttcacttatattgtattttattgcctattgaatatcaaatttaatgaaaatgaaacatttccaaaaggatgaaactagtttttaaacgatttaagtgccaatattataagtttacaagattttatttatagtttttaaaagatttcaactgctaacagtgttttttatttctccttttatatttttaaaagatatatatataatataaaacaagtcatatctttttggtttggaacttttaaaattggcacgtgaaatatttaggaagaaattccacatggaactggctcattgtcattccacggggtcagctggttgctccttctttccttgtgtgttgttggtccttatggcttgcctgatgagtgcttcactaccacttagacatatggagctggtaatattggaagatgacccttgagagtatcatataaatgatttgatctgaaatctaattttagcaggaaaccatatgagtccacaaatgcaaaggtagacagtatctaagcaatgttatctattcagtagttaggtttgctccattagattctagttttaacataaagaaggcagaaaatgaaacacactggtcatatccaaccaagaaaattatgtgcagattttaagaggcacagtagaactgcttgagctaaagcaggaaagtaacagctacattgttcagaagtaaattaacgtgtgcctaatggtaatgcatgctgcctagacataaatactctaaaaaacaaaacaagaaaaaatagaaaaagaaatgggaaaaaaaaaacctagttgagtgaatgtcaacataaaagaaaaggtaatcaaaggcaagagagatacaagatactgtgtaaggcatcatttacaaaggaacactgtaaagattgcagaatagaggtaagagaatgttaaaataagaaaatccaagatagagaatgaaaggaagattgtacaacatattaggataaatgagaagttatttgtcaaatactcaaaggacaagataatagtgaataagaagaaggatgactaagagatggagatggtaatttaataaaacacagaaagagccaaactgaatcagacagatagttcctatcatgtagtatttagcattcattcataacattatcaatagcctgtcctgggtgagattgatttttgtgaattttgctttggcagtgataccactatctatcaccactacccataggtgatagtgcatttgtcataggcttctttatgaagtctctygtgggtatttttgaccagggtgaatcttcaacttaattactgtgtaatgagacatgatttttaaaaatatatctagatgatgttctgatatgattttgaaatgtgttaattgactgaaagtcaaaacttatatacttaaagtatacattaactggagcagtgtcctccactcacctagaatactccagtttttcatgtattttactactctttctggatgttagccaaacacaaaatagtgttgggtacaaacaaaatataagtctgtgagacaaaaaaaaagtgtatttcatctccaattccctgtacatgtaagttcagataagttacttaacctcctcataccttccttttcacctgtgtaaaaagagggatgatgccttctatatatctctaaattcaggaagagtaagtgagacacacgagagtgctgtaagcctttgcaaacatgtatataaatttggcataactattcacaatagcaaagacatggaatcaacctaagtgcccatcaataatagactggctaaagaaaatgtggtacatacacaccatggaatactatgcagccataaaaaagaatgagttcatgtcctttgcagggacatggatggagctggaggacattacccttagcaaactaacacaggaacagaaaatcaaatactgtatgtcccacttataaatgggagttaaatgatgagaacacatagacatgtagaagggaacaatgttcactggggcctaccagagggcggaggatgggaaggatgagaggatggagaggattaggaagaataacttatgggcactgggcttaatacctgggtgatgaaataatctgtgcaacaaaccccattatgcatgggttttttttttttaacctgtgtaacaaatctgcacatcctgcacatgtatccctgaacttaaaagttaaaaaaatataaaaaatacaagtaattctgaggtacagatgagcctgactgtgtaactcatcctttagcatgctaacccgcattaagttgatgcttttggtgccgggaacctcacgtctcctcctcttctggaatagcctagagaggaagctcttcttctgtgtttagagggaaggtatctccttcagtaagcactgtgctggccctgaagagtcttcctaccctcttcctgccccctactgccactcccaccccaccagcgtggaacttcgtgtgtattcaaaggtccagtttgaattactgtgaggccagtggctagaaagcagtgtagttgggactggagattcwcatgcctggctctyctcccaagcttcaactgtagctcttgagcagcagcttcctctgagcttctaaaaaatgcccagaaaaytgcccagccaaccacatttcctggcaagcatagcaccaggcatatggtcagtttgagtgctattagataggctttagaacttccaagggatcattggtttgattgtcattgtatccaccaatcacccaacatctttgacccacgacaatttgccagacactatgcttggcactctgaggaataaaaagagtaagacagatccctagccttttctaatctatctatctaatggagatatggcaaagcacctaacaaagtcactacccattagagttgtgaatagtggtaataataattatttttgaaaatctaagaaaagagagcatgtgctagaataggtaaggagggcttcactgagaagatggagttggaattgaatctcgaaagctggatttgttttggataagtagagaagagttaagaagcaaaagtatgaacaaaatctttttttgagaatgttccaaaaggaagtaggcaagaagaatggtaataaggttggcaagattggttaggaaaattgttttttagtcctgtatataacaactttagagaatatttactataagttaggcatcatactaggagctggatatatgataaacaaaacagaccaagttctcacccccttagagcttaccttacagttggagaggttgtcaataaataggtgagccaattactaagtaaktctcaaatccatggtgctatgaaggaaacgtcctgctgcaggaagtgtggaaacctaggtagcaccctgggaatggccacgctaaggagaagcacttaaactgaaagctgatgggtaacaaggacccagtctttacaggtgttgaggagaagctcattctaggtaaagacaatgggatacaagaaggtgctaagaagggatgagttttgcatatttaatatactaaaactatgccagggaggttgattgcatagggtcttagtgctaattgttttaacttctttcttatcatggagtttgtaggattcttgacaatttagtattgaagtaatcatataatcaatactaagaataaaatgcatgtgaatgatgactcttacacattactacgtaaatgaaataacctgtacaacagatcataagccagaggaagttaagacaatgaatatgatcttgatcatccagaatttaaaagagacagtgtatgatatacatttactttttaaaatttagacactttgagttataaataagaattggtccacttggtgtgaaattatgatcttttggtaatacagaaaatatattgatgaagaaaaagaatatattttaagtttaaattataatgtacattttctgtaccataagagacactagtggtattgatacattaatccgtaaggtaagatattggaagatgaccaaaatatagatcaagttccttattatggtgttcagtaatatgtgaaagtaagagtggtaccataaagttcagtcaagtctagactagaaaaatatccaaagcagtttagactacgaacatcttttttttttcttttcttttctttttttttgagacagaggctcgctctgtcgccaggctggagtgcagtggcgtgatctcggctcactgccaagctgttgaccttagttagtgattcagaagtaacatttaaataattgggtatgagtatgtgtgtgtgtatgtgaatgtgtttatgtatatgtgtctgtgtgtaaaaagttatttgacccatcagacctttgagtgcaaacacgtgcaggaagccaagtttaaggaaattaatggaacataattacaacactcaccagaaaagcaaggatttgagtaacctagggattggatgcacagtttatcccaaaaaaatttttaaatccaaaagtgaaaataattccattattaatgttttagaagaataaatccagagcattataatactttggttaatactctccaaattattgtgtatatgtactgcaaattatacagaaaaaaaattttaattttccaatggattcttatcctttcatcctttcatttgtgatgttaacacttgcaggatgagaagttagatgataatagttggactttatattccttcatttgtgcaaaaccttgaaaactttcataaattaaacctcttgctgcccttggaaaatcacaaaatgcagtacaattcctctagcgtcttttaccatgttctgtgctggccagacatttagttctatttaaaatccacttacgtatattttaaatattaattctctggccatgcctagtatgcaagcactctggtacaagattctagagtgttaatatgctgccaacttggaccttattcaaaactatattgagacagtttgtgattctctaattcattatctgtagttagactatccatatctttttagtaaaagagaagaaggcttatatattagcatatgcaacacatagaaaaatgaagtataaacctttcagggtactctaaaccttgtaatttttaaagaaacaatgttatacacacaccatttttgtttgactaaatatggtatattttaaccgtgaacacgttgaatgcattccagtgtgtcaaatgatattttaaatgtaaatagaggtgaatgtgcctgagaatactctttgggaggtggggctgttttggggttctgttttactttgctgacactgctgcatgattctgtgattaacaagcatatttctggtgctatcatatggaaaagttagcatttattctcccttaacattttattggcatctttgatgtgttataaaacaggcatttactactgagtagctaagcatttctccctctttgtttctttaattaacgtattgatctaaaacaaatctataggatcaagcttattgaggcagacagcctgtttgtctctcaagagatcattgctgcactccacacactttttcagtaaataaaatatggacaaaactgcaacatgtggaggctgaagattccattaaggacttttggcatctgtaccttaaagatatttcaaaaataattgtgctttattgcttcttctctgccatagcatataacaagcgttttttaaaagaccaaatacagctctctgatttccatttaatggaagaagtaataaagtttaattgtatacgtgagcatggggcatcatttgcaatacatctgatcaataattcatcgattgccgttggctcaaagtaatatttgaaagaaaatgcagccagtgggagcttatctagctgtagcttcatcatctctattaattatgtgtttcccgaatttggatcattaggctaccaaagtgacagcagatggcgagcagaccggacaggatgctgagaggaccaacacaagagcaaagtccctgggagaattcattaaggagcttgcccgggatgcagaaggtattagaaagaatcacrttttaatcatcatttctcccaacagaaaaacacagaaagggatgacacaggactggaatttctcttgttataagtgacatctgtaaaatcaaaggtagagtttcaaaaagtagtgtggttaagatattcaagggtattatctgctgagaacctgtgacctgcagtgttaaattagcgacaatagtgaattagygacaatgagggcagaatagcagtaaattcttgtaacatggctattataattacataagaataggcaacttttgttttgttattgtttttatttgaaagtatttaaagtatttttcattttcaagcaagctaatgtcatcattccacttgatacattaaagcagcactttagtttctccaaatggcttttcaaatactggggactggtttttaatgaacatctgttgcttgggatttggatgtgctactttatgagaagctctggtgcatttagctcacaattctctaggagttagttcttgccatctactaacatgaatgagaaagtggaagccattttttggcaaaagcccaaattaagaaacttaaagaatacagataatgccccatccgcactcgccccccaaaaaaacctagtccttaaatatctgttaaaatataataaacgtgcawgcatgtttagaaattgggaaaaatgctttttgttgttttttgcttgaagcagtaaaacatttttcttgctctgcaatattatgcattttagatactttgcttcataatgtagccaaataaataaggatgtgagatcaacttcaaggcagattctgactgataattcttaggcatcactggccaagaagagacaaactcccaaatgttcaccactgcaagaagcaacagggttttaatttgagagctaatttgaggcaaaggtgtgaggttctgaaacagaaattatttctgccagaaaaatctcagttaattcattgtggtttatcctctgctagatgaagctgttgtactttccctagtattattttccattaatgctacttgaagtgtccccctccaacccaaaacaacaacaacaacaaatcccactgcaggtagagcaccttcactctgagcggatccccaaaggccctagtcaatgctccaggaactttccttttctttccattgacatttcaaacacccaacacctagcagcccatcctggggactcattttcaatttgtttcaatcaaacactggtatgagaataaatgctagcatatgttttagtagatcctattatcaacactgcttactttgttctctgcaatgaaccttccatctcccaccaaagagagatgcatattcatggttacctctttggtcaatatgaatatttgcttcttctgggtgcctagggcctctaggtactatttgtacaatttgtggaccaacaggggtagactggagatggagatttatcccaggcttgctcaccaccccaaatcccacgtctatacaccagagaaaggattacccatcaccaaaggtgtctctcrttccctaaattatgcatagatcargtggtctgattgtgtctgtccagatagggcacccttttctaatttatgtgaagtgccatgtgggatagctatactttagggaaataagaacaccactcacttttgcctgcaggcactatttggtagaattaatccaactgttaaaattgaatgaaaggtcaaatttaaattgtaccagagcaacactaaatgttcattgagatgtaatacaaagcttggcagtttaatggagaaaaaaagagaaagtgggggaaggaagggaggggagggaaggaagagaggggagggaggaaaaaggaaggaagggagggagggaggagagggaaggaagggaggggagggaggggagggagggaggaaggaacagagggaggaaaggggaagggagagaggaaagaaggaagggaaaggagggaggaaggaagaaaggaaatggaaagaaggaaggaaagaggaagggggggaaagaaggaagggaaaggagggagggaggaagaaaagaagaaaagggaaggaaggaaggaaggaaggaaggggaaataagaaagggagggacggaaggaaggactcaccaaaggctttaaagtaggttatactgtatatccacacctctttttctctctctctaaactataataatgagggataaccatcagtacttttacatttttgtttgtcagttgtaataaattgctgtgggaaaagtaaatgcttcagactgacatttatctatttcagctttatgtttggatagatgtactattcatcctatctttcattatgagtcatgacctcgttatagataatcaccttctattcatctaagrcattcttatctcactataattttataatatctaccgtgctatgactcctgattagttcataaataaactgttttattccacgcattattagaattaatgagtggacataggtaaacccattagtgtttatttcctgacatacaataggacttaatcaatgatagacacctttccttcctgtttctcagatcagagtattactttctattcttaataaatttacccatcagaggattttgttttcagtcttagtatgaaaacagttttgcttctcctgaggaatttttacttacctttatagatactgtatgcctcttaagaatcctatttgtattccctgctacrcgtagtctactaagatgcttagtagtggacttaggatgcactgcattgaacgttatggcatggttttctgtctactaattctttccctaatttatacaacttttttttttacctgtagtgctatttccttttattttaattttatctgatattaggatttttaaaaaattacctaaatcctcctttgaattaagttggaaataaataagtaaattccaaagatacatcttttacaatcattttcaatactgtgggaaagaaaatatattgaagtgatagtgcatacttttgaataagagatgaaaaacacattcatctttaagaatgctcagagaagttccagatcctatttatacataggatctggaactatatatatgtatataaacataaaactgtatgtttatatatgtctataaagagtgaaacagacttctattaaaatgatgcttcctttccttttttggtgggggagatttctaagaaaatcatattgcctagcaagtgatagatgcctatgagagaaatggaaaatgacagcattttaaaatttaactttcagtagaaaaataatggaaataaaaattaaactagacagttcaccatacaaaaataatgttaaatgagggtaagtaaagcgcagtgaaataatctggaaaataactataaaactttaaaacactaataataaataaatgttatccaaattaaactggcaagttttaatgggccatgtgtaatttatctgtgtcccgatgaggccatatttttctccaaaacccatatctaaaatttgtttttcataatgaagataaagtagcacacataccaaaaacccatttgaaagatgctctcatttaatccaaaaagatactgaaggcccatgtccattttggggagcttgtattttttttacataacatgggttgcaacaaaaagctggccatggaatagcagtttattccataagcagccaatatatttgctaaaatgtttgttcttttggtcctaaccacattgaaatcttctgggactatttcaataacagtaattgcaacaattgataatatccaactggaaaaaaaaaaacaacctcatgactgagctgcacagtgatgtcctatagaaactttatggggtatgtgttatatgttttgatgtttttcttttttttattctcatgtttttattttcctttttactttaagttctgggatgcatgcacagaatgttcaggtttgttgcataggtatacctgtgccatggtggtttgctgcacctatcaacccatcaaaagaagacatttatgcagccaacaaacatatgaaaaaagctcatcaccactgatcattagagaaatgcaagtcaaaaccacaatgagataacatatgacaccagtcagattggtaattattaaaaagtcaggaaacaatagatgctggcaaggctgtggagaagtagaaacacttttacactgttggtgggaatgtaaattagtttaaccattgtggaagacagtgtggcgattcctcaaggatccagaaccagaaataccatttgacccagcaaccccataactgggtatatacccaaaggaatataaatcattctactctaaagacacatatacagtatgtttattgcaacactatttatgcaaagagatggaaccaacccaaatgcccatcaatgatagattaggtaaagaaaatgtggtacatatacaccatggaatactatgcagccataaaaaagaatgatatcatgtcctttgcagggatatggatgaagctgaaagcttcagcatcctcagcaaactaatccaggaatggaaaaccaaacaccacatgttctcgctcataagtgggagttgaacagtgagaacacatggacaaggaggggaacaacacacactggagtctattgggggttgtggggagaggaaaaggaaagcattaggacaaatagttaatgcatgaggggctttaaaacctagatgatgggctgggcgtggtggctcactcctgtaatcccagtactttgagaggccaaggcaggcagatcacctgaggtcaggcgttcaagaccagcctggccaacatggcaaaaccccatctctactaaaaatacaaaaatcagctgggcacggtggcatgcgctataattccagctactcgggaggctgagacagtagaatcgcttgaacccaggaggtgcggtcgcagtgagcagaaattgtgccactgcactccagcctgggcaacagagcaagactccatctcaaaaaaaaaaaaaacaaaaacaaacaaacaaaaaactggttgacgggttgataggtgcagcaaaccaccatggcatatgtattcctatgtaacaaagcttgctttcttaatacatgatcattttgctaaagtcatttttgtgcaccttaatgattgcttcttgtttacaaatggttttaatttaaagaaattatgtatgccatccaaaagatacagccatatttgccttttccctttctctatctgttgtcattctttttccaccagattcttctctgcagaagtttagctttgagaccagagcacaagagaaatagtgagactctgtctctcatttttcccttcctctatactgcctaggcccagaatctaaattagatcaaatttcaaaagatatttcttatgaaagctgatttatacacgcacacacacacacgcgcgcrcacacacatattcatttaacaaagaaaaaacatacagctttagcaggttgggaagtggcatttattaatatcatcttcattttaaaaagtgagtacaaattatatcagtagttacttacatgctacaattggttaaagtcagctatacagatagcatgcactcagactaaaggatgagatagtaccataggtagagccaaatctgctactgctttcttgaaatctaagaagcagaaagcttcttacatttaatcattggtactctggaaggcttcccacctagtttgctggaccagggagctttcaaactaatcagcctatggttactgtgattctgtaacaaaattgagacacagcctaggtgatgtatcttactgacaatagtggtgaaatattgggaggattctttggcatatgtcaaggtataactgttaggcagtgggtcaagaaagagccaccctcactaacttctaggaatacagcacctgacaataacttctaccacagggctaggaatggccatatttgttctttaagacatgtgattcaaatatttctgctaattaaaccatggctgtcttagcccatttgggctgctataatgaaaatatcatagattttgtgccttataactgaaatgcatttctcatttgtgaaggctgagaggtccaagatcaaggtgctggctggtttggtgcctggtaaggagctgcttcctggttcagagatggctgtctccttgttatagtttcatgtggtagaaagggcaagggggttatctggcatcccttttataagagcactaatttcattcttgcccttatgacctaatckcctctcaaaggctctgtattaatctcttctcacgctgctataaagaactacctgagactgggtaacttatgaagaaaagacgtataaattgaccacagttctgcaggcttaacaagaagcatgactaggaggcctcaggaaatttacgatcatggcagaaggcaaagggaaagcaaggaccttcttcacatagtggcaggaaagagagagaatgaaaggggaagtgccacataccttcgaacaacctgatcttgtgagaatttattcactatcacaagaacagcaagggrggaggtttgctcccatgattcagtcaccacccaccaggcccctccctcaacatgtgggtattacaacttgagatgagatttgaggtggtcggtggggggacacagagaaaaaccatatcaggctctgcctccaaataccatcacattgggaattaggtttcaacatatgaatttgaggagaacataaacattcaatctacagcattggctatcagggttaaagtactgactacaggaacttttaaaccaaagacatatataacgaaaaaagaattataaagatgcattgtggaaagggtatattagacattgaaactcaattctttctactatcccagtgtttctcaagctctagggtacatcagaagctctgagaaggcttgttaaagcccagattgctggtcctcacccccagaatttctgagtctgtaggtttgtggcagggcctgagaatctgcatttctaatgggctccaaggtggtgatgctgctgctgcttataggggaccacattttagaaccactgtactgacccaccttctcacatacccctctgcctgctctgcttgtcctgactatgtacacctgtttcaggagctctgcccagtgcaaaactctctccaagaatagaaattaattttcaggaatctctatgtcataaggagatcttcggatacacccttgaatggtagaaaatgcctcttggccaaccgagacccctcattctaggagttttcaaaggtaatattatagaaataagtattcagctgacaaaagagtttgagaaaacatctctcttaaattcaccaaaaaaatgtcctatagaacacactccaggaaactttagtctaaaactaataatataactgtgtaaatgtttcaattcaccattttaaacttttatttgacgtagaattcttttctcaaatgaaatcctgcccagaacatcagcctataaagcagactcttggcagaatagacatcatttgtagaaaacctgaagcacctggagaatcctacgattccaaggagtacagtttgaaaccccatttaatgcataataaacacagacccttgtgaaggatgctattgctggaaagtgtccttgaagcctaatttataacccttctcctagaagggttataagtctagaccagtgcttctttcttcactcctttaaaaaatgaacacaggagaactatgtggaaatacaagggcaggttcattttcagagatctcatcactgagtgtatttccacactcagtatttttaaactgactgatagccactgctatgactatcttatcagcaatgcagagcttgcgtttccagcctccaagtgttatgctacaggtcactgttttttttaaactcttacctgartatgcttcgacctacttctttattttaattctttctttcttttgaggttagaaacaccatgctttaattgctgtaacccccaaaagaaatataatattgagaaacatattacatttccctgtttgttactgattgttgtcttaactgcctctgtggttcccagcaggaacactcacggcaaaatactcttcatttggagatggtggtgcccagcagatgctgaataccatgttttcatgtggcatgtttgtttactaatttacaaaatttgttttaccccctgcagctgtaaatgaaaaagctataaaactaaatgaaactctaggaactygagacgaggcctttgagagaaatttggaagggcttcagaaagagattgaccagatgattaaagaactgaggaggaaaaatctagagacacaaaaggaaattgctgaagatgagttggtgtgagtagatgagttattattttttcttttgacaaactgagatttccagataatttacagttttctaaatttttatcacacgtataagtaaaagatgctttgtttttccaacctggagatatttgctatgttatctatcatctatctatctatctatctatctatttatctatctaccatctattatttattcatttacttatttaattgtactttaccattgttccaaaatgaatcaaaagcatgttcttgcctacatataatcaagtaaatgatcttttctggtgctgctccttctgtaattaggctaatgagtttgttttgttaatcatctgcattagggacttttggactatcagttgatttttgttttaataaaaatacctttggataaacaaagttatgactttaccattcatatattggccaacctatacattttatcatcttaagaaatgctgaaaagaaaagtcatcaaataataaacacctaatactttcaaataagagttgcgaatatgagggttgggaaaagtgatagtgattttacccatgctaaagaacttttatgataacgcactcaataaaatagatacatctctacattcatagtcagctaacttcaaagtggtagtattactaatacttaaataatttatactaaaccagcaatatcagcacaccagagaacttgttaaaaatacagattgtcagaccccctcccagacctcctgaatcagaaactttggggatgggacccagcaaaccatgtattaacaagcccttcaggggattatgaggcatgttagtttgagaattactgtctttcaagtatttagagtttcttaatgactcgaaaattatcactttagaaaaactaggtaagttaaatccaaaaacttccagatcaatcagttggaagaaaaagaaacatagattaaaattatgctagtctactagcatgacaatgacctagaattctgttcacagtttctgagcaaacataacaatattcatcattacattcaaagtaatagagaaaaggtctcagtacaatgaaacaagtggattgtttgattttggtatgtgaagtgaatcttaaaactcatttcatcaatcagattcctagaatgacatgattcaaaatgttattttacttacaaatttaaaaggtttcttaaaaatctgtttcgcttttattttaattaattataaatggtctcaggtaccagttttcaacttgatttagcacacagtgaatctattttacatgttttcttattttctcattcttttcatgttagcatctctttgtaacatggyttaataccaataaaccctaaggcagtgacatgagctcattgtctattattgggctgggggtggttacagagctgcagaagcccttctgaaaaaagtgaagaagctgtttggagagtcccggggggaaaatgaagaaatggagaaggatctccgggaaaaactggctgactacaaaaacaaagttgatgatgcttgggaccttttgagagaagccacagataaaatcagagaagctaatcgcctatttgcagtaaatcagaaaaacatgactgcattggaggtgagtcttaggggcacttttatcttaatctcagaaggttggggactgcgggggcagtgttgaacatggctggactattcaagttgatgcacatttacaaaagtcaagagtgacaactctgaaagggggcttctaagaaacagaacaagaaatgacttttttttgtttttgttttgtttttaatgaccagttaccatcgcccaaagaatcaaataaaattttgataaattaaactgttgaagatatttaagaacactgtgatacagtggaagaagttctttacagggagtcaggcgaccttggtctcaatgacaactgtgccactatctagacatacaaattgggcaagtcaattaatctgtaagcatcagttcyycaaatctacaataagtgcattatactatagcatacatatagggtatcttcaaatattcatatcatattattttgcagctttcccaaactaattcacaaatcttgttcagagatcttgctgccaaaaatcatagaagttccctacactttcaaattcaatctgagcacatgacaaatagctcaatgaattgagaccagagcttggaaaaattttggttcctctttttctatgcgctgtgttctatgcaaatgatcttttagaaggaactaacatgaatagatcaggtctgcgttattttctcctccttttccacacagataacagttacttctcaactcaagaaattatgggcagcctctatctttttaagagttctgatggaactagaactaaaacagattcctccattattttttcttcttttttttccaatttctttcttaatcttaacatagtaaatwatcacttttcctaagagtaaactcagcacatataacagcagcaccctgtatktgatattaatatttaaacaacaacaactttctccccagagacaaatttacctttgctgttttcaaagtatctgactccaacaggtcagaaaacagcagcagacctatacrtcttctaacacataatttcaccgtcaacagtaactcagcaccctctggcatatagtatgtatgtagaaatgtttgttgaatgacagtaacaattgaatacaatcaaccaggattttttaaatctattcatttctattttcctttagattaagtagtaagaggaagaattacatttttttaatatattttatttccgtgtccctcttctgggacttagccttgtcattctggtagaatattgaagaggcttactttttttcttcactgatgcacctaaccaatttggagtctactgacatgctagcagtattccagaaatactgctgtgaggcaggatgctgggccactgtcctgtcacaggctccagcatgattcrccctgctcggtgacacaccagccgtgtgacttacccgaaggtgcacytgtctattttatggcaaccgtttgataaatgaaaattacctgtgtggaaagcatagtaagtatttgagaaatatttcaagaagagttatatggcacagtcaatagtacctttagctattcgtttcttttagtgatgtttaaaaccagaagtcatcattcttgggcacccctacaaatacctggagcttatgtatagtcggtattgaaattctgagtggtcctgtttggattttccttgtatgtgccacgtttaactaaagacttgtttaaaagttactggataaaatagataaactaactgaatcaatatgaataaggcatagattatttatggttgcttaaaccaaataaataatttggttgctgccaaaatggctgaaaatcacrtggggtgtttgttaagccaacaggtttcatgggctcccacctagagagtctgtgtaggctgctctggggtttggccccatgtgtacattctaacactctccctgggctaatctgatgcctatacaggttcgaggaaaactgacacattgcatctatttgattgaataataagctgcattttaaataaataactcccttataactgtgtccacaatgaaggtaacacaattaatacccaactcaaaaactttttatttattttaaggtggyatgtaattttctttttaaaaattttatcaagcctctaattcattcaggaaacgtgctagacaccaaaattgattgtgtcagtgatgagcccccttagagcagcagcctcagcgtaacctagcaacttgtcaaaaagacaaattcttggaccccatccctaaatgaccaactcagaaactctgagaatggggcccagaaatccgtgttttaaaaattcctccagtgattaagatgcagcttcaaggttgagaaccacgggtataaacactaaaacaccatctctgattacttcaagtaacttgtatttagtgggaggtacacataagcaaaccactccatacgctaccataattatcacaggcgtaagcaaaggagggagtctaagtcacccctgagtttaggaagagctttgtagaggccctgacacttgtgctagatcctaaaggataagcactgggtcacagaagaataaagagaagaacatttcagaaactgggaaaaacatatacaaaggcatggaggaaagaaaatgacattttgggggaaagttcagtggtttgataggcttggaaagaagactgcatgtgaacgactgaagggatagaaagaaagagaagataggcagagtgcagaccttcagttataagagaatcgcattgtgagactaagctaaggaattggtttttatcctgagagccataggaagcaattgaaatattgcagtcatgggttaaaataaaatgttgcagaatttgagtggctcactkaaactgaataaatggttttttatcggaaaatagtgtgatattaggctagaaaagtaggctgggataatatttatctacatatctgtcaggtacctaccatatcaaggtactgttggtaaccagggtatttgaggttgaatagaaatgattcctggcctcaaagaatttacaacctcctgaaaaattcagacatgtyaacctttcactctacataatactatgataatattgactgggagattcagcaaaagtttcacaaaaataacagcatcatagcagaagtggagaggaattggaagaaagacagagcaacaggaaccccagccagagctttggaagtgtaaggtgatcttaggaagtgtccagtacagcagaaaaactttcaaaagctacgtaaaaatctgtagcagagaaggctctggaatttggagccagatcatagaaggctttggatgcagccaactagatggtgatggagttggaaaggcatttccagcagtggagagagggctaagggaactggggacgtcatgggaagaaaagagaagacaaatatttcagtgaagcaaaataatatgtattgagcagtctatccccaaatctaccattatatccttgccaaagaaggcagtgcggatcaagtaaagagtaagttgctacataaagaatacacaggccagcctgagcaacatggtgacaccctatctctatagaaaaatacaaaaattagtcgggcatggtggtgcatgcctgtggtcccagctacttggaggctgaggtgggaggattgcttgagcccagaagtttgagcctgcagtgagctgtgatcatgccacagcactccagcctggatgacagtgagacmstgtctcaaaaaaaaaaaaaagaaaaagaaaataaaagaaaacaataatagacaggaagatagcttttgcaggttcctgaagaatctaccacaccaacacaccaaaaaaaaagaaagaaagaaaaagaaagtgtccaatttgcaaagctctggaataaataaagatctaattaattacaagttaaaagtagaaatataatcaaccttcatatccaaacaataattgagcaattatacttatgccatactttttgtagaataattctccctatacataggccttctttctgtttcttaaatactctaagtttcctatcttargtattttatatgctacatcattttctatctgtgcctctctttgtttttattgtactcatctaatctttctttaagaatatattatacattaatttactcattcattttatctctcctccacacaagccatgaggaacatgtgttcttcctcacatcccccaatcctagaacagtatctagcaaaggcaaaacagattgttttccgtgaataaataaagtgccatagaacaaacccagatactctatacttttgtcaatatttgtgagctccaaatttccatcttttctcggttcaaagctagaacccatcagtatctaatctgaaaacaagacacctctaaaatttatttaacctcatcccagcactytgggaggctgaggcaggaggatcatgaggtcaggagatcgagaccatcctggctaacatggtgaaaccccatctctactgaaaatgaaaattaaaaaaaaatacaaaaataaaaaaaattagccaggcgtggtggcaggcacctgcagtccctactcgggaggctgaggcaggagaatggtgtgaacctgggaggcagagcttgcagtgagccaagattgctccactgcactccagcctgggcgacagagtgagactccgtytcagaaaaaaaaaaaaaaaaaaaaaaaaattatttaacctcttgatcatcatttctgattgagtatgctaagaagcacattttgatctttgcttttacaaaagattctaactcactactttattgaaatcaaaatatatatagctcttcaattaacacacgtgtggaaatatcttccctgtttccagtggcacagcattttaaattaccttgatccattaattcaaacaagccatgttgtaaaagattcttgtgtttctgtacatgctatactttaagtcagctcatacaaaagctaagggctaaaattggcagttgtgtaaaagaatgttagacccttggaagataagatatgacttgtaatcagggagattgtaatcagggacattgggactcttcccacatttgttgtctgtgaagagtgaatgacatatcaaaacttcccctgaattagtgatgggagtagctgaatgagccaagtgtcagcagcacaagtcccaggaatggacttcattttcttttttctttcttttcttttcttttttttttttttttttttgagacagagtttcgctcttgtcacccaggctggattgcaatggtgcaatcttggctcactttaacctccacctctcaggtcaagtgattctcctgcctcagcctcccaagtagctgagattacaggcatgcaccaccacacccagctaattttgtayttttagtagagacgaggtttcaccatgttggccaggctggtctcggactcctgacctcaggtgatccacctgccttggcctcccaaagtgctgggataacaggcatgagccaccgtgcctgacccatttttatttatttattaaaaaatatttattgaggaaactcatctacatactagagatagtgatatataaaactgtctttatggaatttgtgttacagtgcaggagacagtcactaagtcaataaataagcataagctacgaccataaagtctggatgcacgggctgataaacataagttgtttactgatatgtaataaatggtatgttgcatgatattgcataatagattcaatgtgttgtccttcattaacaatgtgtagttcaacaggctgtgcctttctgctagtccctgtacatgtatctgtgatgcattggtatttctgatttttattacctaatctttgtttttagcaactcccggcaaaagtaatcaagacgaatcaatctatataaaaaagaaaataatattgtctatgtttctaccactctgtagaatataattcagataaatgggttctaagaagaacaaaataaggtaattataatagttaaaattacagtgttactgggtgccaggcagtgttctaagctaattcttctccaattttacaatgtctatcaatcatgtggggttcttgttaaagtgcagattctgagtcagtagttcccaggaatggattgagattatgcatttctaatgagcttccaggtgacgctgatgctgctggtgaatgggctgcacattgagtagggagggactaaacattttgtatgaaggtaaattacttccttaaggtttcatagcttgggagtgagcagagctgtgatcccaaaccagaagggctgtcacttggatgtagcttttaatcactgtgccctagtacatagagaatgaytgagacaaggataggtgctattttagataggtaatcagaggagtggctattaccagaatggagggaggamacaagccaaagagtaggaagagcacatagtgggaakatctgcaagtgcaaaggcttagaggcaggaactagttgtatgtacctggcaacatactgaattggtcggtgaagggaaggaaagaagggtatgaaattagcactagctcagtgcaaattttaaaactgtgatttctataatagaagagatagtattttcgtagtcaaggacccaggatctatcattaagtagacaggggtttaaatcttaatcacactgtactatgtgaccttaaaggaatcatttaatatcttagttcatctgagctgctatagcaagagaccaaaaactgagtggcttatatgcaatcaaaacttatttcttatggttctggaggctgggaaatccatgatcaaagtattggcagatttggtgtctgatgagggaccactttctggttcatagacaccgttttcactgtgtcctcacatggtaaaaggatgaacaagctccttcaggtcttttttataagggcagtaatcccgtttatgaagtctctgcttcatgacctggtcacctccaaaggccccacttcctaatcctatcaccttgaggattaggatttcaacatatgaattttcaggggacrcagacattcaggccactgccctttacttatycaatttcccacttatgtaaaaagtgatcaacatgggatccaaagattggaataacaaaatgcttacaaactgtctggcacatattgagatctaaatgaattagcattattgtctatagaaaaaaactataagtggtcaaagcttaaaattataattgatgcagttaaatctgtaggtagaatggtgatttcaggaataggaatgaatcagaagtataaagaataaaataagtaaaaaatagaccccaaatggagaaatagcaatatttgtctctcactgattttactcttctaggccaggattgagtttcatgtacttttgagacaagctatatgttccaaagaaaaattataatctrttctctcatgaaacagtccattaggttgattcttccatgtgatggtttctctatttcttaaaaagtattttccctaagtttccttaaaaatctcacttcaaatttcacagaactcccattgaatacatctgcttatgtttatgctcacaaagtactcatttgtatatarattctagaattcaayatgtagtaccaatataactattcagcacttatattttagttagaaatggatgctccatctttctttaaaagtagttttaattccttaactagtatcgcataacttttcttcgcttggatgactttctcacaatgagaagaagaaataacctgtacaagcctctacatagaagaactcttcaaggactggctaagtagtttatatttttctcatctagccacatttcaacatgatgtaccttttttgctaagcttttattcaaacagctcaggaaagtcaggaatacaaggggtaggattttatgaaaatgcaattttgatgtcttgttcataatggtctacagaaaaagaaggaggctgttgaragcggcaaacgacaaattgagaacactttaaaagarggcaatgacatactcgatgaagccaaccgtcttgcagatgaaatcaactccatcatagacgtgagtattgggtaaaactcaaaagagagatgataatgaataaatgggagccgatgagaaagctcagtaatagaagcaaatactagtacttgttttcttgtggagataaaattatttttgcattattctactgtgaccatgcctatctrttggtgacaactggaatatcactttgttctcccaatggacatgagtgtttgtgtaagtgtactcacacattcacacatatctgtttttgtccacagcgatgaaggacatttcttgttcctagagcagcacttacaatctgcttcaatatttatataacattagttaaaagacaaatgtaaatttacaaacaggcttttaacatgtaatgtctaatgcattacatagagtgatatgtggtcatagaaatgcaaatggcctaagagatcctaatgacatgtatacctatgaagtggcattgtttaaatagataggcttttcttggtctaagttggtttcttaaatttcctagtctatwccattaaataatgactttaattctctattctttttgctatgttagtaagtttgaagtttcattttaaaactaaacatgtgggccaggcacggtggctcaygcctgtaatcccagcactttgggaggccgaggtgggcagaytgcctgagctcgggagttcaaaaccagcctgggcaacatggygaaaccccgtctctattaaatattcaaaaaattagctgggtgtggtggtgggcacctgtaatcccagctactcaggaggctgaggcaggagaattgcttgaaccagggaggcagaggttgcagtgagctgagatcgcaccactgcattccagcctgggtgacagagcaagactctgtctcaaaaaaaaaaaaaaaaaaactaaactaaacgtgtagttatgtctcatagagaaattagtaaaagagaggaggcttgaattcacttgcttaaaatgccctcttctctacatatcagtatgttgaagacatccaaactaaattgccacctatgtctgaggagcttaatgataaaatagatgacctctcccaagaaataaaggacaggaagcttgctgagaaggtgtcccaggctgagagccacgcagctcagttgaatgactcatctgctgtccttgatgggtatgtcatttgtttttggaaatgtttgtgtattttgatgcttgtccaaaggttttgactagcataaatagtagagaatcattttcaaatcctgatttctgttaattatgaacacactagctatatggcctttctgtggataggcttaattaggagggtctgggcaaagcttygctacagcagcatcaaaagtctgatttacaagtagactcaaatatggcttagtaggaagtgaacatagccctaggctacacttagaaaaaattattttctgttctttattaaaaagcacagtggttgccttattagcattttaaataacatatatgaaaayacattctgtttcaaatttcagtttcatgtttctaatggaatcaaaacaatttattgttaaaaggatggcttttgaaaatttggycccatacgtagtctttaagtcttttttatttttcctcttttaagctccagggagacattacattttctcctgtaaaatagcagcttattctagctgggattattacaaaggtcataggagggagagtaaagagggaagtatacatttgacttacaaacagccttctgtgtataactgatatgcttttcctacaattttgggattgtcgtaatttaatagcggtgctattagccccaagaataatttgcccagataaatctacatcacatgcaaagctttgttctcatacttaatacttactgttataaagaaaaaatgctaatgtttgaagaccttggacaatatatgaactatcattttattttatgtcaaacttttgccactttataatgaagggtgggtggcagatgaaacacaaagctaggtatcatcagatccaggctctaagtccttacttggggacatattggtcatttggcctgaaacaggccatttaaccttctgaaattcacttrgtctcttcygggaagtgcacctaccccagaaagattttgtgaaattaattccagtaatgtagtacaagtgctctgaatctcacagcatgcttcacaaataargtgaagaattgtctcatatcacacacctgctagagcacctggttgcagagacttttggaggatgctatgggtatttaagatatgttggtagtatttcatagctgaattattagaaatataagtttaggttatagaaaactataggacaatataataagtagatacttcactattatttggaattgtcatagatatattggccatgatcatttggaagccagatttcrtataattaggacgttcttcatttgagtaccattgagtgccctgacatwcyktttttgaatcatcccaccagaatccttgatgaggctaaaaacatctccttcaatgccactgcagccttcaaagcttacagcaatattaaggactatattgatgaagctgagaaagttgccaaagaarccaaagatcttgcacatgaagctacaaaactggtaagaaacaaatggcacatgtgctgggaatggaagtcaacctttttgaatttttcaaatgtaagtcagtctggaaaatcccagtaaattggtatatttgttttgggytatttttgaagacctcttttaaaatttgcctaaaataaattctcggtatgctataattatagcagaactcttttctcagtcacccactaccactgttagggtsttaaaattatctcagaaaccaagcaagtttgtgctaccaactcacaaaataaaacaggcaaagacaacactctggatagggaattttatcaccattatctcaaatggcattagtaaaaaagaaaaaaaagtaaccattgtatataatcacacacaaattggttacatatgaagtttggctataaaattcactttttaataaaaacatactggatcatatgcttctaaacaatttataccatgtttatgaattaatgaatttttatgaatttttgaattaaaaagctcttaacctttggctacaatcattgttcgtaatacatttggaacaagtattttagagtttgggcattccaarttctatcacattatttgaatgccttcaatggtgacaaatctttatgctttagatgtaaagcaacattttgtacatgagttgtgtgatagtaagttggtagtactatttcaggttaaaaaaatctcataggaatcatcctgaataaaatgttcagaaccatcatttatttattttgtttcacatagaacctaccaaacacatgagaattttttkggggagaaatctgattggacatttgactgtgagtgaaatacacataagcagtggtgttaaagaaactgatcaatattttctttgcttcagtgttgggcaaaaatactttctaggatttaggggatattagagatatcccctaaatgaaccagtcttagcaggttcattttgtgatcataatgaaacatcatattctatgagcaatttgtactgtttttggyttctcttgagtgagccctactaatgccrtatgttctgtygacttcttattcaaaatagtggcatgatcattgcagaagcatttctatgttcagttatcctttcagaatgaatctacttttcaaatctaaactaaattttaatccatcttctgwtagataattttctattttaaagaccctaatttcaagttcaccattttcatttcacctgttttattgtatgattattttcagcacctaaaatggtgcctggcaaatagtaggcacttataaatgaatgagtgtattttttcattataattgacaccttttatgcctgttcataatcttttataccaataaaaatttgctgtagtaattgcttcatccttataaatttcttgtaacattttatgataaggaggtgtttaattttaccctaatttaatacctttaggaaaaatcattttttgccaacatgaagtgtgcacttacttcttaccacccatgcttatacatggtaggctaaccaacctcaaacagagagtgatggtgagttgtaatgcattacaccatgtctgctgttatcattattccttctctctttccacaatcatttaaaaataattaartgtctgaaaaattacaaaataagtgctatagagaatcagtgatttattaaatgactatyggataagaaaaagaagacaatctgtcccagaaattttgttggaatgtttttcatgaacagaatgaataaaattttagtttaatagatcagtataatrtagttctactttgctggaaaagaaatatatttgaaaagcattacgttgagtaattatctagataggactaacatcccataaatataagatctgatataaaagctatagctcaacagagaagaatgagattaaatgtattattaagtatagaagagttcaaagcttaacaatacagaagagtcctctactcctttgagtctagccctataaagaaggaagaatgttttcaataacttaaaaggaaaaacaaagaaacaawttatacatttgcaggagraaaggaaaaggtcaagtagtasagcaaccaacgaccactatgaagaaagtggaggtcagacaatttgagaagaaaaaaagcattgaaaataccataagaaaagaaacaaagaaatgatagaaataacctccaagcataattaagacaatgtttaaaatcaactttgattttttaaaaatttacttgtcttcctatatataaacacacatagacaatcaagaatcacactgaaaggaaaatatgagtgagaaggaagtggatcctttataagcaggagaaagctaayacsatttgtttgtactgcagtattattttgtaaagagtaatagctacttgtcttgcataactaatttctttaaatatcagaatgaaatgttattttaagaatttagacatcatgaaataacaaatgctatttttctattggtgtcgggtgaggaaagtactataaagcatttgttttcctacatataatcaccaagaaaatatctcatttagtacttctctagagggtgcaaggaaaacagaaaggagatatgtcactcataaaatggaataaaaatggaatatggacatcagtaattttttctcatcttagttgctttgatcctataagagactctaaaataacagagaattagatgtttttaaaacatttccaggtcatagtaaactcaaagcctacattatctatcagatcagatttttaaaattgatgaatgtattaatgttctctagaaggacagaactaataggatagatgtatacaagaaggggggtttactaaggaatattgacccacgccatcacaagatgaagtcccacaataggccatctgcaagctgaggagcagggaagccagcccgagtcccaaaacctcaaaagtagggaagctgacagtgcagccttcagtctgtggttaaaggcctgacagcccctggcaaacccctggtgtaagtccaggaatccaaaagctgaagaacttggagtgtgatgktcaagggcaggaagtatccagcatgggtgaaagatgaaggctggaagagtcagaagatctactctttccactttcttctgcctgcttttattctagccacactggcagcttattagatggtgcccacccacattgagggtgggtctgcctcttccagtccagtgactcaaattttaatctcctttggcaacaccctcacagagacacccaggaacaatactttgcatcsttcaatccaatcaagctgatactcaatattagtcatcacaagtccamcccttgtcaacttgaacccatacacatctcctgaaatcatacataatctccaaataaagacaataataacatcataattatacctaacataatacagctatcccttgtacaatcagaagcacactaatccttaacctaaatgctattacataaagttaacaacacttaaatgctgatatgaagtcaatraattttatgtcacatgataaaggaaaaagaaagcaaatgaagatattttcctagtacaagtgtatacatgcacaaacatattcttaacagaataaggaggaaatatatgacaattacagtcttcatttctgcaactggccacgtggttgtagctggtattgatgactaccttcttctactaaccattatgtattccctttgccttctgcaagcacctcagcgggtcatggctttttacctggtggggtgacccaaacctttattctggaaggacctgtgccatttgtagtcctgtctggattgggttggattgggttgttgtagtttcccattgaccttaaacacagaggatggtaatattaagagatgccctatgggatctcctgtattccatgcatgctcttccttgccttcattgtggaatagtagactgatttcaccttgatattctgggtcaattacccagccaacactgmaacccccttcttagcctgttgacttggaggtaggagggccccaattggccaggtggtaatcttaacttccagtttaatggaatcattgttgtatcccttggtgacagcattcttccctctggaactaagatgtctaggccagcagaacataatgttgtgggaacaggaagcaaaattttgctagtgggtcactagyggtgatggtgagtggtgccacttccgcttccaccccttgattctgggacmcgtgaacactggctatgggagaaacagtaccatattttggacactgattcaaggcatacacagccttctggagaactttgccccagtccggcaaagtwttgtcacctagttggcattgtaattatgacttcaaaagggcattccacaattctatcaatccacctgcttcrggatgatgggaaacatgataagaccagtgaattccatgagcatgagcccagtgctgcacttctttagctgtaaagtgagtgccttgttcagaggcaatgctgtgtggaataccatgacagcgaataaggcattctgggagttcacggatggtactcttggcagaaacattgggcgtaggatgggcaaatccatatccagaataagtgcctattccaktgaggacaaacctctgcctttgcatgatggaagaggtctgatataatcaacctgccaccaagaagctggctgatcaccctgaggaaggatgccagacggagggctcagtgttggtttctgctgctggcaaattgggcactcagcggtggctatagtcaggtcagtccatgttgctgagcctatgcataacctccattcctgccaccatggccactttgttcatgagcccattgagcgatgacagggtggctggggaaagaggctgagtggtgtacacagaatgagtcatcctatccacttgattattaaaatcctcctcagctgaggtcacccgttggtgagcactcacataggatacaaatatcttcacagtttttgaccactcagagaggtycatccacatacctcttccccagattactttgccaccaattttttaatcatgcttcttccaagtccctgaccatccagccaaaccattggctacagcacattaattagtatataattacacatctggccatttcttcttccaagcaagtgcacarccaggtrccctgctcaaaattctgccccctrggaagacttccctttgctactgtccttcagggatgtcctagaaaggggctgtagtgctgcagctgtccacttttgggtgctacctgcatatcttgcagaatcatctgtgaaccaggccctagtcttctctkcctctgtcaactgatcatggggaactccctgtgaggccatcagtgcaggcttggggagagaaggcagggtggcaggagtggaggccatgggcrtttgagccacttcctcatgcaactgacttgtgcctttaggactggctcgagcctgatcatgtatataccacttacagttgatgatggaaggctgctgtgtatgcccaactttatggctagatgggtcagaaagcatccagttcatgaaaggcartttaggttgcatggtgacttgatgacytacagtcaaacrttcagtttctaccaaagcccagtaacaggccaagagttgtctctcaaatggagagtrgtgatctgcagaagatggcagggccttgctccaaaatcctagaggcttccacctctaggagtcacctatgggagcctgccaaaggcttcaaacaggatccctgtctgccattgacacctcaaggactattggatctgctaggtcatayggcccaatyggcagagcagtttgcacagcagtctggactygttgcagagcccacttaaaattggcagcctttcaggtcactcaataaatgggcccattttaacacacccaggaacaatgctttgcatccttcaatacaatcaagttggcactcagtattaaccatcacagtgaatgaatagattttctatgacgttgactccttggaatgaccaccagaggcaataagyacactctcagtgacacgaggatatgaggccctcctctgcccatttacactggaaatgtcttagatgtcttagtgcttttcaatcaggtatatccaaacaacaaacaaacaaataaartaagactaatgcagaatgaattccatagttcagattcttcaagataatggaaaattatcacataatctccacctgttttgaaacattatcttctttccttcctttcctccctttctccctttctctaagtcagtggaatagtctagtttaactttgatgtagaaaatttaggcagtcctcaacctctctaggtatgctgaattaaaaaaaaaaaagaatgacatttttaattcccatggcaaatggagttctcctctttcttctgttcctcttcttcaccttgcaatgactgtcattttgtaaaactttctctctgtctctgtctctcttactcacacatacactcacaatgttccttaatatcttctaatcctgaatttcctttctcaatttgtttagttagatcttcactagaaataagtattagaaattgggaaaagtttatactggttgtattagggttctccaaataaacagaactattaggagatggatagatagatagatacattgattgatagatgacagatagatgaatggatggataggtggataataggctggtagatgatagatggatgatagacagattagatagatagatagatagatagatagatagatagataatagattagatgatagacagaaagaataagagatttattatgaagaattggcttacgtgattatggagsctgcaaagtcccagtatctgtgagctgcagatccatgatatagttcactttgagtccaaaggccagagaatcacgggagctgatggtacaaaccacagttcaagaactagagagaaaatgagatgagatgtcccagctcaayctgtaaggcagaaaagaagggaaggaattcctcctttctttgctttttgttctattcagccctcaagagattgggtgatgcacagcaatattgaggagggcaatctcttttactgtcatccagaaacaccctcacagacacacccggaaataatgtttaatttaggtgcccatggccagtcaagttgacacatacaatttacaatsacactggccttcaactccagtgcacaatgtggtcttcctctttattctccaaattcaagttctcttacttgctacagttgtccatatttcttgggaaccatcattctaaaaaatgytgaccaggcctttcttaggcatttctaggaaaaataatataaaatacagaataaagtgaggggagttcagatataatgcatttctcatagaaaaaatgwtagtgggatggttagtaaagaactgtgctgtgtaagcaagatgtaagctttaaacaaagtgaagaaaaggggagaagcctagaaaaaataacattatacagaaagagaatattcttaaatatgtcaacttctcttatagcraatttcccagtgttcattcctaatacaaggagagtaaaaactccatagaaacctcaaaaagagctttttcttgcaatggggttaggtgtctaaggaataaacaggacttttgaaactttactcttatgtgacagatcagtgaggaggaaacacgctgataagaagcactgaactactacaaatacgcttcatttgctataaatacacttcattcactgaactataataaaattcacttcaaaaggaatgtgaacaaaatgaaagaacttggatataaaggggcaaaagtgaacaaaaagatagraaatgtgtacaaatctaagtaagcattatggaaagcataatgataataattattaaatatgtggaattaaaaacaaagtggaactaaaacacaagagactaataamatggaaaatggggcaggtagtcagttatttaataaaagtttttaatattcttgaattctggggaggaaagcaaaaagctaattaactttagttttcactaagaatatgtattaaacattgaaaaaaaatctggaaaaataaaattgacaatattygagttctccagagaaacagaacaaattggaagtgtatatatacacagatatattatatattttaaagaattgactcatgagattgtggggtctggctgcagggaataggtgaatattgccgtcttgaatccaaaggcagtttggaggcagaatttcttcttcttcaggggacctcagtaattcttcttaaggcctctgactgttggatgaggttccccaacatcatggagggtgacctgctttactcaaagtctactgactgaaacgttaatcacatctaaaaaatacattcacagcaacatctagactgctgttttaccaaaaaccaagtaccatagcctagccaagtggatataaattaacgatcacaaacagctaaacattccaaacaagcagacagagagagaaaaaaataaagaaatgtgaaggggaggagaattttcaatcaattctggaaaagacaaaaaaagagaaaaagagaaacaaatcataaatataaaatataatggaattaaatccatatacaacaatcagggtaattatcaccagctgcctcaagaaataacccctgaaatctcacatgatggacataattcaagtttatgtctcacatcacaacacaatgtgagttataccaccttttgcatcttgtagtgacaccatacrgtgtagcctccaaggcagggaagagaaaaaatgaagagacatgtaggcccctaccrtactggctcatgaagcctggaccacgtctggtctgagtcattgaccagaagtagccgtgtgccccargctaactgtaagggaggtctggaaaagtaggaggcacataggatatttgatgagcactaactatctctgcttcaggttgtcttcataataaatgcaaacattaaaattgacaggttactatgattttcatattggattaaaatgtctaaaacaaagggattcgtctakgtatgacttacacaaatactgcaaatcttaggggaacagaaagactgaaaatgagagataagatacactatgcaaactctaaccagaagaaagctggtatgctaccattaatagcaatcaaaaagacttyaatttttttaaaagaattattaaggacaaagaaagtgatcatgatagaataaaaggaacaaggaaaactaaaaaattatgagcctgcaaggtcataataacaaagcctatggataaataaagataaatatatcagaatgagaacattttcatatatataatagggaatgattttaccatatctctcttaaaaagtgatagatcaagcaaagagacacagattttaaaagtaccttacacaagataacttaatggccttatagaactctatgtcaactagataattaattctacatgccccattcgatgaagtaactcatgaaacaaacaaaggaccacaacctagatcataaagcaagtatcagcaaatcctaatgatccaatagcatctagactacatcctcttatcataatgcaatacaattagaaattggtacaaaacaattgacaaaaagttttaaaataaaaaacatacttcaaagtaatccatggcttgagaaaaaaacacagtttaaatttacgaagtatttaataacagaatggaaataaaatttcacctcaaaatttgtgtgtgcaaataaagtggtaccaacaggaaaatgtacagtttggaatgcagatattaggcaagggtaagaactgatactaattatctaaggtttctgctcaagatgtttaaaaaagtacacagaaagaaataaaaataaaagcagaaattaatgacctaaggaaaggcattagacagggttgacaaaacagcaagttgattcttagaataaactagcaaataaacagaagacaagaacaattaagcaaagagagacaacacaaatgaataggatcaagaatgaaaaggggatcataactgtagatacattatagattgaaaaataaaaatggatatattggaggatatgcgcaattttattcaaacacatttgaatacttaggtgaagtaaacartaagtttagagcaaaatttactcaaaaagaaatagtacacctgagaactataaccgttaaataaattgcatcagtagttaatasaacaaaataacaatatgtacaaaaatgtaaaggacccattatgcaatttgttcccaagaatggaaaaagaagaaaaatttcctcagcttattttatgaggctgatacaatcttgatggcaagccctacagaggacagtactacaaagaaaaactataggccagttatttaaatagagaagctacaaatgaaatattataaaacccagttcaaatgtacatattttaaagatctgtaaatatacagtaaaacattaacatttgccagatayrgatgatgggaatagaggtgtctgtattaatttctaatcgtatctatcttatttcctacttaaatagtttaattaaaatgaacctcagaggagatagaaaatctgtcctgcaataaaatctgttctaaaataataaagaaaataggtctaaaatrggtctggaaatgaaacaacaaccctcatcctttacaccagcaagaagttctaaatttctttctttttctaaattcatgatgcatacatgttttaatttcttttaaatgatcagaggctgataattgcaagcaacaatcccctaacctaacttttctctcaactaagctcacagctccaggatcaacaattccaaatctttcaaatattcttcttttactacatctcttagtaatattattgtgccatcacgtatttcattaagtggggcattatctatttaattactgctatgatgaaggagatgtagttcacttacagaatatcacatcacattttcccacccttcagtttcccaatataggtacattactgtgcttagattcttcatttttaacctaatatactgagagcattatttcctgtataaatgatagactctgcactctttaagatgaagctatttatgtcctcattcttccctttagcttccttttttcctcgtcctctcagcttctacctctttaactttgatattgtgatggtcaataacatttacattttatctataaccataattgtgccatggcagaatacagaagtcccttctctgaagacattttattccttaaaggactccctttgattttttttcagtgggccatttgatgcttrattgccagttgctctgtgcagaagagaaggggtattttattccataaaataacttgcagtgaattattcctttttattttcacaactgactctcattctctaccttacctgttctttctgaggcctggccttctccaaattttttctatctccttgctggcatataccctatagtgcaagttgtgggtacaataactgcaaaagattgaggagcaggaactatctaaataaccatggtggctgggtgcagtgactcatgccggtaatcccagcactttgggaggctgaggtgggaagattgcttgagcccaggagtttgagaccagcctggacaacatggcgaaamcccatctctactaaaaatacaaaaattagccaggcatggtgacacatgcctgtaatccaggctactcaggaggctgaggtgggaggatcccctgagcctgggaagtcaaggctgcagtgagccaagatcatgccactgcactccagcctgcgtgacagagcaagaccttatctcacaaaaaagaaaataaaaggcccatggtggtgtggctaggaaagagtgccaaccctgtccaaagggaagctttctttgctgaaattatacactttctttctttttttttttttttttttttgagacggagtctcgctctgtcgcccaggctggagtgcagtggcgggatctcggctcactgcaagctccgcctcccgggttcacgccattctcctgcctcagcctcccaagtagctgggactacaggcgcccgccactacgcccggctaatttttttgtatttttagtagagacggggtttcaccgttttagccgggatggtctcgatctcctgacctcgtgatccgcccgcccaaagtgctgggattacaggcgtgagccaccgcgcccggccgaaattatacactttctttgatcaacttctttttactccgtcatagttttattccccaccaatctcccccggacagtcactccattttacttagtctcttggtactattctcagaattcaaattttaaattaattaatctgtatttctgaagagctgtttgttttcttactgtatattttgctttctccatgggaaagatatgcttgggagcctcatgcagtcttggtgggagttatgtaaccactgggccagatatgtcagggcacacagcatggtgagccattccctggccagttccatcgcccagagccagaccctttgggccctacacagactgcacagccccagcatgtgggggcttgtataagggaagttctgatgtcacaggatccttggggtgtttcttcaccagctggaaacctctgtggccagtggcacctttgcctgagttttgctgaggtccactgggcacattccgcccactcagcctggcaggctacacttggctcacactaccactactgggctggatcccacacctgccaagggtgattcagggcagagtggcgaggggtgtgtgagtgagcgtgggctccagccactgtgcacagctaagcgtgccagctgcagtgggctgggcagctccaggtcctggctctatgtgaggctgtggctgaaccagacatactacaattggcttccaccactggtaccagggaatgcggtggcacccaggagcttggagatgccaggaaccacagagtctgaaagagggtctcacagccctggctcagggagtccataggtctcagctccccaaaaggccacagcccttctctcctgctcattgctgtcaacatggtgagctggggaagggggtgtgtttcarccctgtttgtgttgtagctctctcatttccaccatttgcgggggggtcccaagttcttgtcccacatcctggaagaatgaggtttgcagacaactggagggttagcaaggtgaagaggtgctttaytgagtgacagtgcaactctcaggaggcctgaaatgggtagctccgttccacaggcaggtaattccagcatctgtgcagcaccctcaacagaggtgagacacacagtgggtagctcctatccacaggtagatcatcctgttgtctgcccacgtctggctgagtccgrggttttttatgggcytcagaggggaggaagtgtatgctgattggtccatgggtggccatgagctggcccaaaaaaagcaccrtaagttctcactccagtttgtggaaccgacagtccagcccccttccttcaggcagtccctggcttgaaggtggagcttcactgagggcccacccctttccacccaggaacctgtatgcctcctgccaccaccaacctgccatccacggcgcccactgrcacccaggctgttcatgcctagggtcaccttcaggcccatgcagagccaccctcaactcccccttggcctccctaatgtgctccttggcacccaaaatccagaaggggccaagatagtagggggctagagtgtcagtgctgccccgagcatakgcacacctggctgggttgcaacagcctcagctttgctctgaaatcagcctgggtgccgggaacagtgagagaccaggaagaaggagcgggcacttctgagcctgtaggggaagagaggtggctgagggcacagggatgcctgggtccacagctggctgggtggctgcagctgcacccagtagggcagggttcccccaccttcaactcggaaggggacatggctcccacttgttcctggctcccaccagctctgtggagcacaaagccagacaggctgacactgccattactgagaccctcttgctctcagaagagttttcatcgcctgctccctctgttttcactgcttggtgactgtggtgttttgttttgttcctatttccttttctcagaaaagaaagtctttagaattaaaatttaagctgacaatagatcccctctccccagggagcagaaatatggatatccctaaaggtcttgagtgtttcggtctttcactattttatactcaatattccatgatttttatctagatatgcctggtggacaacaggtgatcgccaaatataggttgtccctcccatctccaaattctgatgctagaaatcaggaatggctatgatagtccagattttcagaattgataagatatttatattaccctaagagatacggaagttgaacagaataaaaaaattcaaaataaaagtaaataaaattactttctttccctgtttagtttgagatcatgtgtaaatatcagtgaacgtgatgtcatataggatttttttttattgatcagaattaggttcaagttgtgttctggaaacttctaattaaattgagggaagatgctagcaggccagaatttgggaattagatgatctggctccaaattcaatacatattgtctatgtaattagckgtgtcacctaatgtaccaataatgccttttcaagaaacactgtgcagtctgttctgattcctccattggcttaattcctataataaatatagtttccaaagtttataacttaattttcagaatttatttattttaattgacagataaaagtggtatatatttatcatgtacaacatgatgctttgaaataagtatacattgtggaatggctaaatcgaggtatttaaaaatatgcactacctcacatactggtcatttttctgtgttgagaacacttaaaatctactctcttagcaaagccatgctggctttagtgatttttttttttgtacatgatactctcatttgggtcaataatttttttaaaagtctattggaagcagagaaataaattttttgacccagccttagatgtatttaaaagttcagggcataaaatgatagatgtctcagggtttgtgtcatcagtcggaaacacagaactcttttgaacaatgccacaatgcaatctaagtttgatctaattttcttcaagacaataatgctcttggtgccatcctacctgctctttatgatttctacccgtaggtagaataatcaagaggtgagattgatgttgtttttgattctggacattaactagagggaaaattcgaagccctstaagaatggtatctaacttaatagacacctctccattacctttactcaaaactaagactctttgtggtatgggcccaccccacctctagtagccagctgctagtccagtgtctgtctcactgaagcagtctagtggtacacataggtactgagcaattatgtctgtcatgctgtaattgaggaaaaccatccttacttcattttatatttttgaatgctcccttgattgtccttcttggtgttcccataaagctaaaaattcacactcacgaattttaaattatcatgagcaatttgggggatttcctattttatcactgagtctcctttgagtgctcagctgctttcaatcttgacagatactcatctgacccatctaccacccttagggtatgctatgcgatgccagggacctacagccttttaagagatttttgaccaaagccgtctctttggggtgtttcttgactcattttttactcattatttaattttaataacctatagtacttaaaaatgtacagtactatataaagcaccttaaaaattgatgcatggtgattttcttattttaaaattgtgtatgattttttaaattattataaaagcagcttatgtctattatagaaaataggaaatacagaaaagcaagaagaagaaaatataaaatgtgcatacgagtaattacttttgtaatatcattgtatatctactcatatcttttcctatgcaaatagtttttctacaaatgggtgatatttatataactgtttcataacttactatgggaatkaacatcacatacgtattttaaaaaatattctcaaaaatatatttttaaaatgtatattgaactagattctgagaatttacatcattattatagtaagaacattatccttgattttgattcatagtctaacataccaaactctaaatttcttctgttactcactttacataaacacattgcagccagtcaccaacccttacatatatccctgcacagtttgagcagttttctttattgaaaatatttttaatttaaaatcatttaagttttatattatcttggcacattaacccctgtggaaatgtgtaagacttctcttctaaaataaattatttcataaagagagagagtaatagaataagtcataaaccatgctgatgaatttttagttactactgtctttaaaaagtaaacaaaaaaacagaaaataaatattttacatcttttacagccaactctttcaatgagttcaaaaatttcatctctaataaaaaagtaatttggggaacatttaggaaaaaagcaaaatatataaagcaatgtaaacaataacttttaaacttgcttgtttaraaaatcactggggtacaggttagtcagcctgataaactctaacttgccttcacacctccctcctccagcagagcctcctctgacagccaaacatctaggcatttctgtgttccattatggtaatgattgtctttttttataagtgactatatttgtttgtctttcctcttccctccactccagttccattagggaaggcatagtctttccattttgaatatttggtgcttgagataaataaaaagttttgttgggtaaataaatcaattcacttatctattaatcaatggcagtatgctttagcaagagtaattatgaatatctaataagtagtaggaagaggaaaactaacatgtattaaaatgcaattacatgccaagtcatctgttgaatcctaacagactttataatttcattttttcctgctataatgacgttttaaattatctcacattttcttaaacaattattaactaataaaaacatacagcaacttacataaaaatagactctgttttgcatgatatagttgaaatttttatataacttgtatatccatatgtatgaatatatatatatgtacacagactcagaaagagaataccaagaatttattgtttaaaaaaaaaaacctctaaaaagcaagaaacaaaatatcttgcaactcaaagaatctcatttatatttcacatatgctgtagacacagctcaggaactcagatgtgatgcttatgaatatgtataaagtataattagcttagaaaatgctgcttcatcacctgtcctgatattgttgatgtgcttcaataacttaccaagcaatgctggaaaaggttctctccaaattccagtgagttgaaacggtgcttttcacccataacatgttagtgttttccattcccttatcatgtgaaaagcctgtcctttaaacccagattgctggcagactgcttgtaactgacagttgtatgccataagctctttactttaatattttagagagcttcttgaaacattgaggcatgtcttttcctccaaatctcttgatttttaacctctcaattccacggtgcttgcatgaggtgactattctcttttctctggcctatactattacaataaccaattgatggctccttttttcccacacagctgcccaattcatcttcttggactacagctctgatcacactctcctactcagaaactttcaaggcctccaaattgctcattgcccagtttccttactcgcacattcaaaccttccagaaattgactctgacctgtctaatagccttacttctccacattgcccttgacgaaccctacaaacttagggagctgaaatactcgctctcacatccacacatcaaaagtccctgcctgcctccctgcctttccttatactatttctactatatcttctacattcctgtatatactacctgtctcctttcatctgagcaaggaatggttgactaaggatccaggaagaaatcactgacttcctaaaaagcagggaaaaaaaaattgcctggaagcaaagagcaggtgatattcagaaatgcaagaagatagaaaattagcaacacggaggtctgtatcagtacatagccttcagtcagggctgtcatgtttctggatgaaggtgcaagagccagtggaaaatcaatacattgataatcatccagccagactaatcagaaaaaaatcagaaaagtcaccaactaccaatatcaggaatacaagaggtgaaatcactacaacttctgcagatagtaaaggatgttaagaggatattatgaacaattttatggcaataattcaacaatttggataaaaagggcaaattctttgaaaatcacaaactaccaaaactcacagataaataatctgaatagttctatattcattagagaatttaatttgtagttcaaaaccttcacacacacaaattcagttccagatgactttacttgtgaattccaccaaatatttaatgaagaaataataaactctttcagaaaattgaagaggagaaaatacatccaacctcattctacgaggccagtattactctgataccaatggcagacaaagatagtttttaaaaaagaaaattatattatataacaatatccctccatgaacatagatgtaaaagttcatggcaaagttataacaaatcaaatctaatgatttactcaaaggattatacatgatcactaaatgatattaatgccaggatgtaagattggtttaatatttgaaattagtcagtgtaatttaccatatagcaaactaaaaagcaaactatataatcacctcaattgatacagcaaaggcatttgacaaaatgcgtctatttttttttaaaaactgcctactaagagtaggggaacttcactacctgatcactataaaaacctattttttaaaaaaacctaacagctaaaatcatacttagcacaagactaagattaggaagaaggcaaggatatctgcttccattacttccatttaacattgtactagagagactaaccagtacaaggggcaagaaaaaggaaataaatggcatccagattgaaaaataagtacaaatgtttttattcacagatactatagaagtctaagcataaaatcctggtggttcatgcctgtaaccctagtgctttaggaggctgaggcaggtggattgcttgaggccaagagtttgagactagctgggcaacatagcaagacctcatctctacaaccaaaaaaaaagtttaaaaagcataaaataaaatgctatctattaaaaaaaagttactagaactaataagtgagcttaccaatgttataaggtacaacatctatatgtgaaaatcagtcatttcaaagactggcaaggatacgttggaagttgaaattaaaaggttacagtttacaatagcattaaaaatgtaaaagaccccctacactgaatactctggagataaataaaagaaaatctaaataaatcaagagatataccatgttcatagatcagaagattcaatattcctataatcctagtttatacatattgacctacacattcaatgcaatcccagtaaaaatcctagcaaggttttttcctaaaaatttacagatatgttttacaattcatatggaattggaaaggagaaaaatgttggaaaggttatactacctgacttcaatacttactaccaagctatggtaatcagagaatgtggtgttggtatcaatattgacaaatagattattagaatagattaaagagtccagatatagatccagacatgtatggtcaaatgatttatgacaaaaatacaaaagcaatacaaggtatatttaacaaattctactagaggaattgaatatccatgaacaacaacaaaaaaaatgaacttcagtctgtatcttgcaccatattccaaaattaactcaaaagagatgctagacctaactgtaaaacataaaaatataaaacatctaaaaatatataagaaaaatctttgtgatcttgggtaaagcaaagattcttagatacaccaccaaaagcatatcctcaaaaggaaaacaaaattaacaacttaaatttcatcaaaattgagaacttcttcccttcaaaaaaaaaaaagcacttttaagaaaatgaaaagataactacaaactagtagaatatatttccaaattacatatctgataaaggacccatatccagattattcatatgtatcattcaaaactcaaaaataagagcaaataacccaagaaaatttgaacaaaagatttaaacaggtcaccaaagaaggtggaaaataagcatgtgaaaagatgctcaatgttattagtcataaggaaaacacaaagcaaaaccaaaatgatgaccagttagaatgtctaaaattttaaaagacaggttataccaagtatcaacaaagatgtaggcacatgcagctctcatacactggtgatgggaatataaatagttcagatactttagaaaacaggttgataatttcttaaaaacgtaaacataaattaccatatgatccagccattctgcttctgtgtatttactccaagataaatgatggcatatgttcacccaaaaatttgtacacagatgtgtacatatccctatgatgaaataattaccaataaaaaggatcaaatrtggatacacacacaacatagataaatgttgaaactatgttgagtgaaagaagccagacaaaaagagagtacatgcagaatgtttccatttgtataaaattctatgaaatgcaaacctacagtgatggaaagcagatcagtatttgtctggggacagagggaagagaaggaaggatagaagaaagagattcaaaagaaatgatggatatattctctaccatggttgtggtaatggtctcatgggtgtacatattcaaaacttatccaattgtaaattggtttgcatggtttatttatgccagttttaactcaataaaagtattaaacagtattagtcatctctggtcatagtccctccacaatttccacaacttagattttagcctctttcactgttgtttgggccatcttcctcttttctctcttaccaattccatttattttcttttttaaattctttttacttttttttaatttttgaaacttgtattttaggttcaaaggtacatgtgcaggttttttatataggtaaactcttgtcatggaggtttgttgtatagatttcatcacgcaggaactaagtctactacccaatagttatttttctctgtttctctccctcctcccactagctaccctcaagtaggcctcggtgtatgttgttctcccctttgtgtccatatgttctcatcatttagctcccacttataaatgagaacatgctgtatttgattttctgttcctgcattagtttgctaagaataatggcctccaactccatccatgttcctgcaaaggacatgattgcattcgttttatgactgcatagtattccatggtgtatatgtaccacattttatttatccagtctgccgctgatgctattccttattttcttatgctcagcaaatcaaccttttctctccactttaatcctgtgcctcactttgcacacctgaagttagctttaaaattatgacttttaaatgcttgtcagattacrttcttacaaaaaggtattcacactccaaggcactggggaaagctgttttctttttttgtctagtttcatctagtactataaatggcctatattatcttgacaattcaggattgtattatcatccttggttattttaccacaataaggttggcatctactgagacctactttacctctatacattttatccctttccaaattgactcagactcctgagcttcaaaaattcctctctccactttttagagttttctcttctctttgctcattgtcggacagattgtcagctgtcacttctgctgttttcatgtgtttgtttagagaatcttcacacattctttcattgtaatttcctgtctctaaattgttttgattcagaaaacctataaccaagggagtaaaaatgacgtgtaaatttggaacaaatatagaatctgagtgggtaacctgaggcttacttcgtgagttaaagtacattgcatctgtgtcattaattttgacactcttttttttttttccaagatgaatgacacttatgtgatgttactgtatctaattcccaagagaactgtagcaatgagaattcctgtttttcccagcagaaaacatcatcagttttctggagaataatttgccaaggttgtcttttgcaagaactatgttcagtgttcttttttatttatgtagatgtttccaatatatctttttgtagatatgatagcattgtacaatcaatctgttctatgagcaatcaattatttacctgaaagctgttagaataatacattaaaataaatttgaccacagccataccaagttctgtaatcttttctagtttaatgttcaaataatgtgactgataaaaataatgtaactaaggcartccagatgcctttaacgagtgttatgtctgtgataatctgagttcagatttatatcttcaacagtaagtatttagcactctccaacccttcttgcacttgcaatacttttccaatttaaaatttacacataagatcctgtttgatttatctcttggtatatatgaattatgtaatgattgctgaggagcaaacactattaaaatgggtaactagacattcaagttaaacattccttttcccatatcattctattaactttgtgtcaccttttttaatctgagtctaaacaaatatatctttgcttggagataattgtggctcagagattgtcatttagaagattgtgttttgccataccgctttaagatgcattttttaaaagaagcagtgttctttctcatttcagcacttgggagatacaggaaatgctcccctctcagtccacaactagagtgaaatttgcttaaggataaagtcaggggatgtgtttagttcttaatttgcttgacttctgtagcacgtcataatgctgctcagttatgtccttacaacaccgccagttatcatgcatygagtcacttctgcatctcttaatttccatagtgttatgctctcctaatttctccttttcctctgtggaatgccagtcaccttgccagctccactttctctgcctactccctaaacattgaagttcctaagaactctgttctagatcttcttctcataccgtaataaacagtctcctaactttaactaccgaatatgtgctaataatttacaattctatatctgcagcccagagctctttcctaraggcaaactctgtgtaccaactgccttctggatccctccactccattattctatggttttagatgtatgacatttgtttttctgtccacaggcaacaggtcctcggggtttattaaaggaagatgccaaaggctgtcttcagaaaagcttcaggattcttaacgaagccaagaagttagcaaatgatgtaaaaggtcagtgtggccatagtttttattatattccagttaatcgggttgttactgataagatattctatcacactattggagaatgtaatttctttagcatgatttttgtgatgattctataatctatttaatgcaagtaaactttctcactagttttacaaaatgttgtctacctatctcacttcaagtagggtaatatctcataatttgtaagtcttatttctatagcatcacttcacctatatctaatgtatagtaacttttagtgtaataagtttttaagagtatcaaacccaggccagccatagtggctcacacctgtgattctagtgcttagggaggccgaggcaggaggatcccttggtgccaagaatttgagaccagccggggaaacatagcaagatcctgtctctacaaaacattttttaaaaatttagtcaggtgtagcagcgtgagcacataggcatagctacttggaaggctgagccaggaggatcgctttagcccaggggcgtgaagttaccgtgagttgtgatcacactactgtacaccagcctgggtaacagagtaagatcctgtctctaaaaagaaaaacaaaattaaatacatttttctttttctgagatgaagtctcgctctgtcaaccaggctggagtgcagtggtgcgatcttggctcactgcagcctctgtctcccaggttcaagtgattgtcctgcctcatatctgggattacaggtgcatgccaccacacctggctaatctttgcattttgagtagagacagggtttcaccatgttgaccaggctggtcttgaactcctgacctcaagtgatcctcccgcctcggcctcccaaagtgctgagattacagatgtgagccaccgtgcccggccctaaatacatttttcttgtattttatttctgattcaggaatcaaaatgcacaaaatatctactgccatattatgggttttatgttaagaatatatcattaaacatggctgctctctatatgagccattacaattattattttatgcacttatctcttgtctcccatttgaattgccacctgtttctctcttcagtttcattccctaccattttctgtctcatatctgtctccctacccttacctaagtattcataattcctcccaaacatgctactattccaagccttcatgttttcagtattatttcttccccttggaatgccccatccttcacctctcttctttgcctaactgctttcttccagaccttcaggatttagttcaaatgccatcatttccaggaaacctaacacctcatctgatttacatgccccctctctggtatagttttctcataggcttgtcaaaccaccacaatcatggactaattaatattccatcttcttttacaatttttaaaacttttttattgatgcataacagatgtataaatttttggcattccatcttcttgaggaaagacatggggttttgctaactgtgtatttctagtatgcataatagtgactagctcaaatgaggaaatacttattttttacaataaatggtgttggcttatcttacttatcttagaaagagaagaggttttaaaatcatttatatttggcatgttttggtctcagtagaagctgatatgaaattacaagttctatctcgattataagtaaaattttaatagtacaattcttcaggctgtgtattacaggtgaaataaaactccctacacacataattctgctcagcaggtacctcttattacaatctgaagaatgactrtaagaagccaaaacctgtgttcctattggacaaatggactcaatcccgtgactttgcggtcactccttcctatctcatacccttgcccagggctgggaatagggaggaagggagcgaggtgattcatgcaagtgcaagaaccaatcctgtctttaagattttaataataccagggccgtgccctcgcctctatttccccacaaacactggtattataaaaatgaagaaagaattttattttcagscattttttttccaagagaaaaagaaatctaaagacaagcattgtaggaagggttaggagacagaaatgttcrttagtttaaatttmttttttttgtagttcaggtagtacattatttaaagtaatgaaaacccacaractactcragtaataattcctctagaaaaccaagccaaggctatgacggagatgggaatgttttcttgctacattatgacatttctctgatttgtggccaattacggaggttataaaatggctgttaatcagggaaatgccatatattactaccaggaactgctgaaataggccctacagagcaaaactcttgacagcagctattaaaatagagatttagtcatttctctctctatggtgcctggagttagaaggaataaaaatggtgaggccagtataccctccatatttctaatttgttgcttggttcaattcagtacagttcagttagtttgtgagcttcagtcatgaatgacttagtactgctccctgccatttttatgctgtccttgccttgagggaatctgaacttgccgggagcaatttgttttgctttytaatttttgaatatacatctgttaaaagtaaatttgcccttgtgtgagtttgagatttgaagcctgtctacattgcactgatcgaatgtttgtggagataaaaagtattttgttgatggatatgaggcttggtacaaattgatgactgaaagagtgaaaagatgaattagtaccaccaggtgaatgaacactgctttgcagatagacaagaaattttttaaggccgggcgcagtggctcatgccctgtaattccagcattttgggaggccgaggcaggcagagaagtgggagaataacttgagcccaggaggcagaggttgcagtgagccaagatcgctccattgcactctagcctgggtgacagagtgagagcctgtctcaaataataattaattaattaataataaaaatttaaaataatttttttcagtaaaatgccaacttcattttctcatggaatgtgtacgaggcaaggaagaagtagaccttggtttattaaaagtttgagaatattaagattttaaaattatacatcttaccttatattgactaacttttcagttttatttccttcttaatttatccccaatttttgtctttgcccaagataaatgaaattatttaattacttagaaaaataataggtaacatgttggccaggtgcggtggctcgcacctgtaatcctaacacttcgggagaccgaggtgggcagatcacctgaggtaaggagtttgagaccagcatggccagcgtggtgaaaccctgtctctactaaaaacgcaaaaattagctgggcwtggtggtgggtgcctgtaatcccagctactcrggaggctgaggtaggagaattgctggaacccaggatacggaggttacagtgagctgagattgcgccactgcacttcagcctgggcaacagagtgagactctatctaaaaaaaaaaaaaaaaaactaggtaacatacctataaaatagataacacaggaaataaaaagacctattccctggagatctatgacagctcattttaaaggaggcggtttgtctcatagcactgtagcctgtggtatataattacagttaacccttgaccaatgcaggggttggagagcatggacccctgcacagttgaaaatccatgtataacattagactcttcataaacttcataactaaacttcataacataaactttataaactaaaaaaagaatctattcccaagcccaaataatgaatcagtgcattgcttgacatatggtgctgtcccacacagagaacagtatgaaacattattccaatcattaagttttatcaaaccagttgaagccttccttctatacagtggtcctccaaacactcagtcattccgttcagacaagtgggtcttgaagattctgagatcatggatgtaatacacttgcaaacgctaacctgttgagattctgtgttattattttatattttaaaaataagagaataaactggaatactgcagtgctgctaaaccaaagtatgatataggagtgcaattgtgactaagggatccttttattattaaagatatactccttttgaatttgcatattaccctttgcctgaatcagcctttccatagcaggcatgcaaaagacaagcaaaatctgctctattgaccacaattttagactaaaaggatgaaattaagcctgggtcccctggcctactgtggtctggagaacaaagcagtcttttccaggtgaaattgctgatccctcatacaaagttttgattcctcctttagagtgtgaatggtggaaataaaaaaataaaaccagggtggacttccattagagaaaaaacaataagtggcaaaatagtggcaaatatagaggggcaggttctattggaaagattatccctaagagcgagacgtagcttgtcatatccaaccccaccatgtgagtagaggacaagaaacaaacattcagaacactcctgtatatcatctcagcaagagacaaaggcctgtgcaataaaaatggggcttagagctaaaaacttatctgggctttgttgtgtgttcagaatcagagtctgagattctatggcgttttttgcaagtaagttaatttagaccagaaataaacagaaatgccttcaagagacttacagataacataaagggatggtggggcctgtgttaaaccaaagactatttgtcttatttaaaggtattcaaactcaattttcttgctgggcaaaagaaaacaagcctgcaagcccacagtcaccatgtcctagaggagccaaatgcaggtgttgatgtctggtggttttagtttttcattccactggctgcagaggggactcccttttatcccaatatcctgaatctttgcagaacctgctaccagacaagtacaccttccctcctttcctgaagctcctactatgaccccctagtgggaggaagagcatatgcaagcatggtgcttattgcgaacaagatctaatttcttactttcasatcagaagagggtttctccataacctgactccctgtgaaacagtcatctctgaggttsccatatgtggtcactctagtatgtatgtctgtctgtgcagaataagtaatcagatatacagcacatcccaaacttgtgacagctactagggaaagggaagcacaggagtaacaatcatgaaagaaggctagaaatataaaggttcaggaaatgataccgttccgaatcattgtcaccaaattcaatgattgcctgcataatgcagaaaattggagggattttttctaagaagtacaaagattgggtgtagcaaccttatcaaatcaatttgctggagacctaggagagaaatacagttgtagatttcaacttctattcttcctcactcgggtgctcttctttcctacccaggtctcaagatcctgcactgggtatttaggttgacttaggggacagggtctttagaaatctcaagaagccaaaatctgaacacagtcacttatgcttgtaatcccaggtcctttcaaaagtaatcacatttccatgaatttcacccttgtgaatggggcattctttcagggcatttatttgtgccctattcatattaataaaaaataaaaattccatttgagaaactcaactggatggaatttgaatagtcaaattaaacatttccattaaaatttataaaaatcgtcccgatatttagttgaaaagtgaggaatatatacataggtatacatatgtttaggaaatataaaaacgaaataaacttaggttctggaccaagtaatttaaataaaaaaggaataaagtcataaatagcattattataataaaaactggtaaaacacaccaggacaattttcaaaccaatgtcagtgtgttaccttttacttactgcctatggtaaatccagsactttctcatacatctcccagtttatttctcatatcagtcacatgaaggaagatgttttctttatttgccatatgtaaaaagggacagaaatgacatttgaacccacatcttccaactctgtgtcctatagtgatttcattgtaccagactagatttcagagaaatactgtgtagcagttttattttgagatcgtacatagttagttctaatataactaagccctaatttatatttagcatcatgtcagaaacatgataaacaagagtaactgctcattattaatgcaagtgacttgcaactctgccctgcgatttttattctggatatatctatcttgtgccatttcaatgggcatgtgacaaaggaaaattacactgtcattgtgttcccagtcgacccttgctactctgctgcttccattmcctcattgtgagtcctgcttttgccaaactaattctagcacatttttcttctactctatgaggaggagatgagaaagggagagccagacttaaagacgtatgtgtgtgtagcctttgagttttggtggatgtgatctttagagagaaagtagaatgactaggcttctgttattgggtttgagagctgaaggaataaggagagggaatctagaaaataaaactatggattataaattaaatcttcttcttattctccagaaatcacaagtaaaaaaattcagttggattttcttttaactatcgataattctatgtcttcacccttgttacaattcaaactgaatcacaagagttctttcttacttttagttatggatacactatgcctcctctgtcttttatttaaaatcagcccaggagtgcttatttttctaggttttcctcgctattattttgtaagttccattttgaaatctgcaattcttctctgaatagcttctactcatctaattctatcaccaaagctacaaaatgtttagatgtagttcaagaaattccagaaactactttagaaaaargtgatcagcgtaagaaagggcaaattaataaggatcagagtcaagcagctgaaacattaaaaaaaaatcagaacagggttggaatatacacattgtaacttgctagtacaaaaaaaaaatgcagagaatcaaaattagcgctttggaacttgagaggcagcagtaaaaatattcttcaggtcagtcttctgaataattggcccagttgttcagccagcattttgctatcagaatgcagaaagtggtataaacccagggatacccttcaaattaatgatctttctcaccatacatgaatatcttgcttgccagaacatttgaatgctccattattttaaaaactaaatccaatcaagaagctaagaaatgaaatttctacagttccattttcttaagtgttgaagactttcaagctaatatcaaaagagcagccctttattctcaaagaatttgtatagatatcacagtcataatcagactggctttatttcagagagtatgcttttggtagcctatccaaagattttattttagtataaacagtaaaaataacagaagtattataagaaagatgaattgtgattgacagaggagaaaatccaattacttggaaagtatattttgtgggcttagaattgaaaataataatatattagtgactgaactagacatattgatgttttagagccgtgctttgctggaatattttatgctttgtttttcagtgatgtcaggtctttggcttggaatttaacaacagacactttaaacaatgttatgtgcttatattagtataatctgtagtataacagaagtttaaggtgtctgcctataaaaccctttatatgaagtggagtgaatcattaattaatatgtccmgtactcttcttcacatccagacaccgatagttcagaatcctccatctatccacctttccctttgctattcttcacagatgcaggccaacaaagatgaggatagttctccagctgcccatggcctgcacagttcctctaatgagccacatgcacaacctctgagaggggtgtgcacacagtcaaatcaagactgctgtagctctattctttggggcgtattctctcccacctgccttctctgggtaccaggaaagtgatgaaaatcagtcttggtgttgacaaataacatgaagatagcaaataacattcttccccagttaggtggtttaagttttttaaaacattgaaaaacagaaatatatgcacacagaaagcaatttagccagcacaaccgggtataaaatgagaagttttagtacattgtcyctcacggcactattaactgcctcattcattcccagtttctacccactattaattactgtaaaggtttttggcatgttcttctctacccagctcccaccagcccctaccatgccaaatgcttgtatatgtgtcagcatatatatggtgcatcttgcttattttcatggaaaggtcttaaggtttatttcacatccatatccgctcatctacttctttttatagattgcacctgtaccattgtatgaacatgctgtgtggatataaacagcactttaatcttattagggtatttttattcccccctccttttttttattacaaatgaagagctaatgagtatccccaaagataaatcttttacaggtatattgaagggtaaatttctatcagtagaattgccaaaccaaatacatgtctatttaaaattctaataaacttattaacttgctcttcaaacaatggaatcaatctgcacgtccactagcactcttgtgaacacttggcattatcatacatttaatwttccccaatctcaaaaataagaaatgacatcttactgttgcttagttttacagttctttatgataatcttgagtgctttttacgaatttcataaatgattatgtatgtttattttattgtgaactacgtattcttatattttcctcattatccttaaaaatatggaacactttgcatatttgcctgccagttttgcacatagacaatgctattcyactctgaataattacaacttggttatatatgttgcttaggtgaggcttctctgatttctgtaactgtgaccaatttctttaagacaacaaaggagaaaatgagaggaagacaaaggaaaggaggaggacaggaagaaaaggttgagggtgatggtgggaggagcattgctacccaaaatgctctactaatccctagttttgactatcaatccttggtagaatgcagtagttagcattgtttatggaatgggactatgtggatttgaataccaccactgccatttattaaccatgcaagcttaggaaatttactcaacttctctaagtctcaatttcctcatttgtaaattggagataatagtagtatatacatcatcatatacatcatacatcaatgttattgtaaggattaagtaaaacaacccactgaaactgaagaacactaaatgcgtgtaacatacacattcaatgcttgtcaggcattactcttactaaatacttgtccatcctatccaggagggactagaacaacttctctttcttggtcctttctcagtggtcctcctcacttggggactctgtcttgtatttacatgttgcatttctgtggagctaatttaaacaattagtacgcatgtcccaaaacaatttttatggcataagaaactattaaaaatttacctaaaaaatgagctgttgtatccagtcaagagaggtaaataatattgtgggaagtataggatttttcatattttgttttttcaatttgaattttcactaataaatgatgtaagaaaaagaagacagatgaactccatttcagtcttaagatatatttgcagtttaatgcatacctgagtaagatttctaaacttatatcaacagattggatctttattttctttccccttaatgatttcaaattttactctttatattgttgtactcgaatttaaactgcttagttactattacaatataaattaatctaaagtttagagaatattaaaaactagtggaaagcagctagaaaacttatatatgtaatattaaattatctctagcaaatggcatttttgaatattaaagataacattgctaaagtatcaagagaaaaaaactatataaaatttattggacccaatttgtaaaaatattgttttctttatgagaaaaatgactattatcagatatgtgctaaatgttgtttttccatttctttaatgtgtatttttgtccaaataaatattaacaaatattattatactgaagttggaggattctgctaaacaatcatatctgagattttgaaaatctaatccaatgattcattttggtaataaaagtttttaaataagtggaatcaatgggagtgataacaagagggcataattacaaatggaataaaagactaattctttggaggtttcttctctataggaagatatcaaattaagtcagataaagatcagataccaagaagaaaatgtcattgttcaacatgtagaagcatccaataattcaatgataataaaaacacatatttttaaaatatgattggaaatatatttatgtatagatgccaataaattaaatacattttcttgcttttaattaattttatattaaaataacctgaaattgcacatccaagtataagctcagggatgataaaacttatttaatccttttttttgttttttattcgcagaaaatgaagaccatctaaatggcttaaaaaccaggatagaaaatgctgatgctagaaatggggatctcttgagaactttgaatgacactttgggaaagttatcagctattccaaatggtaagcattcaggacactaccaactgtgtcagttgacctgaagttttgaagactgttgttaacttttaccatttttttctaagattattctggtactattatctggaaattagatactgtttttcttactcatgaattcttctttgtgagaatgagaaactaaaccatactttgcattatggtattttttatcttttattgcctttagccagtatccttaggaatgtgttacagaaaggaagatatagacatcttattattrtaaaactcatccttcagtattggcaggggattggttccaggacccccccccacagatatcaaaattcttgaatactcaagtcccttttataaaatggcatagtatttgcatataacctatgcatagcctcccatatactttaatccctagatcatttataatacctaatataatgtaaatgctatgtaaattcttacagtgtattgtttatgaaataatgacaagaaaaaagtttgtccatgttcagtacagacacaaccattttttcccctaaatatccaaatatccaactctccaaggttggttgaatttacagatacagagcccactgacacagagggacaactgtattgtcttctgtgtttcagcccaagaaatcgtgtattagtgaaatagaataaatcacatagacactaatctctaaaatactgatgtaccaccacaaagacacagtttattaaagtacctgcagtaataggtgatagcccactgcattctctcttgataaaattcaatttctttaactattccaactttcaaaaacattagtggtcaaaccatgtctgtaatatctttctacctattagaactgctggaaatttttgcatggtattagttcctgaaagcacacgttattttaaagatactacttttactatttytatattgttaaagcatgatataataacaacaaagattataaacacttattgagtacttaatatacttatgttaagtgtatgtaatcctcataccaattggagcaaaaacatttgcttcatttgctygcatcaattggtcatatatatatatatatatatatatatmtawctcaattggttatatagataacataagtatagataacataggtaacattcagaatagtcacttcactactttaagagctaattaggtattcatacagatacagaacctactgacacagaaggacaacttgtcttctgtgtataacataagttagcactaacacttaacatcagttaagatactgttattatccccactttacaggtgagaaacagacagaggatactgaaggccattgttaaaagtggcacagaggaaacttaaaccccacagtttgatttcagagcctatgatcttaaccactaacctatacacactagtagtcatctataggtacaatatacaaattaggatcaggagacaaatgcacatatttatacaacacagttaatattaaaatctcggtggtttttacttttttaacgtttaaaaacctgagtaacttttcagattttcatgtccctttttcagtagtaagtatatagaaaatttccaatgctgaaaacaagtataaatgcatggcctaacatacctgaaaatgtttctctatcctaaaatgaaaatacgttagtttccctccaacccccaccccaacccctgccctgctttggaaatgcagattaaatcttaagcctcgttttcatgaagctcatgtggataaatttatctcgtgaataagttcagcagcaaatcacaatatgatcttatacaatgaacatttagaatagtcacgtcactactttaagagctaatcaggtattcatagcaaaagtccctgagaaaatttaatttacctaaaaaaatttgcttcatttgctacacctgaatgagacaaagttcagccttttccctttgtaaatgtgtccgaggtcagccagccacagcctcgctttgtcaagcatggattaagccactaactccacaccctttgttttgtttttcataccctcatctgctgacagatacagctgctaaactgcaagctgttaaggacaaagccagacaagccaacgacacagctaaagatgtactggcacagattacagagctccaccagaacctcgatggcctgaagaagaattacaataaactagcagacagcgtcgccaaaacraatgctgtggttaaagatccttccaagaacagtaagatctcctttttcattgtgatgatgtcatttatttcctctcactgtaaaagtatcccagacctgtaaatgctcgagttggaaagaccctcatggtggtgtagtctgccttccttctttcatagattggcctcagaaattgagtgtcatgcagttccaaagctrgaatccaagtcttctagctctgccccggtgcttttttcctctgaaatttttccagttgagaagagattasgaattctcaaggtgtgcctaacattcagcagagagatgcaaaacactttttaatccgtgtgtgtaattaaaaacacagttgtacttgggtaattatatcctcagaactggcgaagtgtcatggaacatagaggttaaggggcacgttcatgaacagacttgttagaacaggatatgaaaatgatatcaacttgaaatgcattaaaatttgaaaatcttgatattttattatttagattccagttacatcacatttctgggaaataaaaataaagcatttatctagtttctaaagactattcacatctcttatatattatataaaattatattgacttaaggatttactgagaaaacctgagagaaaatatcataacttatattattagttaaatatagtcaaaatattaagattttaaaatgcatttttccttttccgtcaaatgatacaaggctatattgggccaggtacagtggttaacacctgtaatctttgcactttgggagcctgaggcgagaggatcacttgagcctaggaattcgagaccagcctgggcaccatagcaagaccccatctttacaaaaaatttaaaaaatagccaggcatggtagtgacattgcacctgtgttcccagccacttgggagtctgaggctggaggatcccttgaacccagaagggtgaggctgcagtgagctgtgatcacgccactgcactccagcctgggtggcagattgagatgctgtctcaaaaaaaaaaaagggggttatcttggtatccttgttacatggtttcaccaaaggagatgcttgggtaatytgtgcttttcactttcaagagactagccctctttatatgccaacatttttgggggggtatcaaaatatttggagtataaaaacaaaagcactgtaattggtattatatgccataaaattcaaatgctgtttgagtggggaatggagcctgatttcagcatcctagcctcaaatcaaatcctatggatgctatgatataatagacattattaatacgactccttcatgagcaaggaagagtacaaacacatataacataaacttcagagccagggtgaaaaaggggagataaaaacattttttaaaattttttaatgtaagcccagaaatggcttctcttgtagctcaaagtttacataataacttcttatgatttatgccaaatcacaatattcccactaaaaatgaatgaaaacaaaattttaatcaaatattactatctctgctgcttacttcataatttaagatatatttttaacttttattttaagttcaggcgtataagtgcaggtttgttacataggtaaacctgtgtcatgggggtttgttttatgaattatttatttcatcacgcatgtattaagcctagtacccattagttatttttcctgaccctctccctcctcctgctctccaccctccaaaagaattccattctattttagattgattctcaactggtagtggccttttgtcatatctctgttttaatcctatcctctattatgagaaatagttaattatctataaatattaattaaattgggtctgttttctatcttactaaaacatagaaataatttttaaaatacaaatagtggccactaaattatatattttgtgtacttttatttgataacaattgcttcagttaaaatggggtgcatttataattagtacctgttatgaaaaataccatttttagtcactactttataatatttatagaaaatacttcctcatgaatttataatttttttttgttttgcttccatgtgaaattgcctgcagaaatcagtacgtatatgtttacttatataccttttagtaacgctcatgcttcattgcctattgcaaaaagtttcagctttgcatgtactatattttggttttgctttaaacattgcgtagctattctttccactgttacagtattaatggtagatgcrtaaaaggaatcttcctttataaaaaggtcatatgtggataaaggtgatataaaatgtttttaatagtgttataaaaagtttggtcaggcgaagtggctcatactctaaccccagaaatttgggaggtcaaggtgggaggatcacttgaggccagaagtttgagatcagcctgggaaacatagcaagactctatctctacaaaaaggaaaaatgagtgaaatatctgtatgatagccacataaaagtggaaaacwgaatttctctatagaattaactagattatgctgtttctgataacacaaattcaccccaacacacgaatgacttaattgcaagaggattaaaatagatwaggtctacaytgttgttgtttttacccactgaagctcactttttcctctccttgtaattattctcaacttctgtagaattatatttggagaaacacataataaaactaggtcttaacaaatgaacaactactgggatatcaaaatgttctctcttaaacatcccacagtttaaattgaaagtcaagaaaaactaaaaaaatagctacaaaaaataataacaagaataacaaaatttaatatatcactatttgaaaaatatgaccaagagtgtcctcagcggaaaatgagagcaactacattactaaaccatcattgaaataacaattctaaacaatcaactttgctgactttagaaaaagcagagttaacttaaagaatgaaaaagatggaaaaattaatgaatttgaagacagaaaatawtagacctgataaatcaaaaaggtgactccttaggaatatagattaaaaattaagtgattgtcaagwttcatcaagaaaaataaaggacaaataggcaaagctctaaaagaggtatcactagacaagggaggaaatttaacacataagagatcacttggaaaaacttcaactgctccggagaatagaggaaaaagaggggagaagaggaacttccaagttccattttgaaacatttggcaaaaacttctgagaacttgtgaataaaagggtctgtaatttgcctaagtctaagtagtctttaactacttttgctctttctcattaatctaaatctaaatcattttgcctcagttttagaataatttgtagaatgtcagaataacaatggagaattaaaggaagggaaaaatgaacaaacggtttattaaaagcatacaaaataaagggatcactgtgtttatgctatctgtatgatgatataacaaacatttctatccagataacatgcatttcaggaagaaaatactgcactcagttcttgatatagcaaatctattagttaaatttaataatagacctatgttctttttaaatgccgctaacagcataagtcatacttatgagttcaaaatacctactttaaaacctaattttaaaaaaatgataatttacttccctttgagcacatgtgattcgttcctgagggttagttctcagtggttgtatgtcagccgcaaagcagatcattcagagtctaacacagcatgtagccttgaaccttaagcagtttaactttttcatcagagtcacagtgacagaaagttgaacaatacacacttaatcagataataaatgacatagtgtggatgagactgccagcatcccagcaatagaataagtggtttaccacgtggcataggccctcccttgaaaagcacatactgaaagtctatggatcagtgatgaccttcaactattttagggttgaaactttgaaattgccaatatgtaaccctttattttttttaacctacaaaaacagctgtttaatataggtcaacctaatatgtaacacagggtaatcaactattcttcaaaatgaaattgaactgcaccatgaaagatttaattaaatgtaggcctttagtctaagggtttttcaacatcaaaatgttcttcaaaagacattttgatagcttctctctttaagaygtgcaaaaaaagacggtgagaaaaagaaagaaaaccaattttgtgtaaaaaccctgatttaaatacagttctggcttggacagactaggtgacattttaaagatgctttcatttccttgcttctgtgactaaagttctattctgtaaaggttaactttttggctgaagttagaaattaagcattgaattaagttcttcatattctctaccttcaatgctaatttttaccttaatcaaaaagaaaaagtggtggccctctgtcctaacatctactcccctggcctgcttgagtctcaactaaaatattgacatttgccatcacacattttgctttagctgttatggccatgctttgtcacrttaataagatgaaattgtttggttaagcatactgctattctaattctgtgtgtgcacgtgtgtgcatgcatatacatgcacactaattttgttctatgcagttgccgatgcagatgccactgtcaaaaatttagaacaggaagctgaccggctaatagataaactcaaacccatcaaggaacttgaggataacctaaagaaaaacatctctgagataaaggaattgataaaccaagctcggaaacaagccaattctgtaagttctttttatcgtcagtatcagtaactgattgtaattgttggattattcatagagggaatgtctttccccaggattccccgttgaatgatcttgggtccttttcctttaactcgaagcgatttggggtaggaggggttggagtgggggagaggttagttttgttttgtttgtaaatttcaaaagacatttcatgagaatgataatcaccacttattgttttaaaactgggaattctggtatattctattactatttgcatagaataatacaaatagcaagaaagaaaaccttattattgtatactaaaaagccatggatgagagtaccttcctcttgctaaaaacaaaccaaaaaaaaaggccaactaatggggttatggcaggaatgaaggaacaatatacagaataagagcaaagagaaacaaacattttacatatatattcttttgtctggtataaacaacaataaaaatggctttggttatactttttacatttattttttgttttggagtagataggaaatagctgatttgtctcaaaattttgctctttacttacccaattagaagtttactaggatagaaacagagctttctagaaggtagcatgctaatgagccagggcagagttgctaagtggcaacgtgaaactttagtcaaaggaaggaagtaagggaaggggaggagaggggaggggaggggrgggaggcgaggggaggggaggggaggggaggggaggggaggggtggtagaaagaaagaaggaagggcagttttcttgtttgaacaagaaaggcttgaactcaaacctttttagatacctcagttttccatgtcaaaaattctgttttttgaacaactttggaactaggatgatcagaaaagccctttcttagttcatcagtttatatttttagtagtatttaagaatacgatgctccagtaacagcatattctttttcctccttattcacatctaacacttctaaacaactccaagacagtaagttcaaggtgaacattgaaaaggaattcacgactgactgaaaaaaaacctagaaaacaacaaaaagattagtgaagatgatgttacataagatcagagtagtaaatcagtgaaaagatctgagaaaacatatattcagctagaatatgaaagccaggcagtatcgttgacatgtgatcattatgtatgtaaagcacaagattaaaagaaaccagatgttacttcaaggtttgaagttttatgtaagatttagccaacatggaaaaagcctctactatgttcagtgttactttccgtaaggtacacaaagacgaataaaggagttctttcactcacaaagtttataaaatagtagggaaaataaaatatgtacacgtaccttgtcacacaatgcagaatgttatgccacattatagaagccgtgagaagtgacataaaagttctagaaagaacaatcacctctagtagggcctgaagatttcctgaagggaaggatttsagccaggcattgaggtgggatagtgctggggagttgggggtggagtcaggtaacagggagagtattctgagaagagggaatgacttaaaccaaggcagtgggagaaggaagttttagggtccatttaggaaaaagaagtccagtttgcccagagtaattgataaaggaaacacataaccagaaagatcaacagaggccaggtctygtcaggccttcaataatcagttaagcaatttcatttaacaacactggtacttgggataagcctcactggttaggataagctgaaagctttgagcatggaacacagtataatcagagctgtgctttttaaatataaatccagaagcagtgtatggggtagatgaaagaaagaagaatgaaggacccaactatagctgtggcaagakaaaagaagaacgtgatgtaccactcctatattttgcaatgttaacttggaagaagcaataagagtaaatattattttgtgaatctcacatttagccacattttctgacttagtcatcaagtggagaaatctagacatttttattatttcttcattgtaaagatttctgagtgcttttcccctcctcacaaaacggtgaaattcagacatgtaagcatataaaacctgtcttaaagtacaaaataaaagaaaagtataggctgggcatggtggctcaagcctgtcatcccaacactttgggaggctgaggcaggcagattgcatgaactcaggagtttgagaccagcctgggccatgtcacaaaaccacatctctacaaaaaattgaaaaattacctgggcatggtacatgcctatagtcccagctacttggggagatgaggtgggaggatcacttgctctggaggatgaggctgcagtgagccatgtttgcaccatggcactccagcctgggtggcaaatagaaaccctgtccccccccaaaaaaaaagagaagaaaaaaagaaaggtacaaaagtaacgttaagaaaaagtaatcattgtccatgcatttcaaagaaattcccaatcagttttggaaatggaattacaacacaatgccttattttttgtaagacgttagaaatatgcaagtagccaatttttttccaaatgagttttgtactaaatgaatattacattttctgatttgtaaatatggatatctggatatgaccttaacacatacttgacatgaccaaaacattaaagacatttattttaaagtagctttctctgggtttgttgattctgaaattgagtggctgatactcctttaaatgaatgacctacttactggatgaaaaatgcagtgaaaatccaatagatataataatgggatactcaataatgtttgagttcatcatgattaactggtaaataatgttgcagtattgaaatgccttaaagatacttaatgcttagtgatttttctttagatgtcttactaaggatctgcattagaaataacaataattgatagagccaaacattctaaaaggatgtttgaatttcagaaatttctttcctcttacaagagtgacatatcctaaagatttcttctagagatacagtattttgatttacctgatttcttctagagatatagtattttgatttacctgatttcttctagagatacagtattttgatttacctgttttaagttgtttaaaagaaatacctataactgaaaatcaaaacagaaagtattcaaaaggaaaagactactgattatgtactggctgtcaacagtttgggctaagtgaatgtttcagtttctgagagtatattcaaaaccagaaaacagaaagcaggtaatccaagagtattttctatatgaatgtgtgagagctgggcaatagattactgtctagtccacttcatgctgctgtgacagagtattacagactgggtaatttataaagaaaataaatttattctcacagttctggagactgggaagtccaagatcaagatgctggcaggttagggacctgtttttatgcttccaagatggcactttgaatgctcaggagaggaggaacattgtgccctcacatggcagaagagcaagagagagagagctctcamccctgtaagcctttttaatagtggcatcaattcattcatgaggacagagccctcatgaccgaaacacttcccaaaaggcccccctcccaacactgttgcactgaggattaaatttcaagcaaatgaattttgttggacacattcaagccatagcagttactctgtaggattaattgccggcatattgggtataacaacatcattttgcttcaagaatcatatttgttagatatgtattctatacaatagattggttgtaacctctagtgacattagatactcagttttaaaatggcttctctcttagacttggagttctcagagcagttagattttagtgctgctgctctgtctgctacacttttttttttttttttttttttgagatggaatctcactctgtggccaggctggagtgcagtggagcaatctcagctcactgcagcctccgcctcccaggttcaagcaattctcctgcctcagcctcctgagtagctgggactacaggcacatgtcaccacgcccagctaattgtttttgtatttttagttgatacagggcttcaccatgttggccaggattgtctcaatctcttgacctcgtgatccgcctgccttggcctcccaaagttctgggattacaggcgtgagccactgcacccggctctgtctgttacactttggcaacccccttttcaacacactaatcatggaatcccgtttttttttttttaccaggcttacctaagcaatgactgaaattcattctgtgaccaaatgatcacatattacatttatattgagtcatctcttctctaaataataactgagggatattattcaattgtgttgtttgttttgttttgttttgttttgttttgttttgacatggagtctcactttgtcacccaggctggagtacagtggcacgatctcagctcactgcaacctctgcctcttgggttcaagcaattctcctgactcagcctcctgagtagctgggactacaggcacatgccaccaccatggccggctaatttttgtatttttagtagagacagggtttcaccatgttggccaggatggtctggatctcctgacctcatgatccgcccatctcagcctcccaaagtgctgggattacagatgtgagccatcacacccagcctcaactgtgttttttaaacaaaactgatttattaggaattaaactagccataatacagccatagggccaagctataaagcatttattaaataaaaatgaagtaaactacatacagtcgctttgactactaattcagccccattcagaattggatatgattgtctgcyagggataacgcactatgctattcagttctactcatgaattccagtcagatcttgatttcttgttcactttgatcctcttatgatgtcaatggtacgtatagcctgcctcagatattaaattttctcaatgccaaggtcttctctgataatgattttggttcactttcagcagcttgctaaaaaatcactatatctgacaccctttcctgaacattaaaaatatctgaagaccatatttttcccacctgccctctactgtgctgtctttctcttgcttctctctttttatctctaatcccttggatgacccttggtatagctgccattgtatcacagaacaccctttgccaagtcccattgctcatctgctttgccatattaacatccaagtaaaaattgtacatttcctacctccattgttttgcaattcattttcactcacctactctcaacactgtatgtagaagggaaattccatgatttgtgaagcaggaactaacttcccaactgaaaaccaccctatccagaagactgtctccctaggacacagaacaaacactctgaggaccatagttggccctgagtcctgcacccagcagttggcaggctggccccacctttttggggaaggcaagaataagaaagtggtttaagcagtaggcttcctggaatgtccagccccaggccaccacactcaggcctccagcagtcaccctcctctgggtggtggaggaaacagcccctgtttctctccagaacacagtgtcctcttcatggagatacaatttgattagcagatcaggtgaggcaacaacaataaacaaataaatgacttatgcggtctgtgggagacgtaacagatcttctgtatccccagaaggtctcaaatctatatgaatttacctattgcaaaaatccctctttagccttctcttttgaatccaaccaatttggcacccaacctttgcagtatacttgcatgacccttggagaagggccacagttctgcccatactcaaacacaaatgaggctcttggagacacctcctggtgtcatgatcatatggaggctgttttggtttctaggctatcttgttgggagtctgcacagccctttcatggaggtaatgatgatgctagttggttttcttccaaatgtgcaaattacatgagtagcacaaaatgctagaagaaatgaaaaaatggaaattcactgctagtgaaggccaagagggcatttgaacaaatggcaaagagagattttacatcttcccctctctctgcctccttctggagcgctatcaatgaacaaagttacagattctctctgagtccaagcaactattttgctatcctgaaagtaaccctttgatggtgattttccatctgaccctacagaaattaaatcaaataatcaactagtgttatttatgattgaaggaaggctctctaaatataagtaaaaattggtatgaacagtattactctattcatataggcattccttttttagcaatttatagtaatttttaaggtattattcaaaagaaaagggagctgttaaatacattartwgtgatagccattggaaattatttccatttcatttcctgacaacttcatgaaaaggtacaatttattctgaaatgtatgttctgagtagaatgattaatattcttcttattgttagaacatctagaacaaaatctatttgtcctctttcaactgtaagagtataggagggttggtaatttcctcttgaaaactaaaagaaaaatagtttcttagtttaagtgataccaaaaccgctgaaatttcaattgtaaaatttcattaaacaaccttaatgaagrtcattctcattagctccatgtaaaatcacctgcctaaaacgttcccatattgataatggagaaatgtatgacgttagaagtttgttagttgcatgcttcaaaaaatagtatgctaacaagacatggaactgtgaacagctcatagtcaaaattctagtggaaaactgctcttctgtgccctcattaatgagtataatggtgtctgcatatgggtgtttaatgatagtatttgatgatagaaaataacttcaaagaagaaacgatgatggctttgtggttgtatggaagctacttcaaactttctgagagatttactcttggttctttgtatcttgttttttttaaagatcaaagtatctgtgtcttcaggaggtgactgcattcgaacatacaaaccagaaatcaagaaaggaagttacaataatattgttgtcaacgtaaagacagctgttgctgataacctcctcttttatcttggaagtgccaaatttgtaagtctaatattcaacttttcattaggctgctgtatgtgtatagctagaggttaatctgaaaatgtatagaatccccaaatgtatatggtccccaaatggtctaacgtaggctttcagatttgaaaacctcaacgtcttaccttacaaaattctgaagagtcaaattaagttagaaggcaaatgaaaggaagaaaactacagtgtttagtcacatttactttcatttgtcagtataccatcatttctgttaaattatactttcagatccagtgatttaagaatgctaatgagaataaagctattttatttacttcttatttatttatcttatttactgttcaaactaaattacaataaactcttccgttaatgaaatgaaaatagcaaagtgtgtactattttttttaccaatggaaactcttctaacttgtgttgaatttatgacctgaactgaaataacacagattatatctacaaaagcccacccataaagttctaatttcttccatttgaactatttgactttgcatgcatggggattttccaaaatgaatatgacttcttaacaaatcattcatggcataagtcaatatttgccatttgggtaaggaattctgggtcaatttgggaaataaaatcatagctgccccctcaaaaatgtcagtgtccttggtgaaaataataatggattctgaatttaaatatttgtttttatctttaccacaagtatcagagtgagaaaggctttggtctcaaaattagacttaattwgaattggtaaaattaacaaacatgcctgagcatwatggactttttttttttttgctttaaggatataaaaataaaatattattttaataatgtataataataaataatattatttgacaagtattatcatgaagctcctaatcatttcacatgtctgcaaatggcgcttattgaaaaacactctgctggtctcctctttaaaggtgctttatatctgatatctcttgtttttgtatttctctgaactagattgactttctggctatagaaatgcgtaaaggcaaagtcagcttcctctgggatgttggatctggagttggacgtgtagagtacccagatttgactattgatgactcatattggtaccgtatcgtagcatcaaggtaaccaacttaataaagattaagataattaaatgayagaattttgaagtagtttcccagtttataagaaaactcctatttccatttcaataaggtaactgtgtatgcatgtaaacacatgtgtatgaattttatacatgtctgggagtgggtatgtttgtcatacttcttaggaactgacaaaccttccaggtattgaccagaggaacaactccatttctgaccccttcatcttgtgtctggtaggaatttgggggtgtcgctgtttcaggcttcctattttgcctgaagaaagtactgccacttattcttatgcaatacaagccaaagcataagagcaccattattgcttgtctttgttgtacacagctcctcctttagtctacatagccaccatagaaaaatgcagtttcaaaacactgaaattcttatgtaacataccaggtccaccctacttaaaatgggaagtaactgagaactgattcagttattctatctttggagctttaatgcaattatcaacatctagtaccatatakattacttatagaactatccctgtcttcagcacttccctcccattttctcttcttgttttcccaattctcaactccctgttaaacccaaagcagctaacagttgaaaggtatggttaagggcctagggctagacatgaagctgatcagagacagagaagacttaaagaactggttaattgttgactctgggtgatacatagagtttcatgctgtttgtagatacttaattttttccataataaaaagtttaaaagaaagagccatgtgcaatggcatgtgctgtagtcccagctacttgggaggctgaggcaggaggatcacttcagcccaggaattcaaggctgtggtccatgatgatcatgcctgtgaataaccactgcagtccagcctgggcaacatagcaagacttcatctcttaaaaaaaaaagttataaaaaaaaatgagaagcaatatttttagttctttttaaggaagtttttcagcaaaagtgtgtgtgcatgtgtgagagagagtgacagagtgcttgcgtgtttggtggtgttgagggaattaagtacttaacyggktttaaggacatttatactcataaagtgcagttcttctttcagaaaagatacattctgttaaagaaggtgaaccttatttgataaattcattcttttgttaccatgtatttcacttaacattgcatcctcaaagaaaaaagattaccaaagtgagacagcagtcagggaaatatgacatcgaagttttgttatgactgcttgtctcaaaagagagaccagattttcatatttaacagctcatggaaatcaatcacttaaaaaagaaaatgaaataaaatgataatagctttcaaaattctgttaattgaatttaaaaatgaacttctatgcaatttgtacactgaaatctgaagggtggatattgtactgtatacattagtatgctgtgccaaacaataaaagatataccattctaggaagactacttcaacaaactgggatccaagatattataaagaattttaggagaaatcatgcagcttatgatatgaaagggtggctcatttggggtccactagctgaattaaattagacaaaatgctgaataaagtaatataaacttgcataaattgtatgtgttggtaaatagtaaattattatgtaagccataggaaaaaggctttccacttaaccaatagcaattccatcagttaactgctgctgtgtcatttcatgtcaatgaacacacacagaatcaggacctggtgctcactggttctggttgaaactgatgtaagtgttgagccaagatcagactctgagtattgattcgagatctaatgaatttggaatgttagaaactaaacagccagttttctcttaaattcttaaaaacaagtctcygcattttatatcttttaaatctggaattaccagaaatgtgatgcatatttcatttyctgtatgttcctccccttcacttcaacacgtacccttgaagaactgggagaaatggaactatttctgtgagagccctggatggacccaaagccagcattgtgcccagcacacaccattcgacgtctcctccagggtacacgattctagatgtggatgcaaatgcaatgctgtttgttggtggcctgactgggaaattaaaggtaatgtgttcatcctcctcctgtttatttcatctttgttgacatctcctgacataattacttcaggagaaggtatgataaagctctgtaaaacttgatcacgttttacttaacttgcatttatgaaaacatgaatttactttgagtaagaattttcttctttgacgattcaacctggaaacacaatatttttaagcctatgtgtatttatttaaacagctgttgttttgtctttatctgtggcatcagttttttgtatattcttgttttagttgcctcaagagcaaagtgttttttaagtatacctcatcttctgaatcgatttatgatttatagatatgaagtgctataaagttcatactcacatctaattaaaagatttatgaatactttgggaaatatcacaggagctataagctttcaaaacatgatctggtttttaaagttctcaagttgctcttattcttataggatgatgcacttaatattcataattgcttcatgacagtccttgcgcatttcaaattgcagaatgcctgccttttaaagaagcttgtgttgattaaatggaattaggtgttgggaaaccactatgggtgagatgcaggagcacaaccaaatataatggataatcctgggcttgtcagaatcatcctgagttgagattagtcagaaaatgtgaaaagccagggtgaccccaaatttatgaggactcaaccttcatatagaatgaggttattttatttactttgagtacgagatgtgactctaaagtatgagaatttattccaaaaccacacgctgaagttatcctcgtttcttagaacttcatataaatgtatatggtacatagtaatatatagtcatattatcaactttctctccttcacagatagataaatatagggatagcacacagtagtacaaaagccatgaattttgaaatcaaatccaggttggatttcctcctcttccacttgctaaaatataaccttagacaagtcacttaaccccttgggctttggttatctcaactagaaaagaatgataaaaatatctaccttgcttgcatattgtaggatacaataatacattttttaatattcttataactcttcctatatgctaagtaatgttctcagtaatttacatgaattaacttgtttaatttttacaacaaccccaaaaagtatgtcttagtccattagggctgctataagaaaaataccatgaaactgggtagtttataaataaacaaacatttatttctcacaattcttgaagctaagaagtctgagatcaaggtactggcagatttggtgtttastgagagccagtttttcatagaaggaggcttcttgctgttctcacatagtagaaagagtgaacaagctcctttggacctattttataagggcactaatttcattcatgaaggccctgcccctcaccatctaaaactcacctctcaaatgccctgcctgctaataccatcactttggcgggtaggattttaacataagaattttgagagggacacagacattcacactatagcaaggcagatactaatattctcattctgtagttaaggaatctgaagaagagagatgttaaatgtcttgaccatggtcacacagtaattagcagagctgggatttgaacataggttaataggcacagtggtcttcactctcaacatcttgcttcactgccacaatgaatagtgagacacacactaccatagagtgtgtgtataaaatatatggcaaatagctgagatgtggtagtcacaccttaaattgtaccttaataattattatgcaaatgtaattggcacaaaaacagtattctatcagtctcagaaaaagaaagaaaacatgaacaaatgaaatctatagcaaaccttaggaaatcattttggccaagaatttcaagactactgccacaccagaatatgaaccaaaagctgaaaacaactaaatgaacttgctcatgagaattcaaatgagcaggaaaatctctcaaatatagcttttcaggatgcaagaagaagcaaaaagcaagcagaattcacaagtaggataatcaatctctagaaaattaagaggttcagagtgatgacagagcattgcaaggacgactccaatgtgcaagtcaggggctccgatcaacaatctttctatgcggctgtgcaatacatggtcacagcagtgggaaatgtacatgttgatgggtttaacctaaaaccatagcagtaggctataccatagagcctaggtgtgtagtaggctataccatctagatttgtgcaagtactgtacagtctatgcttttaactattcagtaactgattttactatttaaaattttaactattcagtaactgttttcttatgtgtgttctaaaaaccaaatgagtcaatgcatgtttttcccagataatctgagtaaatatgggttcactttggcacagagtttttaaagttgtaggcaccagaatataatacagtcatgtgtcactcaatgacaagaatacattctgagaaagttggaattaggcaatttcctcaatgtgcaaacatcataaagtgtacagtacttgcacaaatctagatggtacagcctactacacacctaggctttatggtatagcctactgctccaaggctagagcctgtacagcatgttcctccactgaatgctgtaggcagttgtaactcaatggtaagtatttgtgtacctaaacataaacaaggtacagtaaaaatacagtattataattttatggaagcaccatcatatatgtgatctgtcatttaccaaaacatttgtaatgtgtcaatgccaaaacagttgtttcaatttacaacaaacttctctaggagggaccaggtcattctctttcttcatgattgtgtatcaagcctaagacttttcctgtgaaaatgacaccaggattgaatttgatcagattatttgtcgattctctatttgactccaggccctgtgctgtgtatacaagcaaacgacaccaatgtggtctcatttcctacaaagttgcttactttttctttattcccttgaactcgaaatcttcttggctgtgaacagaaatttaaaaatttacagcagcactaccatagagtgatttatacaagtgcttttaaaaaatctcttctatgtcatcagcrtgtcccctttcttctgatctcaggggaaaaagctttgtgtatgcatggcccaaatttgcccaaagaaaattatgtaggagcactagcatttattgaacaccttctgtatatcaggcactgagattggtgtcataaataaattatctaactttattctcacaaaaattccacattacagacaaaagaatagaattgtggagaaggtcagcagctcacctaaagttagaagctaggaagtgtttatttactgatgatgaaaactggtatagcaaaaagtaatcagcattcgtggattaaatagttgagcttttcccctgttgttgactcatcctgtagtagctctaaggatacggacagactatgatgaaaagatgaatatgtacatatgccaaaatatcagaaagaatggataatgataactttagtttctgctgataataactctcatggataaaccaagattatttgtgaaattccaaattctagcaaataacggtatttctttctgcagaaggctgatgctgtacgtgtgattacattcactggctgcatgggagaaacatactttgacaacaaacctataggtttgtgraatttccgagaaaaagaaggtgactgcaaaggatgcactgtcaggttagttgagatgagaactctcccagggtctgtcctgtgcataataaaagcttcgwttttattgcataatattctattatcatgtggatgatgtggagcaggtttgaaaggattatactcagaggtggaattaccacaaaactaatgaatcttcaagtccctgcctgcatttgcacaggcatttttcaaggccctgggaggtatactagcagtacatttgcatagtcatatgtttttataaaatttgcaaaggtaagagattttggctacaatcagttaagtttccactccaatgttctttcatgtcgaggggtttttttgtgtctgtgagtacctcattgttataatttttttttcctaaagagagctttccccaaactgattaagtttcaggtcttgctgagcatgaattcactatatttatgtttataacaaaattagaaccccagcctaggttttatctcttacaggatttttttttaattgacacataggatcctacaagtgcttcaactggaaacctatgggatytaatgattctgcttcaagagagaaggagaacaaggggccgagatagtccaggaggaaagttcctaatacatgacctcaattataagatagagggtagaatgaataggaatttgaaaatatttaacatcctatcatactaagcatgtgtagagaataaacacttttatataaaaatgaatacaggatataaaatatttagctataagtagaggatttctcagcataaaaatcttagagcccacttatcacccaagcctaaagcaattttgttaaattaaaactataaaacatactttaaatacctgcaaagttaacatgtcataacagcaactcaaaaaccattaagtgctaaggagtttgtgttattttccatttaaaggatatacatacgyttctaggacccaaatcctagcaaagtacacttcacatttctttctctacatctctagagtttcatagaagaaagtagccccaaaatgttatccctctaaaagtcttaacttccaactctttgtttctttttgacatcatggacttgtcaacatgaaattgaggatagtttgaaagcgtgacccattcattgtttaaaatggttttgtcaataatcttaaacaaaatttaacatggaaggttgtctgtaaaattctttcaatacatgaaagacagtgaagcccacattaatattctgctactcacaaaccaacaccaacttttccctaagcgtttctttggtaaacttctaagtaggattttcaaaagcctattatcaacaacaaaacatctaaggcatttaaatatccattcagcagtgcatgtcatgtgaaactgtaacatcactaattatcaattctgcaaagattttgcacttcaacacataaagtattatgctaatttatgattataagagtattcctatgtatacgtagggtgttttgtaggttgcagagattcacgtttacaacttctcctgatgctagaatgaatacagcctagtcctagccatgaaaagacatcaccaggaagggaggaaaaaacaaatactaaaatagttcaaatatcaggcataataaaagtccctttaaaaaggcacatttggagtatactacaattacccacatcagattaagggcatcatgatctgcttcacagaggaggtgacatttgaaatggtcttgacctgaggtaagagtccaaaaagaggagatagcagaagaaatgtgaagaacattctaattcctgaaaccagtaagagcaaagggaggaagagtgggaagccggagtgtttttagaaaagaacaagtgtgaattcactcatacaagattggcaaatgggagaatgattcgggtaagatgcagtggccacataggttcatacacacttcttcccagcataatcatgtttttttttctaccctataacggtagctgaatccaaagtaaaccaacatagctgaagacaccaacctcaaagtactgtgccacaacacagcctgtacacagtgtgcattcacccatatgcctgccttcagcttgatttagccaagcactctatctcggaaatgttcgtggcccacgtcttttccgtcattgtgcatttttgccccatcgctaacacttggcagtgtcagccctttcttatacyccttgtcatcaaactatattcacattttccttttaaggtgaagtgatatgtatactgaaataatcctatattttttaatgttttagtgtatctttttgagctgtgctaatactttgatcaggattgttattgttttgtgagttctctaattacacacttgtgtaagtttttagcaggtcagccccaaccctattttcccataagccctgttatttgtaagaataatttttatagaactcctggtgtttgtttgtttgtttgtttgtttatttgttgytttcaggaaaacacttatcacatttgaacataaagagcaatcattcctactaaagagcaggagtgatttcatggagaagatgtaaaagtgaggctaaaagaggtagactaagaaaatgtcataaagaccttagaatgtcagttttagaaatttgcatttattcaatagtcagtagaagagataaaattgttgttatgctttagaaagagtaatctgtcaaagatatttttaaaagtgtatcttatttttctcatgcttctaaaattcacattaagattaaagtaaggggaaaaatctgctgcaagtaaaatttagttagctgagcattgaaatggtgatattttaatagacttagccccaatattcacctagaacgtagctgctccaaaatagcataattaatctatactaactttaccagacatcaaggttcaaaagagaaacaaaaggcaaattaagaagcctagcatttattaattatgaaagaataggggcttttttagtaaatgcattcagaatgaataggataactctattctattctatgtcgaaatattatagagtgtacctggaaggactcatattatttctcatcccatagtcaccaattcaaagccagacttaccttgtttctcctagtgttttctaatgaattaaatgaactggggggatctacagctctgtktttagccactcccagtccacaactctttcccgcaggtatctccacaatcgcagtaacatcagacagataggtaggtagatagacagatacataaaaatagcctcatgtttggaaaaaatattttaaatgtattcacaagacttatcttagatattcattaattatgcatccaatattgattaaacatatattctctgtgaggcaatttgctatactaaaatctttgtcatcctacaaacatcaactggattctaggatccaagtactgtattgtatgtactagatgttttgagtttgtgcctgacataggacctagcccataatctcttagatggtctcatgaaatttacattctagtgaaggagacagaagaaaccataaaaataaatacaggcctccttaatcgtctgaatctaatttgttccagaaaaatttgttggaaggcaaatattcagagtaggatcctatatataagaaatgtaataatgtattctcagcccatccagaaaccccgcccctttgcccaaataccactaagacacccttaagcatcaatataactatctactaccaagtgcttttacaaaacataaagcacttaaaaaaactaatgayttagttattgcacacctcatgaaaggtgagaggtggtttttacttattctagcacggtggcartagagatggagataagtggaaggaatgaagatgtatttagggtatttcctgccctacaacagcctatagtctcattgctattcagtgatgcattgaataatgacagacygaatagatatgatctgattcatgtgaaatgtctctcttctcagtcctcaggtggaagatagtgaggggactattcaatttgatggagaaggttatgcattggtcagccgtcccattcgctggtamcccaacatctccactgtcatgttcaagttcagaacattttcttcgagtgctcttctgatgtatcttgccacacgagacctggtaaagatcatatgcatagcagagtttccgtgactaaaatgcgtttgcttcttttatcagttattggtaaaatcatcagttattggtaaaattatcagttattttctaaaaagcctgggatgattgtctggcagccaagaatgggtgatacagatagtgcttatatattttcaataataactttaatcacagatacaatttaattactatttattttcaatacaactccccacataatcctttaagcaatacatccggtaataatttttcccagcatggagccatacagcagcaaaatgcttccttaatcttctttcagagacctgagttgaaaaggtgattataagtattctttggcctcatttttttctggtcagtatttcttactgaattctttctgggaacataccttttggttcacttaatatgttttcaaatgaactcacattttacgactgtaataaaaggatatgtcttagaaattttgttgtgaccatgtgcatcataatatcacagccacaaaaattcagaaaatagtaacaccaattctattttcaaaatggatttctgcaacagagtgacatattcagcaatttagccacaagaccctaacataaaccacacaagaaaagtgaacactcatatacttctctgtgtatctaaccactggggtatgtttactctattaatagagagatttcatgagtgtggagctcactgatgggcacataaaagtcagttacgatctgggctcaggaatggcttccgttgtcagcaatcaaaaccataatgatgggaaatggaaatcattcactctgtcaagaattcaaaaacaaggtgagtttttacagtaataatgcaatataggccttaatcatgaaatccaaagtgcacatgtacctgatcaagaggaaggctccgtctataattttagctactcacgagttcagtgaaaaatttatacagtcatttttttggcttagattataggtgatttgggttagacatgactgattgaagagccaaatgcttctctatcattttcttttgaaactgagagcttaatttgaaagcataaaactgtcttacaacttgcaaaattatatcctgtaatatgtttgaaaaatgttgggtgcttttcttttctccctattttgtcaagatgtttcctttaaagtggcccacagtggaatctataggagtggtagggcatagttatcagttctttgctcatttaaattgccaaacatttgtatgcctgcaagtaaataattgatcaatagtaacatgacatgtttatgattcggggacattttaaaacactttcacaaacattgttttatctgatcacataagcaggtattttgttccagtgttagagaaagtaaaatatacactcaaacttttatgtggtcacagacatatatataaaagatctcacaaccaagacagaaatccaagtctattaattctgagtgtagtgctattgctttttaagtatataattgctctaattctgtgtagtatggcattaccaatatctgcaaatgagactttgttacttctgctaatataaatagactcaattaatgttgccaatgccagtgtgacatttcatgaaaatttacgtttaaatttaaatttgtaccgtctttcatttctgcatttaatacatatctgccaggcaccttctaagtaccatgtaagaactaaatgaagttctaagttcttgccttcaaggaacttgcatcgaactggggagatagacaagtatcaatggttagaggatagagagctaattgctgtgatagagatgtatgtagccagcgagcaatctcagaagagagacacttgagtcaaacagagaggtcagtttccactggagtgaccctgaggcacaagctggatgaggagttagctggatgaaaagcatgtatggacatttcagagtagtgaaagttgtgtgaaagcctggagtcatcagagagaataacacatccttttccagctgcatttccaacaggaaactctagagaaacctctcatatgggacaaaaactggctttgcaattctttattttggagtgctgctgcrtacattgttcctgtgtaagagaggcacaatgcacatttgcatgtcagaagctctgtgtagttagttgttcagtaagaagaatgtttagctgtttaacccagcatttcccaaatttctttaatcagagaaatccttccattcctgtaatactagcattctgctgaacacactttggggaatgctttagtaactacaagtgaatccatagcctacacgaatgaatgttggcaggaaattatcagtaggggccaagagataacagaaccagtgcataaggggacatatgagctaagtgagtgagtttcagctttatcctgaaagccatagggataccgagaactctaagagttttaagaaagggtgtgatatcataagacttgtgctttagtaaagtttctttagcagcagtttggagatatgtaacaatttaggatgctacggagtctggtgagcctagtgtctccccaccaacttctcttctatagtagtagaataacagatttgaagaaagaaggagaagatggatatgcattataaaagaaaaaaagacaacctaaatgtccatcaacagatgactgagaaaagaaaatgtggtatatatacaccacagaatactatgcagccataaaaaaagaaggaaatcatgtcttttgcagcaacaggaatggacctggaggtcattatcctaagtgacataacccagaaacagaaaatccaataccatatgttctcacttacaaggcgagaagctaaacaatggatacacgaagacrtgaagatggaaacaatagacactggggactccaaaaggggggagggaggagaaggggtgaagatttaaaaatcgcctgttgggtacagtgttcactgtgtgggtgatgggtccactagaagcccaaacttcactcttatgcaatatatccatgaaacaaaccttcatatgcaccacctggatctaaaattgtraaataataaaaataaaaataaagacattcggaacactaagctgaattggctaatgctataaactctaaagatagtaatatgcttggtagatgtacggtataacaaacagggataaaatgattcaacaacttaggagaacaatttttataaatggtcatcttggaaacgctaatttccataatcagtctgctatctcaacttttattctatccattaaaacaaataaacaaaagatctgtgctctgaatcaatattagtcaaaggtcaagttacagaatcatataaatgtgaaagtagttaaaaatatgttttaggtttactgtaactacagcattccatcaattcagaaagttcttcccccaataggtctaatttttccagattttactagagctactaactgttactgttactactctgtggtccagaaatcagaaagaattttcctttatcccagcctactcagtatcttctgtgacatttctggtttctagttcaatccctttgacacagttggctgataccttctcatttataagtcttctccttggctttcaaattgactctagactcacattgctttttgcctttctgaatactcctgtcaaatgcaccaagcagtcattctcacttttattttgggtattaatgacatgaatcattctccttacttctctattgtatctctatggtatcaccgttaaaaagaaattaagccctatgaggtttagttgttcagaattttgattcttaaattagactgggaacttctaccttctgcccatggttgttacccattctctattatctctggtgtctcaccacaaatttctcaagttaaacaggtgaaattttttattataataaaactatagctgttctgtttttccacatgtcttctcatatatccaatatattttctctaatacttttaaagtattttattactatagcaggtcagttaatatgtattaatttttccttataaaaagaaaagcatcgaagctgcaatggaaaaagcaaatgttataaacaaataattcacaaaagaaaaatgcaaacttcttacataaagttgaaaaatgcaatctcaatagatgacaagcatatggtcattgacttgcagtagcaatatccaaagatcacacttaaagcagtaaaatctaaatttaaaaggaaaagaagaaaggcttggcaaaataaccttactacctgctttgataagattagctcttacaggacacatttattaaataccaactatgcatcagatgctgtgctgcatcagtgaagatgcatacggttcctacccttgagtaacttacctgctgcacaagtagcaaattactgtatctgtttaggatacagtaaacaccaagggagacatatggagggagagaaataaggcactaactgagccctaagtccttttttagttgagggggtaggaggggtggaagcagttgcaggcgatccaggccaaaaagcatcatatgaaaagataaacatgtataaaaacatgaattatttgggcagctgttgtaatcagtttgaattattggagtttaaatttcaaaagagtgatagaagataacgctgggcatgttggcaagggccagatcacaggaagctgtttaaactgtgttgaggagtttgcatttcatcttgatgaacttgattttaagtagagatgtgacagggtaatttcaatttaagtatattactcgaggtgtcagtgtggaagacatattgtcagaagaccaaactgaagacaaagygaacaattggattcaataatagtctaggcaggaggtaaattatgcttgaagtaagagatgcagtgggaattgacatcaaagaaatgcagaataaatccaccatgtgataccattacacagctattagaatgactaaaattaaaaagactgaccatactcagtactggcagaaggtggagacactggaactcatacactgctgctgaggatataaagtggcataacattggaagaggttggccatttcttaaaagactaaatatacatctaccatacaaaccaatcatttcactcctaattattcacccaggacacaagaaagcatattttttatasaaagacttgtaccaaaatgctcacattacttttatctgtgttactcaaaaactgaaaacaaatcacatatccatcgacaggtaaatagatatacataaattgtggtatactcatacaatggaatactagcaataaaatactcagcaataaaaaataaagtattaatatagatacaaaatggatgaatatccaaataggcagacaaaaaaggcaaatttaggcagacacaaaaaaatacatttgtataaaattacatagaaaatgtaaactaatctatagtcacagaaagcagacggatgctacttgtgaatggtatatgtacgaaaaggcaaaaaggagggattacaaatgagcataaagaaacttctggggtgatggatgtgttcattgagtgtggtggtggttctgcaggtgtatacaattacatgttacaaacatggtttaaattatagcatgttaattattcctcagtaaaactgttttaaaaataggacagatattagaggtatttaggagaagaaattagtgaagctgttgattgattagatgtggtgaggagaaagtcaggatgactctctagtttagtagattgggtgggggggtcataagaccaacaaaaaaaagtaagttaagtaatacagatttgggagttagatgataattattttsatttggaatgtttagcttaaagtacgcaaggaaaatatagatgatggtgtctcacctgttgaatgtggacttttaggcaaaaatcaggtccaagcatacatacatttaagtcatcaatacattgtaagtagatataaacttgagtttgcccagatggctaaaacctgagatgtgggcaaaggaagggatattataaaacatcaacattttagaagtgttcaaaaatagaccccagggtaggagattgagaatgaaaggtaaaagaagccagagagcttgacattatggaagccagaagaaatttcctatagggaaggaaatgctaacagcattaaatattgcacaaacatgrattcagataaagtttaaaagaactccactgagtttgggtataggcaggtccctgaggactttagcaagaccagagatgacagagtagtgggagaggaattgaaataaggctccagcaatgtggatgattgctccttttcagtgaccagattatttgttttatatgaattattctcaactagttggcaagagcactgtctcttgaaattcaagtacagtccttcaggagtgttccccatctttcttgagtcagttacagaaccacagtccctgacagaagtgtgccctatcccctaaatgcatcaagtaggatgcaaagttgagaacactcaattagattttcagtggatcaagaaagagaacaaaagaataatagccaaagtaaaaacacttagcttataacaactcagcattgattataaaatatttcttaagtccctactctgtgtctattatttaataaaatccttatttccctacctacttataaatcacatctgaactcatcaactgtgaaattttgtgtcaatagcctacttttctattttgtaaagaaaagaaatagggtaagaaataaaagcaagcattagcatttactagcatttcctggtagaacccacttcatcgctatcactcatgaaggatagagtaaagcactccctttaagtcagtaaaaatatgccatcctgtctctctgccagttaccttttgggccagtgaatttcaattcaattgtgttgctgctctttaatcatgttttcttagaatgatttctaaaaatgcatatattcattcatggataaggaggaaaaccacctccagtcactggcttgcctgtgatagagaggcagaatctcattttcagacaccattaaaatacccaccaagtctgtagaaagagactattttcatcttccagtcaacagccccatatgaaaatacctttgccgatctagataaaaaggaatgtatatgaaaaagtcttgaaaacagttttataaatctattttcttttagcccccagtccagtcaaggagatatatgtgtatgaaactaattatgtatataaaaataataaaataggtgtgtgaaagtaattcaattttaaaatcttaacttgctagctatatttaataggacaattattcttttaggtatttttcttgtttgtttttacaaaagtctggtttgaggtgtccattggtatgtgtattttagtccttttttaataaggcaattgtgtttgattttattgaagacacatctttttgaaatgatagggctataaacttcaagggaattttggaatttgatgtttctctctgttttccaaagaacactgattctgaaagatgatgagttgagtgaaaataatagtatttcgtggtcaaataaatttgggaaatactttttgctctatgtccttctctaggaacattgcattgcatattagcatgctgaaagatctgggcagctataaaattaagaagatacatgtttaactttgtataacccagtatttgtcatatttatttgagccaggaacatccaagaaactagcatcctaaagrataaacatttagaaattcccttataacccactggttcaaatgcccattttcaaacccttgcttattcagatcctacatcagacaaaggtttagaggccaaatctatcatcttacgggactgatgtcaatacgcatcaaggatgcatatgaagtagttaaaggctagatctaaggacatgtggtagaaaagcatgtaattcagaaaaagcctagcttgacccctaagaagggggyggtagtgagagggatcaatgagataaggagttcctgtctgctttctaaacaatgcagtttgaacagagaagtgcctcatctttccttttttccatctatttctgaattcttatcttcatmacattaaaaataccttgagagacccaaaagaaaagcaagaaggcatgaggactgtacctctgtcacaacacttagcatcctggtctaaaatgtaatttacagtgtacctggatctcaccacttccttgtacaacatccccttccacttccatgtacaatcatattttacaacagtgacactttgcagatgagtctaaatcccagtagttcctgtggatagtaaaacttacagaaagagccatagattaggcatrtttctaattaattatctgattcctaattagatatctttgttatttagcatttttaaccttgctttattttctaactacttatctagattatagaaaactacatcaaatggatctttgatgttcagttatagttatctcttttatcttcattggtttgccttcactggtgttcaagctattattttcatgctctttgggggatagtttaataatgtattttattgatgttatttctgtaattattaaattgctaaatatagtgcaagtgcttgagaaagtcaatgttaattctcgaattaaaccaaatttgtcttgaagtattaatgatgatatagatgtggttgatattgctcaaataaaatgttaaactttctttctcctttacagccaatatatcaattgtagatatagatactaatcaggaggagaatatagcaacttcgtcttctggaaacaactttggtcttgacttgaaagcagatgacaaaatatattttggtggcctgccaacgctgagwaacttgaggtaatttagtttatatgtaaagctaaggattaagttttaattaaatgaccactatgctcactagagttctgaagtttaattacaataagaatgtcatataacccttggttgcagaaaggcctaatcaaaaacatcatgttgcatgttagaacaacaccaggatttagaaaccaaaggactaatttgacatctttgttgaagagatggattggagtcgctgtttcctttatatgcacctgctgaaaagaattatgaaagtaattaaaggtagaagccagagttgaatgtggatcttgtaattgctgttctccttctacattcactggagataatggcactctgacattgcttagtgttccgaaaattagtcagtgttccaggatgctatgagtataacctattttattgctaagcattagcatcataatggcgtgttggagctttcccatatgcctaatacaagaactatattagttgttctcatgcccatgccaacatttttttttaatttcacatatgctttttagctagcagtatggggagacacatttgcttcctaatttagttagttcaaaaaataaagtaactaaaaaatgtcagaaaatactcacgtgctgtgtagttaatttactgctcattataaaacataacatagtctataaggatggtacttggtgctcaataaatgttaattacactctaattagaatgggattaattgatttggttaaaccgtaagagtttattacagactaccatgtttttaattttttgttttgtttaattagtttggtattttttaaagggtataaaagttctgtccaggtgtttctactccaaaaagacagattatgtttggaaaaatcccagaatagctgaaaagtgtgatggtcagttattttcacatttctaaacgagcagtgaaagttcagtctcattctatgacagctagtgtgcaggctgaaatttcttctccccaaatctaaactcatagatgaagcaactgtctaattatctgatgagcttcatggtgcaaataaattggctctgcattcattgtaatgtatttgtgttagaaaaataaatttaaagtgtcaagtcagaaaaacattacaaatcaaatttaaatagtaccacagttattacctagaaattcatttgccagtcattcaccaaaagtytgttgagtatctactatgtgacaggctccataccaaatactaggaatccagtggttgttcaaatctaagatttgctttacaagatcattaaccatatattattgagtgaattaaatacagccaaacctaaggttattcaaatctagcttcatttattctagtgatgattttaattatcataaaataatttttaggaattatctataaaggtgtgcctgttaaattctataaaatctgttaaaatctgaatctgytaaatgaatctttatcactaaaatgtttttactttcatgatacagcattgcataattacagtatactatttccatggtgtggcacattatttcaaaacagccattagaggtatatttgtgattgataaaggaaccaaacattcatagttacctgttattttgcctgcagacaggttctcagtatgacaaagtgcaaaagatgtggtaaacataaattatttttacatgcattgttaagctcaagctgtttgagaggcaatatttataagccattcatgaacactacagaatagtgacattgtacattttcccatttattagattgataagaacaagtactttaaattcatatttcaaagtaaaaattttccaagctgatattgtgagctacggtcatattttgattctaatttcactgccgtcaagggtataagtctatttttagttctattggggcttttgcatttctttcctttgtagatccctgtgaaatgattttttaaagatttatgattaaagtttattgttttactaaatgaaaatgtaattataagtaaattgtttttatttttgttttttttttcctctttcccgttatctagtatgaaagcaaggtaaaatttaaatttatgcatgccttcttcgagtgcatgggttgggtaaatgtggcttcttagataaagcagccgtgcagaagcagagcaacaccagtacagctttgttcatagtatgtttcacgagcaagccgtgcattctgtgagagttctcctgctgccccttgctggccgacattctgctgcttacccaccatcagttgggctgcaatttgagttgtctcaccagcagtgatgagatttgctctgctcacttgttcaaccatctgcacacagtgcccctggtgaccagcagcacacactcaaaaggcagctggtcaatttctggtacacagtctagttctgggaaacacggtaaagtggtctcttgagttgaaccccgggccctggcctccctagtgccatgctgtctgctgaagaatcaaactgtgctctcacatgcttaccactgccttcttgctttttgcaggcctgcagatatgcaaacattyacacagcctttgcacctcttgtcaaagctgtttatctattgacatgtttatttaaaactagctatggtgccagatgaaggaatctctggaaatactatatttaaaataagtatttgcgttaatagtaaagaagtgtgagatagttctcctagcttctcaggagcattttaattcttactagcattagcataaargctgtgagcaatgggcctccataaatggctgaacaaacctcagagatgtgcagggctggtatcctctggctagagctaaaagcctggtgttttggcatttcagagcccagctgtgccagatttctggaaagaagataataaagccgaactgatccaagaaatttttaaaaccgaggctagatttttaataagagaaatagaatatacagaaatgaaagtagggaaaaataaaccatgcgttttatcatgatacagttgtaagaccactagttgtgctacatttgctgagatggctaaaaagcgaaggctggctttcatggaaatatatgttaataaaattctgggatggcactgtgtaggtttgtaattttgcctttgagtggtgaccctcaagaaacagggacccgtggttaccattgagtccagtcaccttatgtgactatttatcccctgtaattgtcctaatattgaggttgctaaatcatattttggaatggttctttgtgtttccatgaaacaataaactatataacttgtaggagtgatttactttagtaacaagacctctgaaaaaaatggtgataagtcagtctttccataaaggaaaatatggaagcaagtgaacactgttaatgaaattcaccttctctgtgcattatgcaagaaaaatataagcagaattctcaccctacagttgggcatgttctttataacaaccagctgactgactgaacgaaaagaaaaccttgggaacaaggaaaaattatcaatgaaaataaagaagttccagaaaggagtgcgggggtggaaacagacagacacctgacatgaaataaatcacctgatatacacygccaaggtctaatttgtttttccacctgtttttcctcatgccatgtgtttttcattaagataaaaaaaggaacttggcatcatgggacaatgaggagagaattaatcatcaccctatcaactacaatatattgatgccgactggacagtttttaccgatgctgattamcaccacataaagaattatctttttcacttctatataccttcactattcaaaatagtagccacaagtcacagtagctatttaattgtaaattaaatcaaattaaataacaataaatattcagtttctcattgagacaagctacatttcaagtcctaatagccacatgtggctagtaackactgatttggacagtgcagaacagacaatatccatcatcacaggaagttctgtggaatagcactgttataattaaagaagtatcatcatcactgacattctgatagcctttgtttgttgagcacttactgtgtgcagtgctattccttaatttattaaacctttgcaatttgattatgtagrtactatgattattattatcatgcccatttcacatataagaacactgagtcttggagaacttagatcacttgcaacatctggactcaagggcaaggacttcatttcctaatctgctggcacacttgccccattttatgaagtagtatgcaaaagtaaacattcaagtgtagtttgagtataaaagtcatttttcaattttattgaaaaaataaaatgtatgggtttttgcatttggttgctttattttgtkattgttctaatgtagaatacagactttggggtcaatctgtaaactaaattaatctgttaaaaaaaaacatttttttattttgagacagggatctcactctgtagcccaggctggagtgcagtggcacaaccataattcactgcagccttggcctcctgggctcaaaagatcctctctcctcagcatctccaagtaactgggactccaggcacacaccaacatgcccagctactttttttggaggggagggcaaagacagggtctcactmtgttgcctcaggctggtcttgtcttgaactcgtggcctcaagcgatcctccctcttcggcctcccaaaatgcagggattacaggaatgagccactacactcggccagtaaacctaatttttaaacatctgttttttagactatataatccaaaagaatgtttcttrgactttgttttacttaaaagccttaaagagatatgtaatattatcttattttttagctatctcccaagaaaaagcctcaaataaaaaaaaatctttttcaaaataaataaacgttttcagatttttttttctaacttttgagcaaggtttttaaaaactttttggtatatagtttgtttatgctgcctatgcaattatcttstctttggtgaaaaaaataaaacttatttcattacacatrtaaagcatcaataagaagtcagttaattcctgtacctcatgtttaaatgctgtgggtgagattattgytaaaggggagaaggactacaaaaagactccttctgcaggataacatgaacatccatttagaccaaccagtagayaatggaaaccagagtttgctgggtacacgtgtgcacagtttgatagacatgtgcctgcatgtgtctgctccacaaggcttccttcccatagtcagagactacactaccatcaccctaatgatattgcttttgcttttcatttgactattcaataggccagaagtaaatctgaagaaatattccggctgcctcaaagatattgaaatttcaagaactccgtacaatatactcagtagtcccgattatgttggtgttaccaaaggatgttccctggaggttggtctgtttttgatagttctctaaacacatttatatcagatttcrcttacttagtgtggctgctcctacaaggatcagtcttttgttaatatattttacttttctactgatcctactcttaaacgataaagcaagattaaagcattctctaaattaccatgataaaaaatggtattatgaagtcctagaattgtgatccaatttyccaaatgtatagctctttatagcacatatcattaatactaatctcttttctgtttttctctttttttccaacactacttttcccttttccttatttttgtcatccattttaaatttattttacttttatgtgttgtatatagctttattagcaaccttacattttttctggaaccattsaagtttacacaagtagcaagtagtaatttacaccgtagccattagtgcatagtctgttgtctacaaacttgaagtctagcccccttgtctttgaaataacatagactgggacctgtggcaatcaactctgcaaagacttgtgtttgacatgcctgcaaagtcctttgttagctgatatcctcagtaactcttctttgatgctaaagcatcctagcattcccctattttygtttaactattttgcactgtttcttcagttgacactgacccatatgtgagaaagaccccggccatagctctactctcttaaaatatccataagcaagagtcaatagtcaacagcaaatattagcaagaattttatagaaactcaatagtgatcagcttgtttttaaaatgaaaaygttaaatatgtcattctcatacatttttaattatcctatcataatacaattattcattttgtctgctgcttctaatcaaaattatcttaaaccactccaatagaattagggaaatgaagggaaaatgtgggtaaagaaaaaagtaaatccaccayttgaatgatgaggtttaaagactggaacagaactttcaggatcttcattgttcatagctacaggctccaatttggaattggccatagacacccactctgagaagtttgggaataagaaaagagaaaayacattaagaactaaaactgtaaggacccatactgkcttcttaaaggaagttttactgagaattttaatcttcaaagcctaactctcattcacattcaaaagatatatacatgaggatggaaactgtccggaaaatgaatagcctctgcacgtggaaattatgattccctaaaggcactttgcagtaaccaggaattattttgcaactaaaatatgaggcagaaatttgatgtggataaatattgaaaagtctgcacagtagttttatctgaactatctaaaactccatgatttgaaaattggaatagaaaacagattatacattttaccagctcttgtgtcatttaactggtcttgaaacactgtgggaggaaaatagcctacattaaaggattctttgcttttactcctacaaaatctaggactttaaaaatgaatattttaagcactttaaattcctaactacatgggcttgcttaaataaatactagcaaattcataaagtrgaaagtcctcctgccattaaaagtgactatctacatttactgagagagtgatatcttccacatatgtaagaaaaaaaagtcattaggaatgaacatgtctatcaagattcattttaaatayagggaggaggagagaggaagatggcaaggttgtgaaagagtgaatgaatgaatgaatgaawgaattatagaaagctatatgcttctgcacagctttgagattgagatggggagctgattttctcccttttgcaccttatttacatttctacttgaaatgtaactgttttaattttatactgagcaaggacaatggtattactttaatattgagaaaaaactagactatgcgatgtttgktttatttatttttaaggtttggtcttatcactggggaaaaatgcagacacagataatggtcatacccatctgtaaaacataaacaattaagtgatagagtttattcaagagatattcgttacagtgttttcaaaggaaacttagggacaatctccctagacatgtacytgcttgtgtgtcagtttgacttaaatctttggtttaaacaacaacaacaaaaaaaggtacctaacagtgataatcttctatatttaaaatcaaaagctctagaataaaagtagaggctataattctgattttaacaaaaactgctcagaagatttgaagttatcatataactagaaataatatttcttcaactgctcttaaactttccatgttttcctgctttctaaacctatgatstatttcataatcacattaattgcatcgaggagggtgagtgagatggagaacttatttaaattttcatttctaatggtttctactcttcttttcctttactcacagaatgtttacacagttagctttcctaagcctggttttgtggagctctcccctgtgccaattgatgtaggaacagaaatcaacctgtcattcagcaccaagaatgagtccggcatcattcytttgggaagtggagggacaccagcaccacctaggagaaaacgaaggcagactggacaggtaccctcacacctagctgataatgcattttccctaatgcttatataaagcagttaacttacttttgtatttttagtttcgtatcatttatttctgctctcatcttggctagcaaggactgaacattccatwtttccatgctggcctcctatttcactcrcatcatctccccaggacaattgtcttctctaggatgttcctgttgatcaattgtaggtgcaaagtcaccctcatatttgcacctatatttcctatgggtttaacatatgcatatgtaaagaggacagcttaaaatatattcacattatcttaatttctactgtctccaagtccgactccttaccaaatctgtagacagtcagcttcggtcccttaaatttaaatgtraattcctctaagatcattttcccagttgcacaagctgaagwaatagtcttttgggcctgactcatcccatcctctctggacacaaagaagggcagaaaatggatctgggagaaagcaagtagaacacaaccaacacagacagggacaattwtatcccaatagcattcaaggatgttaaagcctaaagaatgtcaaccagccgggtgtagtggcccatgtctgtaatcccagcactttggcaggtcaaagcaggaggatcgtttgagcccaggagtttgaaactaggctaggcagcatgataagaccctttctctacaaaaaatgtttaaaaattaamtgggcatggtcgtgcacaactgtgattccagctattcaggactgctattcagctgttcacgccaccacactctagcctggatgacagagtgagactctgtctcaaaactttttttaaaaaagagtatcaattttgcaaggacataaactttagtatctatatcccctgtccatttgrttctgttaaaagcaatccctcaactgcccagatttaagcatcatacctcttattgccttggtattctttaatatcttcaatcacattttttaaaacgtaattttccatttaatctagtttttctcaatgaaagggttcataggaattattttgtctgccatgaccaaaagaacacaatgctttacaaatatatccttaagtatgcacatacccttgtaaaccagatcatgttatttgtgattacgtgttttaaaaatcaattttagtatgtaacatttagtgatcaatcatattatgtaacaaatcttatttatttttctaaaaaatacaaagcccacacaaaatattcacaaagagaacccaaagatgtataaccacgagtaacttggattatttcaggaatgcagaagtggtttaatgttagaaaatcaaaatatcagccaggcacagtggctcacgcctgtaatcccagcactttgggaggccaaggtgggtagatcacaaggtcaggatttcgagaccagcctggccaacatagtgaaatcctgtctaatttgtatactaaaaatacaaaaaattagccaggcatggtagcaggtgcctrtaatcccagytacttgggaggctgaggcaggagaattgcttgaacctgggaggcygaggttgcagtgagccgagattgtgccattgcactccagcctgcgcgacaatgtgagactccgacycsaaaaaaaaaaaaaaagaaaaagaaaaaaaagaaaatctaaaaataatataatcttgtcaatagatagtaaaaacatttggtaaaatttaacagtcattcatgatttttaaaaaatacttaagtaaactaagaggaaggaacttccttagccatctataaaaaaaaaactataacaagtattcctgatttaaaaaaaagacattataaacatttgctataaaatcaagcccaagaaacagatgactattttgactgcactgatcttagctagcatagtaagaaaagaacaagtaaatatagcacaagaacaagaataagaacaaatatataatttaagaatcattataacaaaatagacataaagcccatatggagaaaattataaaatttcattgaatgataccaaagtatttctcaatgattatagtcaataaattggtatagtcaacatgttaatgaagatattaaagactcaatattaaaaatatgtcatttctccccaaaatgatatgtagattcaattataataaaaatatcaccttatttttctgtgaatcatgacagcttattctaaaatttatatcaaagatgaaattcctagaatagaagaatagcgtagttggggctgttccaccagatatcagcacattagaaggtaaagttttgtattgtggarctatcatgttaattcatgtataactgtgcaaataggaaagaattgagaaccctgaaaatacacaagcatagatggaaacagcatttgacaataagtggcattgcatttcatttaaaaaagacaacagtgaactgttcagtgaatgatttcagggcaattggttattcatatggaaaagatgaaactaaatttctttttcatatcaaaccaaaaaataaattcacaataaattaaagtcttaaatatggaaggacaaaaatctttaaaattcttagaagaaaatataccaggattaaattttgaccttcgggaaaagaacacttgattgaacaaaacaagattatragtggaactgcattaaaattaaactctttggtcatcaaacaacacaaaacacaagcctcagtctggaaatgtacagtatatataatctacagggaatacagtccttgtccccaaaaggggaaaagctcactgcagtttataatgggatatcgaaaccatactggttgytatagtattagaaagaacagtattggaaagatgtgaatcaaagagtgcccttgatcactgctggtagaaaaagtaaatttctaaagtcactttggaaaacaatttggcactatctcctgaagttgaacatgtgcatactctctacaagccagcaattccactcctgggtacagacccagatttttgcacatgggcataataagacatgtacaagaatgtttatagaagtattctttataatagcagagaaactagaaacaacccaagwgttcatcagctggagaacagagaggcaaactgtggcacttttgcataatgggatatcaaggaataagaaaaaggaataaattataactaaatataacaacataataaatagaaaataaataaaaatgaaaaatgtgctatatggtaccatttttgtagatttctcatacaagtagcactaaacaacatattgtttacagacacatgtgaatttcaaaaatattttttaaaagtaaggtaatgataaacataaaatccacatttgtggttacctctgagatggagaagcaaggagatggtattagaaagaaactcataagagatgcaatggtattgtttctgaaatttggtggtagatttacaggtattcatgttattatacagtgttaacgcagcttcatcgtttacatgtatatcactcatattgtgaagaatatatcaaatagtcgtaataaaaatatttttgaagagtagagggagaaaagtgttattttatttcatttcttactacacataataagcactaaataaatataaaatacaaatgccctcgtcaatttttttgtttatcttgaaaaataaacttttttctcatattgcaaatgataagctagttataataagaataccagatcaaatattctgaaatagatttccactaaaggatacttgattccttcatcattgccagatatttaaacactacctactggctccaaatttctcctcttcaagataaaagaaatgaatgtgaatcaccagctttcaggatagtgcttaaaataaaacagattcctattaaaacaattacaataagaaaacactatgtagtatagtataaagtaagttaaaatgacattttaatgttttaacattttaataactcatatctactttataaaatatcatagtatatgctatctgaaggaggaaccaatgttaaatagtataagtctgttagacataattagatttagattcagtgctggttaaattgacaagttttatatttcaaagctaacggttttgatacccatagagttatttgtgattcctttctgctaaatgggtttgatatggcaaaccatccatgagctaaggaatttttaattgagtagtttgtgttttccctttgacagatggtgagcacttatccagatcctcaaaatgttctgtggtggacacgtaactacatacatgatttagtaaattattggaacatgatgatgtttgatggaatctgtctctaccaccatagatgactcatggagaactgagccatcactgtgtggcaggtgcccccatactccacaagaaagggagagcacgtggcatcagctctagggacaaggactgcattcaggctccctggggttcatgatgggatatcaaaaccacactggttgctatagtaacagtagcaagaagaaagcaggcatgcttgtggatgaaaaattatcttccttctttctaaatgtgggaggcaggttacatgtttgtgatagcgatctattctaccagctcagagaacaaattgaagtctaaatactcagaatgccacaaggttgggagtcaggcctgattctcagaagctagctgtccacttgtgaatataagggagagggattttgttgacaccctttgtctcctgatgggttttataagttagaggaccaacgcaagcacagctgttactttcagcatcacaaatctgctttgcagagaactgctatattaatatatccactttccagatcatctcacaagcaaaaatggtaaatgattagaaagatatttccagctgttttcaaaacsgtttgagaaaataaagtcttaatttctcaggtaagatctcagagcagacgaacctgtggttctgccagggaatctctaaagctaagccataaatgagacttctgtttaatcttcaataaccacttgctgttgcaggcctattatgyaatactcctcaacaggggccgtctggaagtgcatctctccacaggggcacgaacaatgaggaaaattgtsatcagaccagagccraatctgtttcatgatggaagagaacattccgttcatgtagagcgaactagagggtaacaatagcactaaaatatttattattgtaactcaggtgaacttcctttgctagcatcggtatctatcagtatctgcctgaacctctgtgtgtgtggacmtactatgcattgcaaaaggataccgtagyttaattccctcttctttacttttcatacttcgggaacctcatttgcytcagcccttaggagttctacccttaacatttttattcgtgcagttatctmcacctttggaaaaaccaaatgcattttctgaagctataaataagaaaaatccctccctctgcccctcttaaatattacctcctcaaataaggtatgcacacagyraaactcacaaatcagctccactggagccagcaggctttggcggtttctatctcattcaggttccaaagcagttatggcagctgcttagctgtcacagatacagagtgtggcagcagctgcaggacctattgagcctattaagtgcatatcttgtccctgtcccccttcccaaggtttgcagggtccctgcagagtggctttctgagggaacagaatcaagggaggggaggaaaatgactgctgccctgagcctggccacctttttacaaatctaccagagtgcttgccccagccctgggccagggaattggctttactcatgcacaaactgatgactttctttagaatgctgcaatactttatacttactttattaggaaagtcatctgtatttttcatcaaaatattgtatgacaactcagagagataattagtttagaaggacaattagagaaaaaagaaacagaagcccagagacttcaggggttcagacctccaagccagcaatccatttatcagactgaagacatagaaaagaactggaaatccaatttgatgaggcctcaaaacacagaggatacttttaaatgcaacgagtatgaatatgtagcagtagttcagccaagccaatactatcctgcagtgaaagacctacatttactaattatcctcttggggaaaacatttagataagcaataaagatttcttaccttctaagtaaacaacaaagctttcctcagtttttattattattattattaggtagaggattaggctgtaggatgaattgatacaaagcgttcatgcagaatggctactgagacgtttagaaaccatgatcgagacaaatgagggatcatttatttggacaaactgagaacttttactaatctaayagccagatattgtagtcatggtctctgaggagaaatgcaaactgaatgctctcatttgaatcttagaatgctttagaatcctggtttcacatgtcttctagattagatgttaggccctttgacaaactttaatccttttcattgcggaaaggactttttaaaagatttaaactttagccgggcgtggtggctcacacctgtaatcccagcactttgggaggccaaggcaggtggatcatgaggtcaggagttcgagaccagcctggccaatatggtgaaaccccgtctctactaaaaatgcaaaaacattagccagacatggtggtaggcgcctgtaatcacagctactctggaggctgaggcaggagaaatgcttaaaccagggggacagaggtttcagtgagccgagatcgcaccactgcactccagcctgggcaacagagcaagactccaactcggaaaaaacaaaacaaaacaaaaacatttaaactttaaggaatttcaataagtaactgcagatttgagaaattagtttaccgaaatcactcaaaatgtgttattttgttgagaaagaattctggaattcccaaatgcattacactgttgtaccactatgccactatgtccttttaacaggtgcttcttcaagaagggcattttattatgccaacttcacagctgttgaccatcaatccaacctttatttgattaagctcagtatatagtacatcactggaaaccagtcatttagttaattggccatataaacraacagttttgccattcattgttaattacaggataatatatgacatattagtgtgtagtcactgaactctgtgccaaaacagtaatacatttgctaccataatggctcattcggcactctaaggttaaaatgcaatctactctataagcaagtgccacattaaactgattgaccagagatcgcaagtgaccatgagaacttcacccagaaaaaatttttaatgctttatatgcctattctatggcatgatttgtgtcacatactagacaaagatgatttgttttcattgttctgaatgtatgtgagatctgtaataacatcctttcatcacagatgagaaaatattaactaacytgcccaaaatcatgtactacaaataacaggaccaggtattaaatgagatgatatatttgacttaaatacctccatctatgcacagccaatagattattcttacatttttgtgtgaccataaaggtttatattactaaatgttgattatgatgtatgattattaatttggagatatttgcattatcccaacacttttcagattttcagactatgcatgtcagtcatcatttcttttcctaaaatcctggacaaaatgatagctttaataccgcctcacaaaataattggattttcaccaaactgggggccaagcttctcaagaagctccttctcccttgtcctctgcctctctttactcctcctccctcattctctctcccttccaccccttcatctggaaaaatctccctttagtcactttggtatctaatttcttggcactccagtgacctctgcctcctatatctgctttgtcctctgatccttctcctggcatccgccttggtggccagcagttcttactggacaaaaacatcaaaccctaagagcctgaagtagttacttaagcaaataggacaagcaactgaactgaktttttcttctgggaaagctttcttcacacaggtacagaaataggctaaaggtcaggaagtagggtgagatattttaggagtcatttggggtttccagaatgagataaagattttaacactgaaccctaaatattttctttcttaacatccaaagtatgttcaaacagaaaaaagattagattctatttattatgtaaattacaaacattaggacacatttctcttaatatcttcttccacgtatgcaatccaactgatatggtttwaaaaaaaatcttaaacccacattccaaacaaataagaaatagggtataagtaatcargtaattatgaaactctaagaatcagccaytgaaactgtaaaaaaaaaaataaagctgacctattacaatactaaagtaatacaaagtttaatgtacctttttgcacatagcaggcctcagtaaaaagctgttaaataaatactttttaaaaatggaaaacacaccagaatcataatggacatattggcaatgtccttctcaataaaaactaaagaaatgatctagatttgatgttcctaaaaggtaaaataggagcaggatttagctgtagttttctagcaatgccctttttaagtaatacagcctcagggcaatcccttaattaatattttccgctgtttgaagtaggtatttttatctccatcttataaatgaatgaaatggacctgagcatgattaaataacttgcccaaggtcacacagctagtaagcttccacactagtacttaattccagtatgttcctcctgaaagcccacactcattctccatcaccaccctgtgaattggtttaaaaaaaataagggtcactatgatggtccttgtggcagaaccacactacagagagaggctacaccagaaagaggaaggcctctagctttttaaaattctaatcaagaacagagatttactctccttggacaatctttaacagaggcttatatccttcattaaaaccttagaagccctgtgatatcatgttgctaagaagaggctgctttcagctaaaggggaaaaagagtgtaggggaggggcttctcagtgagtcacacatacccggaagtgagtggttttctgaaattctcgtctcaggaaaccaccgacactcttagcaaggaagctgaacctcctgggttttgccaacacatttttccatagtttggtaaagaaagaaacctcaaaagtatgtcatttccccctattttctctttgaaactaaattttaccggtcccttcttcacccccttaacagtgacgtttttgagccacagcgaaatccattttttgtccctttctcttacttttgaattatcttacttgtaaagtgccaattcagagcatctttaccctggcttattgttttttccagttctacatgtggttttacttctttataaagtcaagtaagagggtactttaggactgaggtttccatccaagtactccggttttctctccagatatgaagtaagttttcagtaatccattcatgatccccaggctagtgactaatgcttatgactaatagcaccatgatgactgttaagaccgaaactcaaaacttgcttccggaacaaaagagaaaatgcctttggtcattttcatcagaactctttgtctccttctgattcttggcccagggatccaaggattgttgtaaataagtagcatgaggttctcaattagcagtgtgtgagttctctctcataagcaaattaggaaaattaatgaaacagccactaaggaaaatcattgcaaggaacaattagcagggtgtccttgcctgcctcttctattcaaaagccatcagctacattctttataaaakgtgctttaagtgtttgctgttgattcctgcaatctaagctctcaggagcatggtttgttccctagcaagaagataatagccagcacaacccaaggaagaccccatgctttgctaaacctgccaacccttatacggttagacattactgcacactgcagaagcctcagttctcacaggctcatgtgttgggctgcacagcgctgttgtcagctctacaagaggctaatgttgcagtgcgccatgacctggtttcagtaaactttcaggaagagtgaacgagggagtcatggaacgagatcctgagaacagcgtttgcttagtgtagaattcctaagcatccaattttggctcccttaaaagctatggttgagaggggtgaagggtggcaggaaagaatttgatttccaactgtattgaatcagatgtgacttatacttgtttatttttaatattttatcagcatctttrcagttcaagtggatgaaaacagaagatacatgcaaaacctgacagttgaacagcctatcgaagttaaaaagcttttcgttgggggtgctccacctgaatttcaaccttccccactcagaaayattcctccttttgaaggctgcatatggaatcttgttattaactctgtgtaagtggatctcctcattactactactaattttttatttttatttcttgctattaggggtcccaatgcatctacattgtctacagctatgcaggggaggagggaaacaatgaggatcttcaayttagactgagaaaagcacactaatggacttaaaaaggcatgcggggattgggcttaattgtaaggaagcaaaaaaackaaaataaaaaaatcttatttattacattctattagccccatggactttgcaaggcctgtgtccttcaaaaatgctgacattggwcgctgtgcccatcagaaactccgtgaagatgaagatggagcagctccagctgaaatagttatccagcctgagccagttcccaccccagcctttcctacgcccaccccagttctgacacatgtaagtgtttatattatccccattgctttctaatttttacccagtattctgagtcatttcagaaggaagattattcaggatatctagtacactctgatattagaattgaaagaaatataacctatctaaacctattcttacatcttcattgaatgacttacctatatttccatcttcaattttgtttacaaaacagtacattttcagttgaaatgttggaaaacacagaaatatccagaatcatgaataaaagacacttataataccatgacagaggcaaccatgttggtttccaggcccttttatctgcatagtagatgtcctaccttgtatacaatttggtgtcctgtttttagaaactagtaatacaccactaaaactgtttctaggccaggcgcggtggctcacgcctgtaatcctagcactttgggaggccaaggcaggcagattgcctgagctcaggagttcgagaccagcctgggcaaccacggtgaaaccccgtctcttctaaaatacaaaaaaatagcctggcatggcggtgtgcacctgtagtcccagctactcagtaggctgaggcaggagaatcgcttgaacccaggaggcggaggttgcagtgagccgagatcacgccactgtactccagcctgggcaacagagcgagactccatctccaaaaaataaaaataaataaataaataaaaactgtatctaaacatcatataaatgtgtatgtctaatatgattttatgttaagtatatatacacacagagacacacaactattttatagtattggaggtcatatagccttgattagagcatgggctcaagtcagactgctggtattcaaatcccagcactgtaaccgaccatctgtgtgaatttgggaaagctacctgtccaatctatttctcagtttcccatccaagtactaaccrggcccaaccctgcttagcttttgagatcagaaaagatcggatgctttcagggtgatttggccatagactatttctgtttcctcatctgtcaaatgaggatattaacagcacagacatcaaagactttgtatcagagttttaaaagataatgtttgttcaatgactcacatatactgaacgtttaataaatggcataagtactatgtagtaatgataataatgagtactttcaccagcccagggctaaacaattttcattcaatattatatgtaattctcataacggctctgtaaaatatagtctttctacttttagtcgagttaataagaattagctatcttaagcaaccaacccactcacaccactagtaaaaggcagagtaagaattttattctagcgagtcagactccaaagtctgactccttatctcyggaacactctgcctttccaatttattctacttttaatagaccatggtaggctattgagagtgtttccagtttttcactattagaaactatactctgatgagctcctctatgcatcaagctttttcattatttccagttattcttaaaatagataagtagttaggaaattataaggccaaaagatgaatatgtctaaggttttcaatacacatacctgaattgtttcttccacaggctatgccaatttacattcttatcaccaatacaacaaagatggtcacagtcactacactctttacagctcatgtgttgtggttatattccataccagtaatgggtgggcaatgttgtcttgagtgcagatcttgaaaactcttgaatatctcattctcttccttagtgtccacgatggaattggttgagcaatgtgctccttgcactagaaatagttattcaatgagaggccagataaccatcattcaagaaaactggttatttactccaagcatcctttcatcctttgtaaaatagagatatttcatctatcttgcctacaacatagagttatgaaaaatcaaatgggataatgtatgcggaagttatctgaaaactggaaaaagcatacccacatagacactctgaggaatccctgcatttagtgaataactactatgtgtccagtactctgccaggcatttcatatctgttatttcattttattcccaccctattgttttatttacatttatttatattgccagaagtattatatttcacaaaggaaaatacctaagatcacacagctagcaagtggaaagctgtcagtcatggggggttagttccaggagttgatttcatcctaaagcattcctgagatctgccacatggatttcagaatgtttcctcagctctttcataattcagccacaggttagatctttgcttagcaaaggtaaggttaatgatcctcctcttcaccctcatatacctgaaaatcatgtgtttctcagactcataaacatgttttcagttgaagaattagaaaacatcatgagttgaataaacttttttgaccttggatcctaatgtccacttataaaaatgtttctaggagaaaacagcctaatttctaaatgactaacttaaaattataaactaaaattggcaagagccctaaagatcatctggtccaatcaccatcttaatgcatgggttccttttacatgatacttacagcctttgcttgaacatttcattgacaagattttccagtgttatgacaaggcaggctcgagttgttagaaagccatcggttacattaagttaaaactgagtccctaaaacttctatgtaatgattgtatttctataggcaaacacattacatttatgtgtcctctgtctaacatcccttcaataatttgaaaatagctaagtcttctccttccctaggctaaccatttccctagcttaggtattctttgtattatctcatttctaattactatcccctccatgatcagtattcttaaatttgaaatattcccttcataatatggcacctactgctcaaaaggaagtcaccagctcaggggacagtgtgacccctccctcccttaattgttaccatatttctattaatgcacctaagaatgttttaatgtttttaatagatatatcatgctactaattccaaatcgggtaccatattcaatcaagcagaacctcatggaccttcttctctaccactagaacatcctccaggcaggtctctcagcctgtgctggtttggatttttagggataaccctgccagcctccatggatcaccttacttttctaagtacttacacaaactgcattttatagggcctctcaagcacatttttctgtggtatttagagatcacactttttccttttttctcaaaataaagatacttgcccatctgggaatggagatttttactcatttaaggttcttttttttttttataaccttctgttctaatttcgatttccatttcctctcagcagtgtatgttttaacttttccgaaaacagagcattccacttagtagatgagacagaagcaaaaagttgagtagcatgccaaattggttggtttagaaagaatcacagaacattagagctagaagacaccctaaagattccaactcttaacttgcacatgaggaaagaaagccctcaaacttacagcatggcccagggggttacacacatgagcgatagttggcactaaaacccagatatctaaattccaactgctatttcaccttctttttgtttgtttgtttgtttgtctgttttttgagatggagtttcactcttgytacccaggctggagtgtaatgtcacaatctcgtctcactgcaacctccacctcctgggttcaagcaattctcctgcttcagcctcccgagtagctgggattacgggcatgcaccaccactcttggctaattttgtatttttagtagagacgggatttctccatgttggtcaggctggtctcgaactgccaacttcaggtggtctgcccacctcagcctcccaaagtgctgggattacaggcatgagacactgcgcccggcctatttccccttcttttgcacattataattagttatgactgtgtggtcagaattagattttttagaactttccatctctattaattgtattatattttagaaatcagatcatgaagccacacatatcttctgttttaatttgtttcctttcttatgttctttttgtgtgtgtagggggaaaagggtgtcttctttttaaaggttactaaaagttaaaagttttacagtttattttgtaacaaatatttattaagcacctactaagtgcaaagatgaatacgatattatcattgctagtcagagaaaaagagggagagttgctttttctgccatagccctcccacttttattccatgaattctggcaggttacttgtcccttctaaatgtaaaataattaatggacaaataaggataataatatcttccttctaggattactattatgagggaataagttatacattttatgcaaagcacctagcaccatgcttggctcaaagtaacattccatctctctatttattcttttgttagtttaactttaacttctgtgtttctttaacttaattattctagttagtttaacttttcacatttttagggtgggtggcaggtgctggaaaaaaagggatgtggtgagtattcaatttttaagcaattccaaacccttttattggtttgatatgtaatgatgatatatacattgtaatgatgtggttattaaataagtcctctataattttcacttctcaccattttccatttttgtatcagaatttagattctttattttttttttcttgctctgtcacccaggctggtgtgcagtggcgcaatcatggcttactgcagccttaacctcccaggctcaggcgatcctcatgcctcagcctcctgagtagctgggactgcaggtgcattccaccatgcccggctaatttttgtatttttaatagagatgggatttcaccatgttggccaggctggtctcgaactcttgggaagtgatccacctgcctcagcctgccaaagtgttgagattacaggcataagccaccacgcctggcccagaatttagctttttaagagttgttatttaagaactaagacttaaaagttaactcctgaagtgagaactgcctatttatgagctccatatttgtgctagcacagttgacagaaaagatctattctcagtgcccttctttttcttctttacacccatcacacccaatcctgccagcaacttacagcatgaggacaacattcactatactacagggcaatgtaagggtgtcttgagaaagccctgccttgtgaaatggattatgtcaatcttatgattaattcatgttgaacacgctagattaaagagcatttcatgcatattatctcatttgatattatggtagcttgtcttctctttatacttctctcttattctttagcccatcgagagctagagaaaacatttctacatgttctatttgtggatatttttcatggaggatggcaggaggtagaggtagataagaggctgaacttcaagtattacagaaatttgttgacatgtggaaacgtgacaagttctctgcaagtatgtgcactgtttagaccaagtctttttaacaaggatagcctgtgtggatttgtagataatgagctggctgcattcttttacttgaattttattgaagagttcagccgtaaacctcacagtttaaaatgtgaaaactaagaaaaacaatacaagtagccatggagaattcctgtactgatgagctctctttgggatttggggaaaagaagtgagcacagaaggaaagaatagaggaaaggaaagcgatttccctagcagctttagtgctacacctttaagacctaagtacagtcaaggccaaaggataaactgattggatactgatatgtatttaaagagaaaacatacattttccacttatcaaggaatccttgtttagacattaatgtataaatattactgtaaatgcccaagacccaccaaaagagcttaagtgcagtgttaacaataattcagtttctcaataaacatcttgagtagggcttttatattttagaagaagattaaagtcagtgctataaaaagtatcttccacttattcatccataaagaaaatcatgacaaataagcaccagatgtgattttagcccacatttattagagaaattaattattgactcatgaaagaagaaaattatgcaatttctatgatgattcattgtttggtgctttcaagaacaaagatgccagttttgataaatgtaatataaatctctgctcaggacccaggaaattcaagagatgcttatcaacgaatcatacgcactcctgaatctaagaactcatttccaaatgtcagccaccaatctgcagttagttagaaaagaccattgctttattctgacctgaagttaaatgagtgacagtgtgggggtgaaaacgttttggccccgttaccaatttggtgcactatctacttccctaaacaaggctttgggagcatggcttcctccataattattcccaaccacatcactgctctaatcaacaggtgcaccaccacgcgagactccccacccaagtcctgtctgcctacaacttgtaacctgccaagcaaaggcaaatgaaaaacaagcgtatctgtcctcctttcatatcccattttccccattatctatttctagtactttaaaaagtccccacaaggtggcagaattgtaacacgttgagattgatgagcctctactgagactgtgaatttttttttttattattattgttgttttaacacatttgagagattagtgcgtccaaaacaacacaggtaaagcatcacatccatagagatgaggacgccttcaagtatacactagcttagaaaaggatgattcatcttgcaatgaccattctttaaaagttccttaaaattacctcattagatcttttctcttacccttttttcttagcttagatttcagtggcaagcagagttgaaaacatcatccttagtgacaagatcattttatttctgagcaaagcacagggcagtttctattccatctcacttgttccccctttaaaatgctagaaggaaaaaagaagcttgagcagctggatgagcagctccacccactgtgggacatgaggcagaaggaagagaagaggaagcaacaccgggcaaagcaataaactggtgctgccctgaacacatcatgttttttttctttttgagacaggttcttgctctactgtccaggttggagtgcagtgatgcaatcatagctcactctaaccttgaactcctaggctcaagtgattctcctgccttggcctcccgagtagctggggctttcagcatgcaacaacatgcccagctaattttttatttttttaatttttttgttgttgttgttcttttggagagacagaggggggcaggggtcctcactttgttgcccaggctggtctcaaactactagcctcaagcgatcttcctgcctcggctttccaaatgctgggattaaaaacatgagccaccacgcccatcccttacacccatcagacttggtttcagtttacccaaggaaaagtgatgcaaggaagacaccctttaaccaagcaagggggaggtcgagatttgtacaaaacactaccaaattagagggtggggaatttttgtcccatttaaatcctaaggtacatatttttaaaaaccctcttacaccagcacttctcagtccttttccaactgccagtttaataaaggaaggtgatagaagttttattaaaacagtatccatcctgttgcaaatcaatgattgatagtaaacatcaccttggatgtccttaaaaacaaaggactatacaccataatggctttaaactttgaggttacatgttagagtgatcagtttggtacaactcttttccataacattggctcatctgagaataccgttttattaagcactgcttctgcctgcttcttgagggctgcccgttgcagaaacggaggatctaatccaggaggtgttcttcttcctaaatttcaagtggatgtaacctgtaatgattcttaaaagaactttgacaaagtccctgtccttttctggtcaaaggtttttttctaaaatggcttgaccagtgccttgtccatctagaaaatctcatagtatacaacgaaacaacaacaaaataaaaacaaaccaaaaaactgctgcttagctcaggaccagttttggatacacctgtccagtctaccagcaatccaaaagttccccataacatacagctgctaccgggagtgtacaactgccaccttgaaaattttttaaattttaatagagaagttatattgacatttacatatagtaattagacgagtgactgtaaccgcaataatatggacataacccactggtggttctcttttaagctacatgtaattgtttcctaattcctcagcatccatccacctttcttaatccctcaattttcagagctgagggtgtaaagatgtttcagtgaaattctgcccccagtggactcacagcagataggattatcttagtgatttctgaggaagactgcaagctgcgtgtgtttatcgagacggtcctctgtccgggaaatatcgtgagaggctgataaaagatcccaattctattaatagaagtattcatgactgagatcttaagctacagaggcctttccattcgggctctttttgcaggcagcgtaataagaaaggtgccacatgctgcctctaaaagaggccattcagctgtgcgaatgaatagcattttcctgtcctacccacggggttttgcatagctgtgtgaatttcggccacagtctgctctttataactgaccatctcctgggaagcaagaagggaaatacttccatgaagaccaattttacggcatttcaaaacactttaagccttttacctgctgtggcagagtgcttcgtttgactaagatcaagagaaaagagaacaaggcttttcctcatcaagtaaaaatttcctgtgtgctgatgagtcatctctgaggtacactctttgggaagaacactgtgcatcaaaagcctgccttgggctgcttgagaacctctgctgagtcagcactcactggggcagcggcccagccagagctattaagtgcagatcttaaaaacagatatgttggtgagagtgtgcaggttattttctcatgtactgcatgttctaagagatgtcataagcagcctgtatatcgacctatcttgtgaaaatagagaacagggaaaggaattgtggctttggtaatttaaggagccttgattatttatggagctgtgtgttatggtagccaaatgtgatctactcagccaggactgctgtatgctttgcaaggcccagtgcaaaatggaaaatgcagggcccctcactgaaaaattattaagaatttcaagatggtgacagcagagcattaaaccatgtgactgcacagccccgcacctagctctccccctcagcaccctaggaagctgatctttgaacagtggcagttgaaatggtgtatggtgggttacatttttaaaatgtgctgggttgcctagcaactggcaagggcctgaatgggctgacgtgcaggtttagatacaccatcttgaaagtctacattcatggaaaccttctagtggactgataattttcaagaaaaagtaatatagtgggagatggaaatggggagggcaagaaaaaacacattttgctactcttataacccaagtggctagcttgtcattttccctgttcgatcttctaagaatagagctcttcatatgtgaaggaaaaatgaaagggaaattccagttttctcagaaatatacataaatttttagaggataatgaaactatgagttaatcaataaatatgtctgagcacattcctttagccattccagggtgtgayatgagaaaactgattcacacgcactgagcactcrataataagtacttactatgcagtagactacagagatgaataatgtagtttttattcttaaagaattacgctaatatgtaagaaacaattagacagcatcattacctttttaaagaacagtccataatctcctgtttttctctcctgggtattttacagggtccttgtgctgcagaatcagaaccagctcttttgatagggagcaagcagttcgggctttcaagaaacagtcacattgcaattgcatttgatgacaccaaagttaaaaaccggtatgtatcatcctgagacactgggaaagaaccgataaatgaagaactgagtatttgtgtttaatcaagttgaatctactacacttattaattaatgaagttagcttttcttttattcactgagtacaatagagaatagaattttatttgtctgagcctgaggagcccaatttaggaaatcagtagcctgataaagtcctcatctctgagaaggttttactctcctttatgaaaatgcagccacgatctgataccgctctattttagcatgagaatgctgttatttttctgtttgactttgcatgcttttgtttcacagtctcacaattgagttggaagtaagaaccgaagctgaatccggcttgcttttttacatggctcgcatcaatcatgctgattttgcaacagttcagctgagaaatggattgccctacttcagctatgacttggggagtggggacacccacaccatgatccccaccaaaatcaatgatggccagtggcacaaggtaatagtcccctggatattggcagtaccctaagggaattactgagtggcagccatcagcattctcctggtgccagtatattttgccagggcagacactgactctggcagaagctaaaaataaaataagtgccatatacaactaccacaatcttggaaaatgtgctcagacctgtgtaggtttgcatttgaccactggcatgcctcatcatggttccatcactgctatatggctgtggttttcaaacatctacccataaactgaggccaggtggctgaagacatttccactgctctaagtgagaaacgtagaacagagtgtgttcaccmtcaagctcgatgtattcaattttaaggaataatatttattctgagattatattatagcatttttatggtggctaaaaggcctttctattatgaaatagtatttgccaaaagcaaaagttggcaacactaaaatgggtcccaagactccccacctaaccacacagtggtctgtgaaaaccaggaatccaggaatctctggttgatcgtgtttaaagggctctaaggtatcatttctactgacagttatttggaacaactttaaaaacgttggccttacacccagaaactggtactattatgggcacagaaggctcatttgccagcttactgtcctctttggcatgactgcaaatagataatatactgcctgattaaaacaaaatctcaacatttgtctctgcacctgcgatagcctattaaagcaaagcttccctaggtagaccaataaaatttttaattttcagagtacgatattattagatgttagatttggttaatgttaacatactttgacttgtcatattctagaaagccaaagaaccttaaaaaacgcgaagccaaccaatttgttatcatggaaataagaaaaggaatcttcatttttgctgggagcttatgactagcaaatacagatccaaatgaaggagctctcattaagagttcttccatctctagctaatagaataataaatatgacatttgagaaaaagacatattgttgaaccacaatgaggctgggattaagaaagggaacttaaatactataattagtcaaattaataacggattttatttttgatggtttttaaaaattacttcccaaaccagaatagatatgtgtaaaatgaagtgtgaaattactctaatcctgacccagactcatttttaaaccatcatggtactttagcatttcacaggctttcatgctcctttacctaaattcagactcaaggtttttatactccagccagtctttacaccccttatttcattctgtctcagaagataattcactccaccgccctaaatttcagcctcagtcacttctctatcttactcccccactttgtactcatcaggttctgcagaaagtagtgcagcttatttgtgccactctttctttaattctgcacaagaagggcctgttaggcaaagggatgtagcgtatctgaaattgtgttgggagcccaggctctttsctcaatcaaactaatgcacttttaaaactgtgcatgaattttgctacccacttaatttatgaaagtgctattagtctgcagggttccttacaacattcctccctctccacacatatccacatttggcaatctaccgaggagacttcgacctaaaactgacccaggaaaatttggtattcttttggtgatagtagtcatggaaaagacagaatttgagatattctgtaaaatgggtttaactttcccatatataatgggcttagcgcatactaagcactgtgtacattgtttcaatttttcttggtaacatcgttagagtccttatgtcttatactctgcatatgtgaaatttgttcaggattggcattaatgactcctttcttttttgtagattaagataatgagaagtaagcaagaaggaattctttatgtagatggggcttccaacagaaccatcagtcccaaaaaagccgacatcctggatgtcgtgggaatgctgtatgttggtgggttacccatcaactacactacccgaagaattggtccagtaaatatctgatttcttctttattacttaaatatatggctgattcatttattgatatattttgacttattaggtcacatgggcccatgaaaactgataggtgaataggaagtcatcttttctgataagggacagaagggtttgttgtttatttgtttgtttgtttgttttgagacagagtctcgctctgtcgcccaggctggagtgcagtggtgcgatcttggctcactgcaagctctccctcccgggttcacgccattctcctgcctcagcctccctagtagctgggactacaggtgcctaccaccacgcctggctaattttttgtacttttaatagagacggggtgtacttttaatagagacggggggtttcactgtgttagccaggatggtctcaatctcctgacctcatgatccgcctgcctcggcctcccaaagtgctgggattacaggcctgagccacctcgcccagctgacagaaggttttttagatagattagattatgagagacaatgccatggaacactgagtggggaacctggagccaaactgtcttggtttgaatacctatttaactattgactagctgtgtgttttggagcaagttaatctcttttaacaaagatttctcttttgcaaaacagggtaatgataatactaaacaaaaaggattgcataaagattaaatgaggtaatttatttaaagtgattgggttgggcgtggtggctcacacctgtaatcccagcactttgggaggccaaggcaggcagatcacttgagaccaggagttcaagatgagcctggccatcatagcaaaaccctgtctctacaaaaatacaaaaagttagccaggtgtggtggtgtgtgtctgtagtcccagctactttggaggctgaggcaagagaatcacttgaacccgagggtcagaggttgcagtgagctgtaatagcaccactgcattccagcctgggcaacagagcgagaccctgtctcaaaaaaataaataaataaataaataaaaataaaaataaagtgattggaagagtagcaggcatataaaaagcactgaaagatgaaaatgatggtatgtattcatggtgtttcaggcatagagatttagcaaatattgagaggtgcagtagttacagtacagttatccaattttggattcagaatttaaagccctcacagttttgtaaatcaatattcacaaaataattttttattagaccgtgtatcctagtttgctttggaaagtgttactctgagagaagcacgggggattgattggtgcttttagagaacacactagatacaaatgtgatacatttctatactcaaattagaacacatgataatgtagatttgttcattcatcaaagacaatcacccattatagttgtaattctcagtatttggcttctcttgtggatgatcagtattacttttctttcataggtattggatatgctttttaggtctatcaaaaactaaagtctctgaagtgacactggtacaagcaattcacttgaatttctaaaaacagataaaatataatggaccagagtgtgattgagttacttctaaattccttgaacccccaatgtttcatgcaaactttcaagttttatgcatatttgcattttcttaggggagggtctgctgctttcattagatattcaaaaggaagaagcactgaaccaaacctaattaccttttcaaatagaaattgaacataggctatgacaaaatgggtatatagtaaggttaataaactattaatagaaacataaaatcaggaacgtaagagaccaattaaaacttatgataccaacatggggcccatagctctgtcaaaccaatggagacatagtgtgcagtatttagactatgagaacagtcatattccaggatagacacatccaagttgagaagcacaacacaggattttctgcatccatgccaggaggcctggtggtaacagagaacccaggcagctttgggggatatcccatcctaagacaactggataactacacacatagagcaccctgcaaatgactgtattctacataaaggcaaagttctgctaaaacctgacatttgtttcttctgatctgaatgtttaggtgacctatagcattgatggctgcgtcaggaatctccacatggcagaggcccctgccgatctggaacaacccacctccagcttccatgttgggacatgttttgcaaatgctcagaggggaacatattttgacggaaccggttttgccaaagcaggtaaggctctttcatttccttcctgttgattattaactagatacaaatactaacttcttgctagtaccaaataataaaagttcctagagtcctaaactagtatcctttatttaagccaaaaagaaacttatggaagtaatttcaaaaatgcctcttaaaaattcatgtatctgatcctgataagaattaatagaagaaataaagtaaaaggtctatttagagaatttattccatctccttcactggaggttaagaacagcaaaataaataattttgcaagaacactcatatgtttatactatgttgtttttctaccttccagtttctggagatgagatatgatttttttcttcttttcaattccctgcaaggctgtatttcataatctcctccccatcaacacacacccatacacacaatgcacacccatgtctgtttcttgttgatagtgacaatgactggcatctttcctggctttctccactccgtttctaatgaacatttccagtatggttttatatcactggtcatgaaggtacagttaggaaaaagaaataggaaataacctctacataataattttttaatcctttaattttwttgtgggtacacagtgggtgtatatatttatgggtgacctgagatattttgatgtargcatgcaatgcataataatcatatcagggtaaatggggtatccatcacctcaaacatgtatcctttatgtttcaaacaatctgattatactcttttagttatttttaaatgtacaattatttttttttttttactgtagttacccttgtgctagcraatactaaatcttattcaaactatttttgtatcattaaccatccctactcctccctgccactaaccttcccaacctctggtaactatccttctactttctatctatctccatgagttgaattgctttaatttttagctcccacagataagtgagaacatgtgatgtttgcctttgtgtgcctggcttatttcacttaacataatgacctcaagaaccacccatgttgttgcagatgataggatctcattcttttttatggcttattcatatccagtatgtatatgtaccacactttctttatccgttcatctgctgatggacacttaggtggcttccaaatctattgtaactagtgctgcaataaaygtgggagtgcagatatctcttcaatattcttttgggtatatatctaagagtggaattgatggatcatatggtagctctatttttggtgttttgaggaacctccaaactgttctgcatagcagttgcactagtttacgttcccaccaacagtgtacaagggttctcttttctccacatcctcgtcagcatttgttattgcctgtcttttggataaaagccattttaacttgggtgagatgatagctcattgtagttttgatttgcatttctctgatgatcagtgatgttgagccccttttgatatacctgtttttcatctgaatatcttcttttgagaaatgtctatccaaatcttgtacccatttttaaatagkattattagatttttttcctatagaattgtttgaattccttttatattctggttattaatcccttctcagatgggtagtttgcaaatattttatcccattctgtgggttgtcacttcactttgttgattgtttactttgctgtgcagaagctttttaacttgatgtgatcccatttgtctatttttactttggttgcctgtgcttgtgggtattactcaggaagtctttgcccatttcaatgtcctggagaatttccccaatgttttattgtaatagtttcatagttggatctcttagattcaagtctctaatccactttgatttgatttttgtatatggcgagagatagggatctagtttcattcttccgcatatgaatatccagttttccctgcaccatttattgaagagactgtcctttccctaatgtatgttcttagaacctttatggaaaatgagttcactgtagatgtatggatttatttctggcttctctatcctgttccactggtctatgtgcctatttttatgccagtactatgccgtttggcttactatagttctgtggtataatttgaagtccggtaatgtaattcttccaattttgttccttttgcataggatagctgtggctattctgggtttcatatgaattttaggaattttttctatttctgtgaagaatctcattggtattttaatagggattatattaaatctgcagattgctctgggtagtatggacattttaacaatattgattcttccaatccattaacatggaatatcttatttttgtgccctcttgaatttcttgcatcattgttttatagtttttattgtactttcctctaagatctggaacacgacaaggatgcccactctcaccactgttattcaacatagtattggaagtcctagctagagcagtcagacaagagaaaaaagtaaacggcatccaaggaagaagtcaaattatccttgtttgcaaatgatatgattttgtatttggaaaagcctaaagaccccaccaaaaaaccattagaactgataaattcagtaaagctgcaggatacaaagtcaacatacaaaaatcagtaacatttctatatgccaacagcaaacaatcagaaaaagaaatcaagaaagtaattccatttacagtagctacaaataaaataaaatactaaggaattaaccaaataagtgaaaggtctctacaatgaaaactgcataataatttttaaaatctgcaattaatgtactttaagatagaatattcagtcccgtggtatcatagaaatacgtgtatgttcattagaaataaactaataagcacataatatgtggagattatgatgggaaacagaaataagtaacatagttctttctatcaagaatrtattatcaactggtaagaaattgaaagaaggcaagtaaaaatgattaaagacaaaaaaagcacagttctgtagatacttagaaaaaaagattaattttgtttgggggatatcaggaaacgtttcatggaggaatcagcatttgagcaargcttcaggtgattttaacactcccatacaaagtagtgggtgatagaagagtaggaccctccaccaaaatataggtaggaaaccccacctacagggaagcagaaaacagaaaaacacaggatatgttaaatattgaaacgttacaggttatgctgaaccccgaattccatgtgctatgaaagtctaaaagcttcccccaagatttctgcaaattcacagatggctggcattctcttagtcaaattttatgacaagtttcagcttcagcttttgcacttaatggattgacttgccatcctgcctgggctcttataattctggatcaaacaaaaccagaaaattactcacttcctctgtttctaatgtcccttgccatcccctgaacacacagtgtaatacaatttacataagacttgggtggtcagaagagatcacttcactggaaaacatacaattcatcttaacctttgacatctttgttcttaaaagttttccagcgacccaatcactggggcttttttttggcctcttcattccttctgtcctcagccgaacttcctcatgtcattcctctcttctccttacttctccctttctgttttattttgcagagcaattcagcttcttctaccctttactttattttttcgtttatttccagaaggggtgtcactatgttgcccaggcgcaactggctagcttttattcataaaatctgctataaacccacctttgccaatccaaacccatcaaggttctcagtagaacaaaagtctttcatgtaacagctaccatccttcattgcagacagccgtggctacacatagcatttatttcttgcctaataaatagaagacttggagaaaattcccctgagtatttctctgatactcagttcagttggtgtggtctagacagatcttaacatatcactttgttcctaagtgatgtatctatcttaaatacttgctcaaagattaaaaaaaaaaatcaaagagtcaaatatggaaaatcatagaggaaagaattaattaactggatgaacaagataagtctatttatgtcccagaagcttcccatcaacattgtacttacagtttctctctttattaataaaatgtgtggcaacttttgaamcctttcagatgattgtggcaccatttagtgtgccccactaaaactttactgaaaaataactgaaatgtttttctttacccaacagagagacttctaagataataatacctgacagtgagattctttaagtcaatctcagtgtgtatccatttattcaaataatacatagtaaaccctcatgttgtgccagatactttggtaagcacagggataaaatggtgaaaaatatagacaatgcccctgatctcatagcacatacattctaaaagggaaggtagcccagaaaataagcaataactaactatggagtgtgttacatgatgcagtggtggaagataggccaggcaggatctgaaacttatagccctcattagaattagctagcatttgaattgaaatataataaaaagtcatgcattgtacacgtttgaattaacaatccccatcctctaatccaaaatattttaaaatcttcattttacagttggtggattcaaagtgggattggaccttcttgtagaatttgaattccgcacaactacaacgactggagttcttctggggatcagtagtcaaaaaatggatggaatgggtattgaaatgattgatgaaaaggtgagtgtcagcaatgcaaacatttctgatttcttcatgatattgttgatgtgtagatatcatccatgtgtgggaaactcgaatattttgaagcccggctgtattctttgttgggagaaagctaaattgtatgttttcatccttctggattacttcaatttgtgtatgttttcagcatgttgtaggccagtataaattttaaatgcattaattgtacagcaagccaatcgtgttgactaataatgaaccaaatagtttgagatctcgagttcttactgtgttgctataaacacactcttattctcctcttaaggaacacacagtctatgagactatggactccagtgggagaaaaggcagagaggtggatcatctaaaattagtctgcctcttttaacaggctaggcatctcttagaagccaaggtagccaactgacgcatcagtttctcaatttgtttaaaaaagcatccagctaccatttcaaaaaacagcaaatttataaaagtagtgtgtcagtttgataataattgataatcaaattctaaacacctctttcagccctgcaktaagacaactttgcactayaggcagcaggtaaacagagaagggaaaacaagaaatttcacaagttttctatttggttattaaataggaatcgtacttcaactcagttcacgtttccacccttagtgttgcctcccaagaagaaaaatcacacagtgacctaaaatagttttttcttgctttcttcctctttctgctcaattttcaaactgtcctccaacaaaggtaatataggaaaaaagatccaccagcttagaggtaaaaaggagtgaacaaataagtaacactcaatagttttaccaaattttcaaacatacttttactacatctttttcaagtaacatgctcttaagggcagttaccatcgatatgtcactatcatgtgcgtttctcaccaagctccttttacatgcaaaagcctgttatgcaaactccacccaatatagtaaacatttcattaataattacatcaatagagtttacaaacttttcacctatttacttgcatttttaatctttcttcttaagacttcatttcttttcttttaccttgtcgaatgtcttgccaaactgactaatgtttttagtgtttcaatatgtttcgtttcttcaccagcttcaaaagaattctgtcatctcaaatttcaggggcttttccacattactaaaaacagatttttctcatttagaccagaacttctagtctaagttcttcattgttaggaatttaactggccttctggctcaggtctttggcacctgtgacatgaaacgggctccaaaatgtaatttatgtaactctcaatcttgtatataaaatgaaatccatgaaggaaaaaaatataattaaaacatcaaaagtttaaaatttaaaaaatcctttactttgaatttgtaaaccaaattaatgagtcactttaaacaatatcttttaagaaaattttataaggttcagtcagaactctcacattctaaaaagacgtgaggtagaatttttccctgtgtacactaggtccttttcttgtcacctggcctcaaatttttctgaaagcagaattattaccagctttacgtatcttgcctattaactcccaacaatgccccaaagcaaagagcataatttgtggctcctggtgattagatttatactttaatttgtcaagtttwaaaatttttttcaatatgcccagttacatccatttcaaatgattctggctgatgtctttcctagagacctgatcatttgtatgtgtgaaccatcatgatacttctttaatgaaaccatctgtgactgttctatttcctactttccagttgatgtttcatgtggacaatggtgcrggcagattcactgctgtctatgatgctggggttccagggcatttgtgtgatggacaatggcataaagtcrctgccaacaagatcaaacaccgcattgagctcacagtygatgggaaccaggtggaagcccaaagcccaaacccagcatctacatcagctgacacaaatgaccctgtgtttgttggaggcttcccaggtgagtgttggctaccccagcaacmatttctttgctctcttatrttactggttttgaaaacatttatatttacrtgtgtctaagaatgtgtgcttatgtgtacttgcttcctagctttagaatctgcttagaatctgcaccttacctaaaatttccagtgtgtaaaatgaacatattacttatataaaccacatgggactgaacttttcatgagagcccccaaagtttccttcgtggagagattgaagctggaggaaatgaatttggcttataaaagatatgaggcatttaacagcaattggagccaaacttggtgttctttctgatttttttaaaattaatataccagaggaatchtaaaatgttatggaacttatttcctcaagttctggaaatcattgggttaaacatagctaatttcccccttatgttattatagagtttatatttatattacaaagaaacgcaagcaataaatcctcattcagaatccttctctagcacattaaatatagcatgtgaactgtagagatttacctaaagtgcccataaacaagagtggccaacttgatgagaagtaagccaagtgccycttaataagtactgtaataacatagcctcctggaatggtctttcatcattttgtcaagaggaacttttatccctgtttatataaagctcctttgctaaatgaaacaagcaaaatgtatattcagcaattgttgacagagcaatgttgatagaaatgcaatgggggcccaacgacagctcctctttccaaagtggcttctgtgttttaaaaagatcttttgcttcaatcaggataaattccaagatattatgaaggaggtaatgtacttctccattcagtctatgataatgggatcctaattaacacctagtaggcctactgaaacaagcacctctataataagaggaagattctacatgaatatccaacctacttaacctttagggatttatttttacaatgtaagaaagtgataaagtcaccttcaaaaagttctaagtaagtcagtacttaaaagtatttgatcaattgctttgtttcatgaagtaacattttacaattttaagtcacaactataaatttgttcatcccaaaccaagttatttcatgtcttaagatgtataattctagatgttttcatatgttataactattaaaaagttgaggctggacatggtggctcatgcctgtwatcccaacactttggaattacactttgggcatagatggggagatctcttgagcccaggagttggagagcagcctgggcaacacggcgaagggaggatcgcttgagcccaggaggttgaggctgcagtaagccttgattgcgccattgcactccagcctgggcaacagagcaagaacctgtctcaaaaaattttaagttgatctttctttctttctctacaattctattagtaaggctaaaaacaaaaccactaactttgcataaaacagcattccaatttaatctcaagctaacagttgactttgaaacatgctcttaatatttggtgcaggacatttcaaagctgagccctcttgcattgcctttttcagatgacctcaagcagtttggcctaacaaccagtattccgttcygaggttgcatcagatccctgaagctcaccaaaggcacaggcaagccactggaggttaattttgccaaggccctggaactgaggggcgttcaacctgtatcatgcccagccaactaataaaaataagtgtaaccccaggaagagtctgtcaaaacaagtatatcaagtaaaacmaacaaatatattttacctatatatgttaattaaactaatttgtgcatgtacatagaattcyttctgtattcagatggtgctaattcagactccagactgaattttaattcaagttctttctcaagtctataaataatattaaactgattatttcattctaaataattgcctgttttgtgtgattttaaggataaaaggtaactggccataaattgttgagtttgcaacatgccctccagtcatctcaaggaaagagttcagatgtaatttatggaggcaattttttttaacttattcctatcaatacttcttctttcttttatcatcctttaccatgtatgacagctttggccttctgtccaagccactgacagcaagtgaatttggcatgtgtgattgggaggaaatcagttcccttactctatttatgaaagaattattagcaaatcattgtcctgacccaagttcattattagagagtttaactagccgtatgagtgaatagctttttatgctgaaggtagagggtatagaccagattcaggccagaaagcttaattacttgattttcttatttgataatgatttatgggctttggggagatgccaaaaccaagcttatgaatgacaaccaagcacacatttgatactacagtactaagaaagatttggggctctctaagcctacagtgaatatcacaatttacacctaggtggagaggaataatgctgaaatgcatttgtacttatcaggaaacaataaaccagaaacttaaaaggcatacttcattgagtcttttggagctgtaatttgacctaacaaattcattttctataaacgttctgtgttttgttctcctttaacccatgatttcagtcatcttcaaagagctctgtgagaagactggccttgattttattcaccagcttaaaaaggaaacgtttcatttgccatctttagtagacaatggttgcagtctaataattcagaacatgtaaaagaacaggaaactcctttctcctatggaaattttagcaacaaagaataatcctctctgacaatgttgttatccactaggggaaggaaggtgctgtttccaattgaggtgatggctgacatactcactatttcaccaccgtcctgttgcttaatacaatttgtacacacaactttattctacagaagcaattctcaagcttagctcagtgtttttaaaaaactgcctatgctttagaaaagtgcctagggagtttttaaaaatctagtacctggtccagtgattctgattttgtctaggacatagccagagcataatgattttttttttttttgagacagggtctcatgttgtcacccaggcaggagtgcaatggcaccatcttggctcactgcagcctcaacctccccagttcaagtgatcctcctgcctcactccccaagtagctgggactacaggtgggcaccaccacacccagctaatttttatatttttagtagagatgggtttcaccatgttgcccaggctggtctcgaactcctgagctcaagaaatctgcctgcctcagcctcccaaagtgctaggattactggcatgaaccactgtgcccagtcaagcatgaggattcttaaaaacattcccaggcaattctaatgtgttgtcaaggatgaacctaagaaaaataagcaatagggaaaggattccctatttaataaatggtgctgggaaaactggcaagccataagtagaaagctgaaactggatcccttccttacaccttatacaaaaattaattcaagatggattaaagacttaaacgttagacctaaaaccatacaaaccctagaagaaaacctaggcattaccattcaggacataggcatgggcaaggacttcatgtctaaaacaccaaaagcaatggcaacaaaagccaaaattgacaaatgggatctaattaaactaaagagcttctgcacagcaaaagaaactaccagcagagcgaacaggcaacctacagaatgggagaaaattttcgcaacctactcatctgacaaagggctaatatccagaatctacaatgaactcaaacaaatttacaagaaaaaaacaaccccatcaaaaagtgggcaaaggatatgaacagacacttctcagaaggagacatttatgcagccaaaagacacatgaaaaaatgctcatcatcactggccatcagagaaatgcaaatcaaaaccacaatgagataccatctcacaccagttagaatggcaatcattaaaaagtcaggaaacaacaggtgctggagaggatgtggagaaataggaacacttttacactgttggtgggactgtaaactagttcaaccattgtggaagtcagtgtggccattcctcagggatctagaactagaaataccatttgacccagccatcccattactgggtatatacccaaaggactataaatcatgctgctataaagacacatgcacatgtatgtttattgcggcactattcacaatagcaaagacttggaaccaacccaaatgtccaacaatgatagactggattaagcaaatgtggcacatatacaccatggaatagtatgcataaaaaatgaagagttcatgtcctttgtagggacatggatgaaactggaaatcatcattctcagtaaactatcgcaaggacaaaaaaccaaacaacgcatgttctcactcatagatgggaattgaacaatgagaacacatggacacaggaaggggaacatcacactctggggactgttttggggtggggggaggggggagggatagcattaggagatagatatacctaatgttaaatgatgagttaatgggtgcagcacaccagcatggcacatgtatacatatgtaactaaccggcacattgtgcacatgtacccttaaacttaaagtataataataataaaaaaaagaaaaaaaaaggatgagaagcactattctaaaaagaaacattatcctccatgccaacaaagagttttatagtcatttgagaattctactattagctttgtcttggcaatttccacacccattaaaaataataatattataggccaggtgcagtagttcacacctgtaatcccagcactttggtcgctcaggcaggaggatcagtggaacccaggagtttgagaccagcctgggcaacatagggagaccctgtctctaccaaaaatttaaaaattagccaggcatagtggcatgcacctatagtcctagctactccaggaggttgatgcaggaagattgcttgagcctgggaggtcaaagctccagtgagctgatgattataccactgcactccagcctgggcaacagagcaagaccctgtctcaaatgaaagaaatatctttttatatcaaatattgaatctagtgaatttaatatataaaacattgaatctagtgaatatcttttaaccaaactttaagaaataaaactttttgaaaaccaatgtgttttaaaagtggaaacatacatctgcactaaacgctgacatgactttttgggcttaatctggacactgagtgggataaacaggaataaagatgttgggttccttagattaaaagctaaagcctttctttcttgagtcctgcacagaaagatatgtaacaaaacggaaagcaaaggcagttaaattggcactcctatcagaataaagtcctgcctcagtcaatttgtaggtagatgccttagaatgatagaatgatagaactggaagtgaattgagatcagcgaatacagtgattctcaagtctagctagatgtttaaagtgctttgggtgcttaaaaaatctacatttgggctgggcacagcagctcacgcctgtaatcccaacactctgggaggccaaggcaggaggatcacttaagcccaggagtttgagaccagcctgagccacacagtgagaccttagctctaaaaaaaaaaaaaaaaaaaaaaaaaaaaaaaaaaaaaaaaaaattagcctggtgtgttggtggtgcatgcctgtgtggtcccgactatttgggaagctgaggtgggaggttcacttgagcagggtaggttaaggctgcagtgagccagtgatcgtgacactatgctacagcctgggcaacaaagcaatatcctgtctcaaaaaagaaaaaaaaaattgacatctgggtgtcaccccagcccaattaaactataatctctgggtagggcccaggcattggcattttttaaaaatccccacttgattcaaatgtgaaaccaagactgaaaacccctgggctcctgtcacctccacattttatggggaggaactagaaggaactcaaggatattttgataactgtgctcaaagtcccaccttagtaaagtttcccaatgtagtccagacagttgcatctggatccaagcagaattcactgaattaggtttggacaaaacttgtcccatgcaaaattcatactccagagtgacccatgaatttggataaccaaaaattgtccacattttaaggtcagaaataaggacattttggttgggcacggtggctcacgcctgtaatcccagcactttgggaggctgaagcaggtggaccacctgaggtcaggagttcaagaccagcctggccaacatggtgaaaccccatctctactaacaatacaaaaattaaccaggtgtggtggcaggcacctgtaatctcagctactcgggaggctgaggcaggagaatcgcttgaacccaagaggcggaggttgcagtgagccaagatcgtgccactgcactccagcctgggcgacagagtgacaatctgtctcaaaaataaataaataaataataaataaggacgttttatgaaagggaaaagtttcttctctagtattttttaattaatttctgacctcaaaaatcaaattagttcttatcccaaaacaagataaaatatttcctctacccaaccttgtcccctcaatgatttcctcacctcctgccacccacagcaattatgaagaaagcagaagacttttcacttattttccaaacacccactcctaccaggttgtcagccttcttctttaaaaaggtgctttgcactttagaagaaaaacatttgtgaggggacttttattgaagttaccatggtgaacaccactgactaaagaacagagcagatttcagccccaaagcaccagaacactggcagacacttaaggcttcaattagcgctttaaaaaaagtcatcactattttctcccactttgatttaacctattgtccccaactacagaactcttctaggtttcctacttaatgacagaggaaaagaggactttgacaaattgaaaatctcttgatgttatatgaattatttgctgaattattttgtgtataatataatctatgattaacatgaaaacaaaacacaatatcgtaatccatttttgcaaaccctgagtagtcttttttactaccacttgcaaagggtatgacttaactgctaatgccagtttttaatctcatttttaaagtcttttaatctcagttaaattaagagagatataaaaacatatgcacttttttcctttgctcaactgagattaatacatacctcacacccaaagtgaacctggagggaagcaatgccccaggctggaccctaagttccaacatgatttaggaatcttgtcatgcagggtggtggctcagactcattcttttggcctttgtgccagttacctaactgagcatgatgtttgtgccattattgatatgagggtgttatgggctgaactgtgtccccacaaaactcatgtgtcagagttcgaaaccccagtacttcaaaaagtgactctatttggagacaggacctttaaagaggtaattaaggtgaaatgaggtcacatggatgggctctgattcaatatgactgatgtaagaatttgagaagagattaggacacagataggcatagagagaaaaccacgtgaaggtgaagagagatgacggccatccacaagccaaagagagaagcctccagaagaaactgacctttccaacaccttgatctcatacttctagcctccggaattgtgaaaaaataaatctccattgtttatgccacccagtctgtgttgct

SEQ ID NO: 8760 - DNA, 81210 bp, Homo sapiens
  misc_feature (1)...(81210): n = A,T,C or G, or insertion/deletion polymorphism (see Tables 1-2)
gtcctgtttctttttctttctctcattttaatccttcttgagctttttcaaatgtgtcatgtttaaaagtggactcatcctttcttttcttttttttttgttcttctttctttttttttgagatgaagtttcgctcttgttgcccaggctggagtgcaatggcgcgatcttggctcaccacaacctccctgtcctgggttcaagatattctcctgcctcagcctcccaagtagctgggattacaggctaccagctaattttgtatttttagtagagatggggtttctccatgttggtcaggctggtctccaactcctgacctcaagtgatccgcctgcctcagcctcccaaagcgctgggattacaggcatgagccaccatgcccggcccatcctttcctttctaacccagttcctggttgtccccctgctgagtagacagcaccagccatggcctcagccaggcaccccactctccctcacagttcacattttcagtgagtgctaggctttctacttccttctctctaattcactcttcattttctccaaactcctgctatcccccaggaacagggaagcatcctctcttgctagattatagcaggagcctccctatctcctgagatcatccaggctgatcttgctaaatgttcaactctgttcctgtcttgcccctctttaaaccatatacttccatagaattaagcccaggttcttttgtcaattgttttcctttttattaattaattaattttttttttgagattgaatcttgctctgttgcgcaggctggagtgcaatggcgtgatctcggctatccacaacctctgcctcctgggttcaagtgattctcctgcctcagcctcctgagtagctgggaccatgggcacacaccaccatgcctggctaatttttgtatttttagtaaagacggggtttcagtgttggccaggctggtcttgaactcctgacctcgtgatctccccacctcagcctcccaaagtgctgggattacaggtgtgagccactgcacccagccttattattttttagagatggtgtcttgctgtgtctcccaggctggagcgcagtggtgcgatcatagcttacctcagcctcgaactcttgggctcatgcattcctcctgcttcagcctcctgagtagctgggaatacaggtgtgcaccaccacatctggtcaatttttaaattttttgtagagatggagtctcactatgttgtccattctggttttgaacttctggcctggaaccttccatcgatcctcccatctctgcaagcctagacatttaacatggtctagaaggcctccatgagctccatctcacctcttttttgctccttccgctccggacctttacaagttgtggccattccaaactcctttcacttctgattatctcatgttctctctcacctcyccgcccatgcaatgaggttcctccccaactagattcttattcctcttagattctcagagaagccttccctgaaagaagccgtctcccatctcccagattgggttaggctcctcctgtgtgctgacttcattgtctctctccaacattgcttagaacgctaagttgcaactttatgtctaattgattgctccactagtccataaaatctaggaggaaagggctgtatccttagcccttgacacatggccttgtacatcttaagtttgcatatgaaccgctttatttacctgggatattatcttacttaatccccaagacaaccctatacgttgtgcatgattattccaatggtcattactgttattttaaatagagatgggggctcactatgttgcccaggctggtcttaaactcctgggctcaggtgttcctcccaccttggcctcctaaagtgttaggattacaggcatcagccaccatgcctagtcgattatgccccttttaatggatgagcaaagagtcgaggttccactggttttccactgcagtgtctctgctgaaggattaaaaaaaaaaaaatcacagggctgtgctggactcctgggacttccagaggacaagtccctctcttcagtgaggctgacctacacagagccagccctccttcccctcccagccacagctgtgtgttggaaagctagaggcctgggcccctaataaagagcagacctcccaatctcctcgttccttccccctcccctcatatggtttttcaaattaaaagcaactaaaaccaaagacctaaggagcaggagagggcagaggcacaacaacatccctaaactgaggaagggggctctctagcgagggagggggtatccaaaagccagatccagagggttccagtcctaccagtctgtcccaggctctaaggagtgtatggcccaccgggctgggctggaccaggaaacaagctcttgtcctcaggtctgtaaacaggctgcgttgttaggaaccctctgcttctacttcctgaagagcaagccccccaaacccagaagagaggctgcaccttgagatccagccagcaaggtgggtgcggagtcctggggagggaactttcacctcaagctgcacagacccatctcgatctttttagagaattcctccttttccaggactagtgccgttctgaattctgagcgtgcaaagagactccttagagctagcttccgagcctcagctggggcagaccagaggccagggcgtctctctgtctgcggggaccccccacatctgtgcgtcacctccaccacctccgggcaaaggacccttcctcgctggacccagggaggcggctattccagatgcagccaagggttaaagggggtgggagaaggagcagttagcaccgttttcttttgcaaaccaccaaacgggcccttcattttcaaattgtgaagccagaaacatcccccgttcccttgccccgcccatcaccatttgaaaaaaagaattcacaagtttaaacgtgattttcacaactaacggctttgataactgttaaattcgtacggcttctagggcaaacggacctgaattcttcaaggaaagtagaattggcggtggagctggggggcagaggaggagaagacacaaaaagccaactcagtgggaagcgccctcaaagccaaaggtgtggcgctcggagctgtggccgccctcgcccgggagtcggggccaggagaacgggccctggaggcagggcagggcacggcgagattttgcttttgtttttagtgaccattttgatctggttgtaaaaagtttacgaggccttctttttgaaagtcagctaatcgactgcacctttttatacccttgccctcaatttcatgtcgcctgctggcctagacgcgcaaggcggaggacagaactgtcacagtccctacccttttctcccaacttctcggcccggctcaattcgggagttgggcctccttcctctcggctcgcagcctccccgactcccactttggggagaaaacccacattcttaaccccttgataatccctcaaggaaaaaacaaaacacccaaccccaagaggtgaaaattagaatccgggcgcgggttgagatcttgcgcaaaactggccaagcccagtgcatgtcgctcctctcctccgggtacataataggggggctggggcccttccccccccccccccacaaagggggcccagtggggaagcacaagaaagggggagaaaagacccgcacccccccctcaggagggcaaggtttctagccccctgcggctccgggaccacccaggacccggggcgtcgtgggaccgatctcgaaggatcttagaacgacactgggagagcgcggcaagaactagccccaccttcccccgacgccccggactgactgccgggcgcagacccgacttctcccgaaccagcctcggaccagccttagaaggcggaaaacaggattcaaacccgcctatgagcagtggtaggggcgggggctgtgggggcaggactcggcttaaggaaccaaccgcctcggttcgagggcctcctgtccggaggttgctcctgaccactgggtttattttgcttttgcagaggaggcagatgttgacctctcttctttgcacagtctctccgcaaaattttcccccaaccatttgctttcttgcgccaccccccaccggggcactatccctggagtcagctcctcaggcctttaaaccttccagaatgtcacacatggaaacctttagcaaatgtttgttaatgatcataacaaaggcatcattcaaattaggcaggtaattactaccagaaggacaactgggtgctcgcttgctcatccattgctttctgctttaaactcccgaggagtcgctgcctggagacactcccgcccggactgcttctcgggccccattaaacggctctgaaatgaactgtgaagttaccatttgtgggcggagagcgctggggccctgcggacggaagaccctggcttgaccggactaacagtgtcgccgaagcaaagcagcccctctgggtaggctgtctgtctcgcctcctaccctctggggcaactagcctaaaaacccggttctcaacttaacagcatgtggcccagcacccgcttttgccttttattccgcactctgatttttggggggatcgtttgttcccgctcattttctacaaacattacggtatcctgttagcattccgaacarggggctgttcatatatttgccttcaatgatttcctgaaggracatgtggaagtaatagcgagcggtgcagtcacccaagctgaagatgcacgagagcgggtcgcgtagaagaactgcggcaatgggacccccagcgcagccccaggcgccctgttttcgaggctgacatcccaagatcctgtcctggttaggcacagcaccgcgcccgttggagtacttctctgtgactctcccctgtccactgcactgtgtccaccctcctggtgaaggaggagacggctgttggacatgccagtcccaacctggccactttggccattttcagagtgcgtgtgttggggtggggttgagggagaaggatgaaggatgacccccaaccccaacaggagaattcaaaaatcagagagcgatgaaggtgaacgcgctcccctcccccgctgtcgctgggaagccccactctgcccaggtctggttcctggagcatcagcgccccctttccctcgccggcaggatcgtttcctcccgacactggcctctcgccttgggcgcaggrtttggggctcagctgtcaattccaaggaattcgtagggttcgacccacgcggcgggagggaacggagggagaatcaaaaggcatcctcccccacgacgcggaggcggtggtacgattcctcaaacgcccaagcttgagctttttttgtatgcgagatagaagccagggcaacctcgcccagataaccccgaaaacaaaggcacgaccagataagtgacttcaagggagtaaaggtcgttctatcggagaacgttccaaacctacacagaccctcttttctttgtaccgtatttcagaccacccagtcttgtacacacacacacaccacacaaaacaaaaacccatcattgtcatattggactcaacagtttgcccaatcctattaaataactagcaactatatagcccttcccctaaaagacccctagttcaaaacggcgcaaccgcttggagatttctcccgagggccctatttctcgttgggccgagtttgtagaagggacatttcttgattctagatttatattctctctgggtattaaatgcaattttgtatgttccttttcttcttttcaaagagaatacaaaactatagcagtctaagaaaataaccccaaaatggggaggcaaactcattctggaaatgatgggctgtttgtagtttcacaaaacctctttcccggcagagcaccaacacctcccccttccaccaccccccatcccatctggtctgcttctccccgccccccagttgttgtcgaagtctgggggttgggactggaccccctgattgcgtaagagcaaaaagcgaaggcgcaatctggacactgggagattcggagcgcagggagtttgagagaaacttttattttgaagagaccaaggttgagggggggcttatttcctgacagctatttacttagagcaaatgattagttttagaaggatggactataacattgaatcaattacaaaacgcggtttttgagcccattactgttggagctacagggagagaaacagaggaggagactgcaagagatcattggaggccgtgggcacgctctttactccatgtgtgggacattcattgcggaataacatcggaggagaaggtaagggaaaagaaaaaatgattttttgtttataagggaagtccctgatcagactctgggactggagaaagcgaagtaacttcaaactttgggcgacaagaaaaaaaaaaaggagctggattccagttgtgtgtccagagagtaatttttttttttcggaataaacttcacttggggacgggtgggagataaccatagagttagaaagtctaggtattttttttaaacacacattttccagacctatttttaaaaacaatgtttttctaacaaccctatggcctcccaaagaaattgtttaggcttacatttttgaggtttcttttgggagtgggggtggtgttcgtgaatactgggccgaacaccaaggaactgggggtggaggcagaggtgtttgccctcttcttggcagtgggtcctggaaggcgacaggttttaaatgagtgttttcattcctcgcctgcggtttggcgggacagcgctgcagcccatggtgtggagcgcggctgggggaccagggggaggtggggagaggggagcgtggaggggagcgtggaggggggcgcgcgaaggggttgcggggcgcaggaggcgggctgggctcggctggagaccggacctcggtgttggcctacagcacagggagccggccgaatgcgcgtgattactggacggcgctgctctgggagagagtcggggccagatttggcgcggcggtgaggcggctgcgggacaagcagaggcgcgcgggcgtgggcaagggtttggggcgctctggagcggtttgttgggtcagtgaggtgccagggagagcgggtgcctgccgggcagtgtgctcgggttgcacgccctakcgcgggggcgacagcggcggcgcgggcgggcggtctggaataatgacaaacacatttggccctgagtgaagaagtcgtcgtcgcctcgcattccagcaactgggatttgaggaatttcgaaccgcacaccaaggggccctcattgtgctccgtggcccccgcccccgcctgtcttcccgcgccccctcctcggtggaatcatttctgcattgcccgggggctctgctttcgctcagttctggccgcaggcaggaagagaggaaaggtctccaggaaggtgccgaacttcttgtgaggaagttagggacgacttggaactggggaaacttgtttgcaggtaagacagaaaggtgggaggtaaaccatattctccctccgggcacccgagccctggacaccccctacccggcacccttctccgcgcgggggtgcgtggcacttgccgtctgagctcgcccagcgctgctcggtcctctctagttggccttttttccattcctctccctgccggcttcagagccgtctgtgcgtacttctccttcctctgctgtctacccccatggaaaccagatttacacacgaaattaactccgcccggctgcgcccagggagcgggcggcgtccatttggcattgaatatgtgggatcagctgttctattccgggagggtgtcggccaggtcggagcgacgagtgtggcccaacccgagtacgttgccagagggagccaggagcctgggccgggccaggtgtgcgagagctgccgatggcctggcctcgcgtcttggtcgggaaggacttgctggcctggcaggctgtgcgttgtgcatccctcccgcagccagagcgccggtcccgcacttcgctccccgaattgtgctaagacctcaggatgtgcgcaaggagtgcctggaagaacttgccactcactccatctycctgggtgggaggcaagcatggatggggcccmtatcaggtccctaccgccccgcgtccgaaaagccgcgggctgggcggtgtgggaaatggctttttggctccgaggccaaattgctcaatgttttggaccgactcgcctcgccgcggtcgctcctgacaagaactagacagatttttggagcagggagcatccagggcaaacgcacgacagtcctccgcagtgcatctcaccggacaaacatccccggagccacaggaggggaggaaggggctctccgggcgtgcgcacctccccagccgccgcgctgtcycatccccgacccctaatctggtcaacctggaccccggcactgctgaattgcatcccctcttctccctttctcctcggcctcctcctttccacaaccctcaagatgaggaggccctgcctcgactccccgacaggcgcaaggccgaccagsctcgctttgacgccctggtcaggccctgcttcggagcttgcagttttgggttgacccaagtgcagctggacctcgttcacaagagtgaggggaagccaagaatgaacccgtcgttagcccccggtgccctggctcttgtttaaatccttagatcgagaaggacttgaaggagatcccaggctcccagctctgcgcccctgggccagtttcctctcgggacgcggactgaggagggatgcagggggaggggcattgggccgggctttccagctgcaaacacgtctggcgccgaggcgggcccattttgtgcctcctggggacggaccgtgggcggcgcgcagcggcgggacgcgttttggggacgtggtggccagcgccttcctgcagaccccacagggaagtactccctttgacctccggggagctgcgaccaggttatacgttgctggtggaaaagtgacaattctaggaaaagagctaaaagccggatcggtgaccgaaaggtgtgggtctcagggttccccgggtctaactcgccgggtccaaccgcagcatcagccttggggcggcagataatctttcggtctcgcctggggcgcaagatgcaggatcgggggcaaatggcttctcccaacttccccctaattcgggttctgccagatggttgtcgtttgctgaagtggctcggcggcatttccttttgttttaaactgatcaatgagcgaacctgggatgggctgaaaaagtagattgtaggagggaataatgggaaacccgacttggggcgcctccttccctgcctcctactgcagtttctcggcccccgcgaaaggggagcgacaagcgcgggtgggcgcggactcttgagggggcagaggcggctatggcgcgtgtcgggcaaggtggcaccagaaggcacttttgtgtgtgtgtgtgacaagagtctcgctctgtcgcccaggctgaagtgcagtggtgcgatctcggctcactgcaacctctgcctcccaggttcaagcgattctcctgcctcagcctcccgagtaactgggattacaggtgcccgccaccacgccaggctaatttttgtatttttagtasagacggggtttcaccatrttggccatgctggtctcgaactcctgacctcaggtgatccgcccacctcggcctcccaaagtgctgggatttacaggcgtaagccamcgcgcccggccaggaacggttcttaaatgccgagagggcgcatgctagctctcctcagcattcccggtgagccgctacccacggccgtgcggctctcgtgcccataggaggcgctggcgagckcctgtaaccctaaacccctcggcccctttccccccacccgcccggattctcttcccgctctcccccctctctccacacccgcccggccccctctcgggtctcagttgaaaacaatgcaaacgcagagcgtcgtgcctggggcgcagcggcctctgcagctctgaggttcagagcgcggcgcgcaggggcgcaggggcgcaggtccccggagcggctgggcatcgccgccaaccccgggacaaccaagccgccgaggacttggtggaggtgggagggagagcggaccgcgcagtgttcctctgggtcccggggtcagaagccggacagtggcgggggctggacagtccgagcgcagagcctcccgggcgaagtctgcgcgcagcactcccggctgcgctgtcggggaccaggagcctgggctgcgggcgagctagctggcgagccgggtaagattcgcggggctgtcgcgccctctagtgggctccggggacgcatcccgctttccccagccccgggcggtcggcgccgctatctcagtggagcgcagcgctggaaccccgggggcccggagcggaggctaatctgggtcacctttcccctcctccgggcagccagtggactcctcgcaggctctgtgtgggcccgggaggcgccgggtggacgagagggggccgaggtctctgggtttggattgagaatgggacgtccttgtaattcaatgtgggagaagcaggggagtgtggaggaggacgggtcccgtgcgttcttggggggcaggcgccgtcttctgcgttccagcccctcgccagctcccttgccccgcgggcggcctgttgctgtttgtttgttttacgaccctgcgttattgtgcaacggtaacagtcgtttccaatcagctgcgcggccgtcgcggccctcgccaggctggtttatgggggcggcggtggcgcgcggacagataggacagcgcggcccgggaacggcgtcgaggtccaggcggtccccctgccccgagggggcggaaatgctgaggtggcgagagcgtgggttgcacagaaccctagtagcgagtccggctgagcctctgcggcctagcccagcagcgtcgtcttcccggctccgaagacgtcttcccgaagccccgctgccccggcgcaccagctcccggtgatggggatgatgatggggatgatggggagatgtccccgaattctcctggggtcccgaggagatttagccattttcaacagcagttttcctatttctgcttaaaccccgcgggctttcaactgaggtcaccacgaaagctaaaagtacaacctaaggaaggaagagactggaaattaacatttggggtagtggagctcagaattcctcgcagcggcgtctgtgtcgcaacccgtggacgcacgtccttggaccaacactgccatctgctggccactcgtaagaactactgcgacccgctgtgagaatgggcttcgcggagaccattaggaaggtgctttattttttattttttatttattttttgctcagtaggaccgtaataggtgactgattttcttttgctgtgaggctacaagaattgctggaagacaacatttttatttcgtggaaatttgtgttgtgtttctccttggttgttaatgctttgcatttacatrgtgaacatcttattatcagagctggcctgtgaggagggtagtgggggggcattgatgttcccgtttctgagtgaggagacctatgtcggggccttggtgacctcaagccgaatgctcaaactgctactgctactcctaaggttgtgccattaggagtcacacccgtttggtgatattcaaaaggatatgtcattttattctcccgtggttaaatatatggtgagaggagagcaggcatgtttatgagcccagattgtcccataaaaggctcctgtttaaaaacactccagccccctcccattactggaatgtctgatggagctccgggagatcaaaacaacaaaacaggctctggtagggtgcagaggtcctggtaaacacaccctctgctggaaaacagggagaagtttccaccagtgtagacctgcacttggtttgcctgggctgaagttaggagactgcgtagaaaaaggaaaatgtgtaattttcacagttagaattaacttaggagagctgaaattaactgagcctcggaaatctgaatcttgaagtcaccagtggcttttggggctgtgagagagtctcctgtggtctttaatcatgtgagggtggggtgaaattcaatattcagtggttctgcaatgggatgcactgtgcaattggtgattgagaagccaactctctggctttaggagaagaatgtcttgctgttagtccttctggaaatagagccttgcattgcctactgtctgtttacactacctttgcacattgcctttggttatagagtcatgtccaatggctctttacttctgtttgcagggcaggagatggcaccctgttaaagagaaaggatagtagctgcaaagtcatttgtttctctgtttctgtgactgtatatattggctcatctttgaatggtctttatagccacaccaggctggaggtaacagggtcatgggagtggactgctggtgtgggctgaatcagagttcagatccatgtctccaggaggtaggaggtgcagggcaagtcatgtggcttctggggcatccctcactttcttagttaaggagaagttgaaggagccgatctaaaatatcttgggagtctgcagaaaaagtcgtgaaaatcaaagcactttcaattaaactatataatttagtccttacaagaatgccacagggcaagcaaccagtcaggccttggtagtcgtgcttcctagaagaaaagactgaggttcagagagttggatagagtatcagatttgggatcagtggctagtccaatgtgatttccatcctttcttctgagagaaagcataagaaggccaagaggatggtggaaaagcacaagtcacctgcctgagagtcaacagggcggggggtctctttctcagtttgttcctctaagttatggcaaatgttttttgagctgtgattattgagaatgggggctgaagttcaacatgtagttggcatgagggaagtaattatgattgaagaaaagatttgggtgaaatctagtgttcttccctgcaaagggggttgttctcacggattcttatggtgccatgtttctcagaatttgtagyttcagttacttatatttgcacacctgactttagatgagctccagaatagcagttactaattaaggatgagcatttagagtagataaaagtggcaggaacagcaagactcactcccagagagcctcactacaggwctaataggtgaggaaattccccatgtttcccatttttcttcattacctccctgtggggcaagcactgccattattcatgagtaaactgtctgagttatagataagtaatgacatgaaacttcacaaacacgctgagcacagtggctcacgcctgtaatcccagcactttgggaagccgacgygggtgaatcacgaggtcaggagttcgagatcagcctgaccaacatggtgaaaccctgtctgtactaaaaatacaagaaattagctggccatgatggtgggcacctgtaataccagctactcgggaggctgagacaggagaatcgcttgaacttgggaggcagaggttgcaatgagctgagatcatgccactgcactccagcccaggcggcagtgcaagactccatctaaaaaaagaaaaagaaagaaagaaaaaagaaaaaaagaaagttcacaaacaggcctgatttctacccagggaaccactgttatcagagattggggtttggaatcttaagcaacaaacacatgtttattctcttccttcctgatggcttgctcagaggacctgtttccattgcccactttttttttgagacagaatcttgctctgtcacccaggctggagtgcagtggcgagatcctggctcactgcaacctctgcctactgggttgaagccattctcctgcctcagcctcccgagtagctgggattataggtacctgccgccatgcctggctaattttttgtatttttagtagagatggggtttcatcatgtcggccaggatggtcttgaactcctgacctcaagtgatctgcccacctcagccttccaaagtgttgggattacagatgtgagccaccacgcccggcctcattggccactttatatgtcagtaaataatctttcctggcagagggtccactgtatctggaggcactgaaggaaatctgggagtgtctggccagggcaaagcactgcttagagcttgcacaggaaaagcagtgagcccttcttttaagctggagaaagctttaaagatgcatctttggcaagtcttgccaaagaaatatgggttctaaatgtgataaaaccaaagacatcaagctggctctggaggccttgtttgaagtttgctgagtggattgtcagtgggaggctgatatttatatgtacaaacacacaagcattactgctaattgtggtaaatcaggctggccagcctggctctggggcccactgtgcctgccaccgcagcagtgtggaagccttgcatcccaggcacatgtcaggatcctcggaggccatcagccagccagcattgtgtgaattgcatttgggttcacagcactgtaattgtgtttctcctgctgtggtgagcaaaggaggaaaatggaaggaggaggtataatttgccctaggaaatagtcaggcaagtaggtggcacacaggggtgggatatggctaaaacactgaccttcccttgagagagaccatatggtgaagtggagagggcatggcgtttgtatcacacgaccttgtgttcaaatcctggctctgtcactggctgtgtgactttgggtcatttgcaaaacctctctgagcctcaactgccacttcttaaaatcagctctaagtaatcacagggttattcttcacaaacacagcatgcacatgcaaactttggcttagtaaataatggtttctccttctcttactttgttttctacataccccactccccttcctgtgaggagccttccacctttttctctgtgttctcttcctctcccattttcctggtagcattcaataaaacagaaatctgatttctgcaaagtaggccaccttacggtagaaatacatgattaggccccaccaaaaactttgattaggctattatcttctggatcctggatcccctccaaccaaaccaaacccaactagggctaaacacagcaatatatgaatacattgaatttctctctcactctttcttttttttaaaccagtttactcaggaatcacatgcacacatattttagcttccaaagccaatgatggaacaaattgtgtcccattaggctcactccattgtatgagttagcatcagaggagttcataccagagtgacttcatcttgaatagggcctaggtaagaagaggatgagacctgctgggctgcattcccaggaggttacacatttgtagtcacaggagagaaaggagttggtataggagttgatagatacaggtcataaagaccccagtgataaaacaggttgcaggccaggtttggtggctcattcctgtaatcatagtactttgggaggccaaggcaggaagattgcttgagcccaggatttcaagatgagcctggacaacatagtgagaccttgtctctacaaacaataattttaaaaacatgagctgggcatgatggtgcaggcctatagtcccagctactggtctgaggggcagttgggtggcaggctgagatgggaggatggaggctgcggtgagctgagatcaggccactgcactccagcctgggtgatggaataagaccctgtctcaaaaatagataaataaataaataaataagccagcaaaaccagaatgcagtgaagaagctggccaaaacccaccaaaacgaagatggtgatgaaagtgacctctggtcatccctactgcttattacacactaattataatgcattagcatgttaaaagacactcccaccagtgccatggcagtttacaaatgccatagcaatgaccagagatactctatatggtctaaaaaggggaggaaccctcagtcctgggaattacctgtccctttcagggaaaactcatgaatcttctaccgcttgttgagcgtataatcaagaaataactataggtatactcactcaagcagccatgcagttgctgtgcccatggagtagccactcttttattcttttactttcttaatatatttgctgtcattttactcttttggcttgctcttgaattccttcctgcatgaagccaagaacctttgtgacctcccaggctgaaccccaattttgagttccaccctatgacatcttttctggtgaccaatgaagggacaatggtaacctcccgttgactttaaattaaaactgattggcactgtttgggcttcaccggtgggtgagtctctccttgcccagattcaacttgctaacatttttttctcttcaattttggctcctttgtccttcctaatgttcttcattttggacagatgggaaagtggctgtgaggcctctggcttagcagcctgatagcagcctcctgttgtctgggtgccccagatgggagcacgcctggctggccacatcttttgcaacccaccttgtcatcccttctctgggaccttttctctttagtttcttttttaaaaaaaattttaaattatttatttatttatttatttttagagatagcatctcgctgtgttgcccaggctggagtgcagtggcataatcatggctcactgaagcctggacctcactggctcaagtgatccttccacctcagcctcctgagtagctgggactataggcatgcaccaccacgcctggctaaattttgtattttttttgtagagacggggttttgccatgctgcctagactggtcttgaactcctgggctcaaatgatctgcctgcctcagcttcccaaggtactgggattataggtgtgagccactgcacctggcctctctttagtttttaatgactggctgtttgacttctctgctcttcaggctgaaattcttatttcatgtttgtagtctttgccttggctatttggcaactgtttaaggcaagacacttggttttgagagttctcccgttgtgttgaccctgggacaccagggtcattgttctgtagctccaattatgttaggtctcatgcttttgggtttcactattggccaccccccagatgctctggggtttttggcatttggtgtggggacccttgttagctgatactctgggcttttcggcatttggatgctccagggtgtttggcactgacattcccctctagcattgtgggttagagtcccacccaggggaaatcttggttttgccttttcttgttttctactctaaagttatcattttctataaaaacattttcttttcttattgtcactttgtttaatgctttgctccaggaggtgggaatttgcaggggaaaataattgggctctccctatacttagaaaaacttctgtgtctagtagagatccttgttagacaaagggacagtggtgagtcccagagaactcgtcactagggtgccttttaggcaattggagcaaattcaaattagcaaactaagtttggccatttggataagtcccagttttgtcagggaaataatttgggtccagctatcttttataaaatagtgcgtttgcgttcctacattatggctagagctcaaagataaaagctattggatctttgtttatgtgtgtgtataaatgtctagatgtgtttatgtgtatgtacatttattatgttatatattgtatctacagggtaccaaattggcttataaataaaagagtgctcataaaaagagtaaataagtccaagcatttctcaagctcatgtaacttaagtttactaaaatttagagttactaaaaattcatatataactctgtataaatgtgccaaagaagatatgctcttagtgaaaataaattctttttggccaattcagatgtcatttatatgtggggtttaaaatatgaatttcgaaagaaaataaaaacaagtagaaagaaataaaaaacaataagcagtggagagagatgtgaggaaagttatgaatatgaagacgtatttttggtaaggaatgttataaagaaattttatgagaaaggatcttatatgataaattcttgtcctaaggtagaatgactgattgtttagaaaagaaggaaatataggacaagtcagaaagtccaagcatgttgtagatgacctatgtaagtcacgataaagtttatacaagagaatttattaaaatttagatgtaattagccataactgaaaggaaawttatttatttatttatttatttatttatttatttatttatgatttattttgagaaggagttttgctsttgttgcccaggctggagtgcaatgtcatgatcttggttcactgcagcctccgcatcctgggttcaggcatttctcctgtctcagcctcctgagtagctaggattacaggcatgcaccaccacacctggctaattttgtatttttagtagagatggggtttcatcatgtttgtcaggctggtctcaaactcctgacctcagttgatccacccaccttggcctcccaaggtgctgggattacaggcatgagccacctcatgcacccagccaggaaatttatatataatactctatctaaattttggtgccctatgttaaaacaagtttttcttcaagtattggtttgctttcagtaagattgcaagaaatattgacttttaattctagaatctgtttcctttgaaggcctctcagatttatatcttttccttttcccttgaaaaggtatagcctttgcaagttcaaaactgacttccctagactccttttaggaaaagcaatacagtggttgtttcaggctgtggctcaatagctaagcctttgttctttcatggtggtggcctgggttcagttcctggcttagagaatgagaggtttccagtttgctacttctgggacttttgtcatttatttattctttttgtctccatcgacagcttctgattttctcacttgaatttttttttctgtgagctaccttaagggtaatgttggatcttgtaaaaattgcttgccatctctttggagatacctcttgtgtccatggttaagttataaccttggttaaggcctgttggtttcactagggaaaatacctttaaaaaaaggcttaaaagccagagatgttggctatttgtcctggctagagtctggtattaagggatttaaaaggattttttaaaggacctctatagttataagtcagcttaattaaaaatggatattccatagtcatatttatatatatatacacacacatatatatgtatgtatgtgtgtatatatatatatttaaaagacctgtatgatttttttcttcttggaacttatttttttgagagaaagtgttttgtgtgtttgttgtttgtttttcttctcagtggactgaattatttctccattctgtctttttaccccctttaatgaccatattagaggacctaagataatttctgacagcctgggactccttgggaggaaacagaaggtgccacagacctcgttttgggagaaacctctgttttcctcatggaaccccaagagctgtaagcagagagttctccctcagaatccaaggctctgctctgtttacgtcacattacctgacctttgtgacttttgggggcatcagaaattactttgcattatgagggaacctttagcattggtgtgtattacctaggtaggatgtgtacttttagggattgcagttgcttacatgagtggttattactacagaccaatacttctttcttctcacatttaaatgaaaaaaaagcatgctcttgggcatccacctatgaatggaggatgggctgatttgctttaggttggccaccagcctttggggaacatcgttgcagtgaaatgcttggtgaaagcattgcactgtctgatcgcatagtgcacttctatgcacttctgcctgatgtcctaggctcaacacctgctacataattaagatcacttacttatcaggtttttaatcaaaatgaaatgttgctaagagttaacattatagcatatgtaattgagattactggagaaagttttacctacaagatatgtaaggaaagcaaaatgtgtttttggtaaaagattataggaaggtgtgccagtatagttttttattttgcttactttaatgggttaaaggattgttttaagtttgataggagaaagctgaagcatgagcaagttgtggaaggtatatgaaagattaacattttaaaagaaattctgtgtgtaaacattggctaaagttaaaggaggaggttggagccaagatggctgaataggaacagctccggtctacagctcccagcatcagcgatgcagaagatgggtgatttctgcatttccatctgaggtatcaggttcctatcactagggagtgccagacagtgggcgcaggacagtgggtgcagcgcaccgtgcgcgaaccgaagcagggcaagccattgcctcactcggaaagtgcaaggagtcagggagttccctttcctagtcaaagaaaggggtgacagacggcacctggaaaatcgggtcactcccaccccaatactgcgcttttccgacgggcttaaaaaaaggcacaccaggagattatatcccgcacatggctcagagggtcctacgcccacagagtctcgctgattgctagcacagcagcctgagatcaaactgcaaggcagcagcgaggctgggggaggggtgcccaccattgcccaggcttgcttaggtaaacaaagcggctgggaagctcgaacagggtggagcccaccacagctcaaggaggcctgcctgcctctgtaggctccatctctgggggtagggcacagacaaacaaaaagacagcagtaacctctgcagacttaaatgtccctgtctgacagctttgaagagagcagtgattctcccagcacacagctggagatctgagaacgggcagactgcctcctcaagtgggtccctgacccctgacccctgagcagcctaactgggaggcaccccctagtaggggcagactgacacctcacacagccgggtactcctctgagacaaaacttccagaggaatgatcagacagcagcatttgcggttcacgaaaatctgctgttctgccgccactgctgctggtacccaggcaaacagggtctggagtggacctttagcaaactccaacagacctgcagctgaggatcctgtctgttagaaggaaaactaacaaacagaaaggacatccacaccaaaaacccatctgtacatcaccatcatcaaagaccgaaagtagataaaaccacaaagatggggaaaaaacagagcagaaaaactggaaactctgaaaagcagagcgcctctcctcctccagaggaacgcagctcctcaccagcaatggaacaaagctggacggagaatgactttgacgagttgagagaagaaggcttcagacgatcaaactactccgagctacaggaggaaattcaaaccaaaggcaaagaagttgaaaactttgaaaaaactttagacgaatctataactagaataaccaatacagagaagtgcttaaaggagcagatggagctgaaagccaaggctcaagaactacatgaagaatgcagaagccttaggagctgatgcgatcaactggaagaaagggtatcagtgatggaagatgaaatgaatgaaatgaaatgagaagggaagtttaaagaaaaaagaataaaaagaaacgaacaaagcctccaagaaatatgggactatgtgaaaagaccaaatctacgtctgattggtgtacctgaaagtgacggggagaatggaaccaagttggaaaacactctgcaggatattatccaggagaacctccccaatctagcaaggcaggccaacattcagattcaggaaatacagagaacgccacaaagatactcctcgagaagagcaactccaagacacataattgtcagattcaccaaagttgaaggaaaaaatgttaagggcagccagagagtaaggtcaggttacccacaaagggaagcccatcagactaacagtggatctctcagcagaaactctacaagccagaagagagtgggggccaatattcaacattcttaaagaaaagaattttcaacccagaatttcatatccagccaaactaagcttcataagtgaaggagaaataaaatactttacagacaagcaaatgctgagagattctgtcaccaccaggcctgccctaaaagagctcctgaaggaagcactaaacatggaaaggaacaaccggtaccagccactgcaaaatcatgccaaattgtaaagaccattgaggctaggaagaaactgcatcaactaacgagcaaaataaccagctaacatcataatgacaggatcaaattcacacataacaatattaactttaaatgtaaatggactaaatgcttcaatcaaaagacacagactggcaaattggataaagagtcaagacccatcagtgtgctgtattcaggaaacccatctcacgtgcagagacacacataggctcaaaataaaaggatggaggaagatctaccaagcaaatggaaaacaaaaaaaggcaggggttgcaatcctagtctctgataaaacagactttaaaccaacaaagatcaaaagagacaaagaaggccattacataatggtaaagggatcaattcaacaggaagagctaactatcctaaatatatatgcacccaacaatacaggagcacccagattcataaagcaagtcctgagtgacctacaaagagacttagactcccacacaataataattggagactttaacaccccactgtcaatattagacagatcaacgagacaaaaagttaacaaagatagccaggaattgaactcagctctgcaccaagcggacctaatagacatctacagaactctccaccccaaatcaacagaatatacatgtttttcagcaccacaccacacctatcccaaaattgaccacatagttggaagtaaagcactcctcagcaaatgtaaaagaacagaaattataacaaactgtctctcagaccacagtgcaatcaaaccagaactcaggattaagaaactcactgaaaactgctcaactacatggaaactgaacaacctgctcctgaatgactactgggtacataacgaaatgaaggcagaaataaagatgttctttgaaccgacgagaacaaagacacaacataccagaatctctgggacacattcaaagcagtgtgtagagggaaatttatagcactaaatgcccacaagagaaagcaggaaagatccaaaattgtcaccctaacatcacaattaaaagaactagaaaagcaagagcaaacacattcaaaagctagcagaaggcaagaaataactaaaatcagagcagaactgaaggaaatagagacacaaaaaacccttcaaaaaattaatgaatccaggagctggttttttgaaaggatcaacaaaattgatagactgctagcaagactaataaagaagaaaagagagaagaatcaaatagacgcaaaaaaaaaaatgataaaggggatatcaccaccgatcccacagaaatgcaaactaccatcagagaataccacaaacacctctatgcaaataaactagaaaatctagaagaagtggataaattcctcgacacatacaccctcccaagactaaaccaggaagaagttgattctctgaatagaccaataacaggctctgaaattgtggcaataatcagtagcttaccaaccaaaaagagtccaggaccagatggattcacagccgaattctaccagaggtacaaggaggaactggtaccattccttctgaaactattccaatcaatagaaaaagagggaatcctccctaactcattttatgagggcagcatcatcctgataccaaagccaggcagagacacaaccaaaaaagagaattttagaccaatatccttggtgaacattgatgcaaaaatcctcaataaaatactggcaaacagaatccagcagcacatcaaaaagcttatccaccatgatcaagttggcttcatgcctgggatgcaaggctggttcaatatacccaaatcaataaatgtaatccagcatgtaaacagaaccaaagacaaaaaccacatgattatctcaatagatgcagaaaaggcctttgacaaaattcaacaacccttcatgctaaaaactctcaataaattaggtatgtaaatgggacgtatctcaaaataataagagctatctatgacaaacccacagccaatatcatactgaatgggcaaaaactggaagcattccctttgaaaactggcacaagacagggatgcgctctctcaccactcctattcaacatagtgttggacgttctggccagggcaattaggcaggagaaggaaataaagagtattcagttaggaaaagaggaagtcaaattgtccctgtttgcggatgacatgattgtatatctagaaaaccccattgtctcagcccaaaatctcctgaagctgataagcaacttcagcaaagtctcaggatacaaaatcaatgtacaaaaatcacaagcattcttatacaccaataacagacaaacagccaaatcgtgagtgaactcccattcacaattgcttcaaagagaataaaatacctaggaatccaacttacaagggacgtgaaggacctcttcaagaactacaaaccactgctcaatgaaataaaagaggatacaaacaaatggaagaccattccatgctcatgtgtaggaagaatcaatatcatgaaaatggccatactgcctaaagtaatttatagattcaatgccatccccatcaagctaccaatgactttcttcacagaattggaaaaaactactttaaagttcatgtggaaccaaaaaagagcccgcatcgccaagtcagtcctaagccaaaagaacaaagctggaggcatcacgctacctgacttcaaactatactacaaagctacagtaaccaaaacagcatggtactggtaccaaaacagagatatagatcaatggaacagaacagaaccctcagaaataacgccgcatatctacaactatctgatctttgacaaacctgagaaaaacaagcaatggggaaaggattctttatttaataaatggtgctgggaaaactggctagccatatgtagaaagctgaaactggatcccttccttacaccttatacaaaaattaattcaagatggattaaagacttaaacgttagacctaaaaccataaaaaccctagaagaaaacctaggcattaccattcaggacatagggcatgggcaaggacttcatgtctaaaacaccaaaagcaatggcaacaaaagccaaaattgacaaatgggatctaattaaactaaagagcttctgcacagtgaaagaaactaccatcagagtgaataggcaacctamaaaatgggagaaaatttttgcaacctactcatctgacaaagggctaatatccagactctacaatgaactttaacaaatttacaggaaaaaaacaaacaaccccatcaaaaagtgggcaaaggacatgaacagacacttctcaaaagaagacatttaagcagccaaaaaaacacatgaaaaaatgctcaccatcactggccatcagagaaatgcaaatcaaaaccacaatgagatagcatctcacaccagttagaatggcaatcattaaaaagtcaggaaacaacaggtgctggagaggatgtggagaaataggaacacttttacactgttggtgtaaaagtgttggtgggactgtaaactagttcaacccttgtgggactgtaaactatttggttggtgggactgtaaactagttcaacccttgtggaagtcagtgtggtgattcctcagggatctagaactagaaataccatttgacccagcaatcccattactgggtatatacccgaaggattataaatcatgctgctataaagacacatgcacacgtatgtttattgcggcactattcacaatagcaaagacttggaaccaacccaaatatccaacgatgatagactggattaagaaaatgtggcacatatacaccatggaatagtatgcagccataaaaaatgatgagttcaggtcctttgtagggacatggatgaaattggaaatcatcattctcagtaaactatcgcaagaagaaaaaaccaaatgccgcatattctcactcataggtgggaattgaacaatgagaacaacacggacacaggaaggggaacatcacactctggggactgttgtggggtgggggtagtggggagggatasctttaggagatatacctcrtgctaaatgacgagttaatgggtgcagcacaccagcatggcacatgtatacatatgtaactaacctgcacattgtgcgcatgtaccctaaaacttaaagtataataataataaaataaaaaaatttttaaaaaataaagttaaagggatattattattattatttttgtaagttaaacattaggattaaaaagcacaacagagttttctagagcactgatctactctgtaacagaaaattgtaaagggtttaaaaggtttatgagaatcttaccttatggtcaaactggttaagattgggaagatttgtctataaagttttattaagaattgggtttgacattaatactacactaatgcaaacgtgaaatgtggctttctctcttgaataagattttcatgtattattacaagataatgaaagatttttatttgctttttaaataaactataggaaaaataagggagagaaaagtgacagatcatttggaaacccaagtctcccctatatcaatgagtaaaagtttttacctttttgaaatctttgagttatcattttggctaaataaatgctttatggtgacctgggattctattttgtaatatcaactgtttaaaccttttgtatttgacaaacgttccaaactgaaattctaatgtaagtctttttctgacctgattagtccttctagatattaggtcccctaaagtccaaaagtgacatatttggcttattagatatattaaaatcatacaggaagcactttcaaatataaaatgctatttggctttctttggactatacttatataaatgtgttattggtatatgttccaaaattatgcaaaactcctataattctgatatgacttagtgtacattatcagtcataattatagttcttatgttacattattgtgtgctacagagttaaccaaatttctttgtcaattgcatctttaatcagctgtcctaagacttttgtcacccacagacaattgtcttgttttaatccttttcaaaaggtggtttataatcagctataggactctgatgggtactctaaaatgcaagcctctgataactttgaaaattgtgccattggctgggcatgatggctcacaactgtaatcccagcactttgggaggctgaggcaggcagatcacgtggggtcaggagttcaagactagcttggccagcatggtgaaatgccatctctactaaaaatacaaaaatcagtcaggcatggtggcatgcacctgtaatcccagttactcgggaggctgaggcaggagaatcacttgaacctgggaggcagaggttgcagtgagctgagatcgcaccattgcattccagcctgggcaacaagagggaaactccgtctcaaaaaaaaaaaaaaaaaaaaattgaaaaagaatattgtgccattgaaacagaaaagaaaacacaaataaacttccaggattctcatagaaacttaatatattcataaggaatgtggcccaatatcaggcaaaacaagagttaacagcatggactaaactaataaaagaccaaaacaatcttttartgactttttgcttaaaacattgcatatcctttctgttttgcttttcagagtcaagaaaacttttcctttggaaagtatttactgcttttaacaattgaaaaaagtatactactatggacaaaatttggagcatatgtctttctttttacctgatttctccagaatttgaaaactatttgggagtattcttaactaatagcaatatagttatttgyctaagtgcagtaagaatcttttcttttgtaataggacacaattaaagaaactgcttattttatgaaggctttgactagaatggtgtgctttcagatacaaacagactgctttaagggatcaaagttgacttatagagccaataaaagccactatggaaaactggccttattctttgtctatgcagtctctgtatggggttcctgacctgtggtaagtgaagaatgtcactttctgacaggcccaggagccccaagttatcttgggacatcaagaagaaaggaatgcacccaacttatacaggtatttgcaggcacagataaatctgtggctggctcaaggctttaagaagcctaatgtgagattctttttaaattaaatttccatcgaaaccaattttaacaagagcctatgtggcaaataattatttttgctgcactttatacaaataatcaggccaaatttcataagattaaaactttatggcaaacaaatttgtcccactatgatttgtctttggtaaaaatggaagctagagagagaatttgtttcaaaaactatgatayaccagttattagattctagtctcgtctgttgtttttgagtttcttctgcaatttaggcagaccctgcttattcctgagaatcaaccagtgatctatggctgttgctcagaagaaataagagggatggctaacgtaaagatctggattagtattctaattctaggcatgtattagaattggctagtgaccccatatcagcttggttttaacaattacccagttcatggaaagccttcttatttagtttacttgggataattgtgctgattttgttttactgttgtggaatatattgctgttgtcctctttgtgtaggaatgcaggaaaagcttacttaacattttcttaaattgaacacttattaatcttccagatttcaccttttgtcagaactcagagttatgatttgtcctcactgtactgacaacaggctctggtagggtgcagaggtcctggtaaacacaccctctgctggaaaacagggagaagtttccatcagtgtaagcctgcacttgggttgtctgggctgaagttaggagactgagtagaacatttgctgcagaaaaaaaagaagatgtgtaattttcacagttagaattaacttaggagagctgaaattaactgagcctcggaaatctgaatcttgaagtcaccagtggcttttgggactgtgagagagtctcttgtggtctttaatcatgtgagggtggggtgaaattcaatattcagtggttctgcaatgggatgcactgtgcaattggtgattgagaagccaactctctggctttaggagaagaatgtcttgctgttagtccttctggaaatagagccttgcattgcctactgtctgtttacactacctttgcacattgcctttggttatagagtcatgtccaatggctctttacttctgtttgcagggcaggagatggcaccctgttaaagagaaaggatagtagctgcaaagtcatttgtttctctgtttctgtgactgtatatattggctcatctttgaatggtctttatagccacaccaggctggaggtaacagggtcatgggagtggactgctggtgtgggctaaatcagagttcagatccatgtctccaagaggtaggaagtgcagggcaagttatgtggcttctggggcatccctcactttcttagttaaagagaagttgaagtaatcattctgaaatattatgggagtctgcagaaaaagtaatgaaaaccaaagcactttccattaatctccataatttagtccttacgataatgtcacagggcaagcaaccaatcagaccttactagtcgtgcttcctagaagagactgaggttcagagatttggacagagtgtcagatatgggatcagtggctagtccaatgtgatttccatcctttcttctgagagaaagcataagaaggctaagaggatgggggtaaagcacaagtcacctgcctgagagtcaacagagcaggggtctctttctcagtttgtttctctaagttatggcaaaagctttttgagctgtgattattgagaatgggggctgaagttcaacacatagttggcatgagagaagtaattatgattgaagaaatctagatgaaatccattgttcttttctgtaaaggggttgttatccctgattctttttttcttttttcttttttagatggagccttgctctgttgcccaggctggagtgcagtggtgtgatcttggctcactgcaacctctgcctcctgggttcaagtgattctcatgcctcagcctttccagtagctggaactacaggagtgtgccaccatgcccggctaatgtttttatttttagtagaggtggagtttcaccatgttggccaggctggtcttgaactcctgacctcaagtgattcacccaccttggcctcccaaagtgctggaattacaggagtgagccattgtgcctggcctgttctcactgattcttatagtgccatgtttctcagaatttgtggcttcaattacttatatttgtgcacctgacttttaggtgagctccagaatagcattactaattaagaatgagcatttagagtagaaaaagtgacaggaacagcaagactcacttccagaaagcctcactacaggtctaataggtgaggaaagtccccatctttcccatttttcttcattacctccctgtggggcaagcactgccattatgcatgagtaaactgtctgagttatagataagtaatgacatgaaacttcacaaacaggcctagatttctacccagggaaccgctgttatcagagaagggagtttggaatcttaagcaacaaacacatgttgattctcagtatttgcctcctgatggcttgctcagagagcctgttttcattgcccactttatatgtcagtaaataatcttccctggcagtgggtccaccatgtctggatgcacacrgggaaatctggtggggtctggccagkgaaaaacactcctcaggttttgcaggaaaagcagtgaacccttcttttaagctcgagaatgctttaaagatgcatcattggcaagccttgccaaagaaatacgggatctaaatgtgataaaagccacgacgacatcaagctggctctggaggtctcctttgaagtttgctgagtggattgtcagtgggaggctgatatttacatgtagaagcacacaagtgttactgctaattgtggtaaatcaggctggccagcctggctctggatcccactgtgcctaacaccagccctgcatcccaggcacatgccgggctcctcagaagcgatcagccagccagcattgtgtgaattgcatttgggttcacagcactgtaattgtccttctcctgctatgaggagcagagagggaaaagggaagggagggttgtgtaatttgccctaggaaattgtgggggagggacaggcactgggccgggtggggggcggtgcgacatggctaaaacactgaccttcccttgagagagaccatatggtgaagtggagagggcacagcttttgcatcacacaggccttgtattagaattttggctctgacaccagctgtgtgaccttgggtcatttgcgaaacctctctgagcctcaactgccccttcttaaaatcagctctaagtaaccacagggttattcttcagaaacacagcatgcacatgcaaactttggcttagtaaataatgatttctttttgttctatctactccacctccctttcccattagaagcttgctacctttcactctgtgttttcttcctctcccattttcctggtggcattcaataaagcagaattctgatttctgcaatgtaggccaccttagagcaaaatacatgatcaggcaccaccaaattaggctattatctactggatcctgtttaaccaacccaaacccaactcaggctaaatacaggaatacaagaaaacgctgaatttctcccctttctttttttttttttttttgagacagagtcttgctctgtcacccaggctggagtgcagtggcgcgatcttggctcactgcaagctccacctcctgggttcacgccattctcctgcctcagcctcctgagtagcggggactacaggtgcctgccaccacgcccggctaattttttgtatttttagtagagacagggtttcaccgtgttagccaggatggtctccatctcctgatctcatgatctgcccgcctcagcctcccaaagtgctgggattacaggcgtgagccactgcgcccttccctccttttttttttaaaacaacaacaacaacaacaacaaacagtttattcagtaattatgtatacgtattttagcttccaaagtcagtgatggaacaaattgagtcctattaggcccactccattgcatgagttagcatcagaggaggtcaaactagagtgacttcatcttgaatatgggctaggtaagaagaggatgaggcctgctgggctgcattcccaggaggttaggcatttgtagtcacaggatgagataggagttgggtaggaatggtttcataaagaccacaggatgcaagctgggtgtggtgccttatgcctgtaatcccagtactttgggaggccaacgcaggaggattgcttaatcctaggagttcaagaccagcttgggcaacatagtgagacctcatctctacagataatttttattttattttattttatttttttgtgatggagtcttgctctgccgcccaggctggcgtgcagtggcatgaccttggctcactgcaacttctacctcaggggttcaagcgattctcctgtctcagcctcctgagtagctggaattagaggcgcacaccaccacgcctggctaatttttttgtgtttttagtagagatggggtttcaccatgttggccaggctggtctcgaactcctgacctcaggtgatccacctgccttggcctcccaaagtgctgcgattacaggcatgaaccaccgtgcccagcctctacaaataattttttttttttttgaaatggaatctcagtctgtcgcccacactggagtgcaatggtgcgatctcagctcactgcagcctctgcctccctggttcaagcgatttgccttacaaatgatttttaaaaaatgagctgggtgtggtggtttcacaagatacgggtgataaagaccccaggatgcgggccgggtgtggtggtttatgcctgtaatcccagcactttgggaggccaaggcaggaggattgcttaagcctaggagttcaagactagcctggacaacatagtgagacctcatctctacaaataattttttaaaaatgagctgagtgtggtggtgcaggcctgtagtcccagctcttgggctaggcatgggggtcagctcaggtgggaggattgcttgagcccaggagttcaaggatacagtgaactatgattgtgccagtacactccagcctgggcaacagtgcaagaccctgtttcataaacaaattaaaaaaccccaaaaacctaggatgcaatgaagaaggaagccgaaacccaccaaaaccaagacggtgatgaaagtgacctctggtcatcctcactacccattatatgctaattataatgcattagcatgctaaaagataccaccagcaccatgacagtttacaaatgttgtattaatgacaggaagttaccctatatggtggaaaaaggaaggaaccttcagttctgggaatttcctccctgtttctgggaaaatcatgaataatgcacccttagtttagcatataatcaagaaataaccataagtatactcagttaagcagcgtggctgttctgcctatggagtagccacccttttttattcctttattttcttaataaatttgcttgaattccttcctgggtaaagccaagaacccatgtggcctcccatggtgatctccaattttgggattcaccatgtgacattaggagcaacttagggatctggtgcatcccaggccaagactaacatggtgatttttggggggttatgttaaaactgggggctctgcccaggcccctcagtgtggcttcttgagtcaatacctgggtacttactggccctagcacctacaagttcattcacagttccttctcactgacttcaccagtgaccactatcagtgacttcaagggagaaatgaggggggagataaaataaagtgaatggggaagagataaagaagagaggtcttttcacagtttgccagaatagtcccttcagtggttttaccccagggcaacaggagcccccttttagtttctttctcttttaattttcttttcccttcccactttttgcccactttttgccttatttgtgtctgactcaatttccgtctctttctctacttcttcattcccagatttggctgtagaaaattagaaagttcttgaacttggtttgcacgggtgcttttactttaacatgaaaatgaatgatcagcctccttctaatttcatcctagagtctactgcatccctcctaccccctgcacaggaatttagtcacacttatctctcccactttctctcccttcttcactttctctattgctcctcctttcatgcttgtacctgcttttccatgccctgtttagcctggcttgggatccagcaggttctccaagggttyctgcaagaaccccggctgggtgcccaggtctgagcctggtatgtgcctcagtatcacaaaggcctcctgtaaatgacayacattgttggaagtttcagaaattctaggtcaaaatggcactgaaatattaaggtatttaccccaacccaagcaacttttctaaaagttgtagagagtgtgacctctttattaattgaaacgtgaaaatcrgctctagtttggaagctgagaaaaaatatatatatatgtatttatttctttgttgtttgaattcttaatataaatggtttaaaggaccattgaaaactgcatgcaatcacagaaggttttggcttcaggcagctcccgccatgatcttggggccccattgattctttcatctttcrggcgtcttactgtttgaaccttgaattttaacctgggacatgtttgactaaaatgatgckgttmatrttttctgttgtgcaaaacacaaagagaactaggctycagggttgtttctatttgctaatgctgtttctgttgacttttgacttttctagtttcccagagctatggggacttcccatccggcgttcctggtcttaggctgtcttctcacaggtacggagcccagtcctctctgagttccttgtttgggtgtcttgtttttttaagctttgtgctgcatgggtttwttaccagtactctgcatacacagtccaaragagtgaaaagaaatagaaaactataggacgttatccagaatgaccacaaaccttcagttccctttgctgtattgcacttactccatttcaaaaggaatgctctccagtggcagttttagtacatatataatgttggcattgaaatgttgttagtaataatgtctaaatttacttactactctcttccttttcctaggacaaggcttctattagagctggattagataaattcaggaatggtcagctgtgggaggtggcacatctgttgtcccagccccttgagcagctgaggtgggatgatcccttaaggccaggagttcaaggttgcagtgcactgtgattatgcctgtgactagccaccacactccagcaacatagcaagacctcatttaaaaaaaatgttcaaaggaaataaataatagaaaattcttgcccaagaaatcatacttgtcttaaatcataactctcttgaggaaagatgcttacattgcttctaaatctcagagtcacctttatcttctctaggaatcaaattgatagatgaatgtttggctcttggaaaatcttaaaaactttcccaccaaaaggatcattggggtaatttgttgaagtgtgtattggactgtcttagttttcctccagatatttatgcactgcagatgttcgccatgaaaccagtgctcttctattctgaggagttagctcagcccgttagtgtctttgtcttacccatttggatatggtagaattgagcaagaccagagattcaacagttctaagctccactaagtataccccatctacagagtaataggtgatccagatgtacttacaaatcctatcttaacaagctttaggaattatagtggtcatatattgaagttgggtgggagtctcacaccaggttccaagggagattacaaatcactaattaataattaagtcataatatctcttctatcagtctcgggtttcttgttttctaagttctgtgctccatgggtttattatctgtactctgcttacacagtccaaaagagtgaaaagaaatagaaaactacaggacgttatccagaatgaccacaaaccttcagttcctttgctgcattgcacttactctattgcaaaaggagtaagtgcaatttcagtctaaataagcgagactgaaatttgagcttcgaagatgaacttagagttttcactcttgggttttacttaccaattgtgaattaaaatccgtatcatctggcaccactgcactccagcctgggtgacagagcaagactccatctcataaaaataaagaaataaataaacaaataaatccacatcatcctgctttggccctggaagtcatgagggagagacggcatgcccgagggctataagaaatggaagatgtggaattcttgagcacagatgtgctttgtgttttcttcagtctgtgtccttgcctccattcttattccatgtgggktttttttttttttttttttttttttttgagacagggtctctcgctctattgcccaggttggagtgcagaggctgactgcaacctcaatcccctgggctccagtgatcctcccacctcagcctccagagtagctaggactacaggtgtacaccagcacacctggctaatttttttatttttttattttttgtggagaccaggtctcactacgttgcccaggctggtctcgaactcctgagctcaagcgatcctcccacttccacctcacaaagtgctgggattatagacatgagcctctgcgccccagcctcatctcattttaactaaaggaaacctttgcagtgattgtgaaccataaagaacccatatgtgcttgagcccgtgccatcttgggatattttatggttacacataagagtctgaaatatggaattggaatcagacatcctctgtctatttgagtgtttggaggggtgaatctagtggggcttggtggagctatttggaacatttgctgctctcagcagatgcagtggctgttataatgggggagctttcatgggcatccaggctaacggatttttgtgtagaaatggtcattgttcatctaagctgctactgttgcttctctcagttgtcgggatgagactgtcctttctgactgcatcctattcagagcgtgcttccttttgcagggctgagcctaatcctctgccagctttcattaccctctatccttccaaatgaaaatgaaaaggttgtgcagctgaattcatccttttctctgagatgctttggggagagtgaagtgagctggcagtaccccatgtctgaagaagagagctcygatgtggaaatcagaaatgaagaaaacaacagcgrcctttttgtgacggtcttggaagtgagcagtgcctcggcggcccacacagggttgtacacttgctattacaaccacactcagacagaagagaatgagcttgaaggcaggcacatttacatctatgtgccaggtgagttggctgggtctccaggaccaagcttcttctcttcctgtctctcctgttaaatgtactaaggttttaaacatatatataaataattaatatttattgcgggaagtttgaaaaatgtaagcgaacacacacaaaaatcatttgtaatattatcaagaaatattcattgttagcatttcagagctgtattaagtttggaaagtcatctttgttatgacatgtcctgtattgatactgtataaacaatctgaaatatactcatctctattcagttcattcaagttgcacacatactcacagtgtgtccagcactgggctaagtgttgagtacacaaaaattaataggtaagccctgtcttggagttgctgatagttcattataatatcttccaaataaacactcgatttttcagattcactatcaacatacatttattcttggagagttggaaggaattttctttttccttttaaaaaagttacatatatatatatatatatatatatatatatatwtttttttttttggtaacagggtctcactctgttgcccaggctggaatgcagtggcatgatcatcatagcttactgcaatctcaactcccttggttcaagcgattctcccacttcagcctccccagtagctgggattacaggcatgcaccaccacgcccagctaatttttatattagttgagacgggggtttcaccatattgaccaggctggtcttgaactcctgaccttaagtgatctgcctgcttcggcctcccaaaatgctgggattacaggcgtgagccactgtgccctaatttttatttttatttttgtagagatagggtttcactgtgttgcccaggctggtctcaaactcctgggctcaagtgatccacagccacctcagcctcccaaagttctgggattacaggcacgagccactgggcctggcctactcctgcattttaattaaaaggacaaaagggtcgagcacaagtgatggcaatttcagtatgcagttgggtaaattaaaaaggactatggctagaatccttggttttagaacaaaacctaaactgtttatgattcttgccatccttgctgttttggcataggtgtgtcttcctacctttctgccttttctttttcagtttttaatgggctcctcttcctaccctctataactacgagtgtccccagggatctagaccctctttactttttcatgatactcttattcatatgaaccttccttcttaacaattaaaaaaaaccaaaaactttgttttgaaaagggaaggtatttagaatgtcactccaacttcattcacacttagattccttcaggaaaatcctctaggtgtggagggattttcccctgctgtgaagagaatggtaggaacgtgaatgtgttaaaggcacacgagtccctgaagttttaatccgtgtaagattgtccaaaaattcttcttgttccagcacagatgccatccaagtagcccctgcatcgctgtctgactgagatctttttattcgcaatcatgcagacgtaggggccctttctgcagctgatgtttgagactgttagaacttcttaccaccgtagcttaagtagctgtttttcttttggaaaggaaattctcaggctccttctccttctttaaattttatgtatttctcaaaggattactttttaataaacagatttctatgctatttttgaatcatactgactataggtggtaagagtttttaaaagcatttcataataaaactcgaaatattttttcctgttttaaacagagttggactgtattattttattgttaatttttgtttttagttgtttaaattttgatttagattcctggttagtatttatttatttatttgtagagacagggtctctctatgttgcccaggctggtctcaaactcctgaacacaagcaaccctcccaccttggcttcccaaagtgctgggattacaggcatgagccacaactcctgtccagtattgatatttatcatcagtattatccatcaggagacaggcaatttggtattattcatacttaaaaatcactttgtagctgtcatgataactaatgccagtggggcaattcttctggatatatgtgtaaaggtgaacttcatacctaatatcaataatgccagtgggatagtttttctggatttatgtgtaaaggtgaaattaatgtctaatagagtcttcattcttttttaaaccacagacccagatgtagcctttgtacctctaggaatgacggattatttagtcatcgtggaggatgatgattctgccattataccttgtcgcacaactgatcccgagactcctgtaaccttacacaacagtgagggggtggtacctgcctcctacgacagcagacagggctttaatgggaccttcactgtagggccctatatctgtgaggccaccgtcaaaggaaagaagttccagaccatcccatttaaygtttatgctttaaaaggtacttgtatcatctccttccttctttaaataagagtaacaggcaaaatcataaggtgcrtgtaggatttttttttttttttaaatcatcatcactggtgatcctaaattctgatttggggatttaggaccccagctaatacaatgtctgtggctataataataagcttaaaattactaaaggccaaagcttgattacccatgcaagatttcatgtttcatcagttgacttcaaaatactgtaaggaattcttttcttacataagcctcttactttcattcacattcctgactatggcggccctaaaaacaaacatacacccagggggttagatgcctagattaattttagtaacttaagaaaagtgatttgaagaaagtagtttagacttcaaccctttgatgtccacagttagtacgcttggggaagtataatacatgctgaggtcaacagatatttcctgaacactatattacatggaggaatgggtagcagcaagagtacactgttttaaaatcagagcacagctaattttgtgccaggcactgtgctaggttctgggaaagtactgagaataactgaggagcagagtggaagagaagaagagaagaaacaattggatagaaacaaagtgtctagagcagtgtggatcagcaaatgttggttgattaaatgaataaatttattagtcaaggagattgtggacgagtataaccataactaacccactgctgaggaatgcggtgttctgtttgattggaatttatttttattgttattattttgtaattctgtattataactatatgcctaattgttgtacaccatctcacaatcaagccttgtgagattttccaaattttatcttgatcaaactggtttgcaaattatttttcagggttttyttaaaaaaaaaaaaaaaaacccaaactttataagatcctggctatcctgtggatttttaggcccttgtatttgttcttttttatagcaacatcagagctggatctagaaatggaagctcttaaaaccgtgtataagtcaggggaaacgattgtggtcacctgtgctgtttttaacaatgaggtggttgaccttcaatggacttaccctggagaagtggtaggtaccctcaaaacgtgcaatggcttggagcagagcaacagggctcaraaracctgcatttgagctcggtctgtcactgatgggcacatcactgagtttctctagaccttagcttcccacctctgggatgaacacatttgattaaatggcctttaggactccttgatcaatgggagagtttgaaatgatagttcctggaccaggcccttcagaatacataaagagtgtgcmgtaagccttctttttcagaagtcagacagaaataggaaggttctctggctacaagatatcaaccaaaaaattagaagagcaaaaaaaccactggattttactattgcggagacagtgattgattctcatcgtcttggcttctgtgccctgaggtttgattcatctgatagtgttgattgcccgcaccccttcctcttctgccttgttggcacccaggacaatgtgtcttcctgttccacctcctatgtgcctgacctttgcatggctcaccttcagtgaaccgttatgatgtaatcattcagcaaaggtttaatgaagtttgctcaatcccaagcactgtaccagaagctggttcagtattgcaggaagaagggaggaggggagatggaagtggggaaggggagccaccatgctgcctcttggtcactggagatttacagagtctcagtcattctaatgcattgtcactaagtgtgtaagacagccatgtgtaagaggctatgaatgcccaaatgcaggaatgactaatattcttatggagaacaaaaacgagatatatatatttcttgcctccactcctgacttgtaaatttctgctccctgttcttttaggcatttgacagctttctgtccttctatccattgatctccctccttttatccgtttctctctcccatgcatttgccgctgcttttcatttgtcctggggcatctgataggaagttgggcattttcactattgcctcacaaacttcacacagtgaagggacatttacagtccaacaaatgtacatcttccctgaaatatgaagtgatttggttcttctgttcatacttgattgactttaatccttaacacataaacactgctttytatttataggagacagcaatttttttttccaaaccgaagtacatgctatttggcttacaaatatataatcaaagtattgtttcatacagtatgttttttccgattataaaagtaatgcaggtttattgcagaaactttgtaaaatatggagagacaaaggaaaggctacttcccagagcatcactgtttatattttagggagataaagcttttatttttcatttgtatttctttcttttttttttcttttttcttttttttttttgttgtggagatgaggatctcactacattgcccaggctggtctcaaactcctgggcttaagtgatcctcccaccttggcctttcaaagtgttgggattgattacacatgtgagcctctgagcttgactgagataaagctcttaagtatttcttatccatagataaacattgaataataggtgttattctttaaatggtaatttattacattctttatccttcagcagtatagcacaaacaccttatatgtgtcattaactgtccttttaaaaaatgggctgggtgtggwggctcatgcctgtaatcccagtactttgggaggctgaggcaggagagtcacttgaggccaggagtttgagatcagcctgggcaatgtatcaagactccgtctctacaaaaatttttaaaaattagccaggtgtggtggcatgagcctgtagccccagctactcaggagactgaggtgggaggatcacttgaacccaggaggttggggctgcagtgagccatgattgtgccactgcactccagcctgggcagcagagtgagattctgtctctaaaaaaattaaaaacaaaataaaaaatctcatgattttctaagcagctagcttttattctttaggttttatcttttagagcagttttaggtttacagcaaaattgagaggtacagagatttcccatgtgttccctacacccacacatgtgtagcctcccaccttgtcaacatccctaccatccatttgttataactgctgaacctccattgacacatccatatcatccagagtccatagtttatcttagagttcactcctaggagcgagctttttaaaagtcggttttcttccccttttgctgtagaaaggcaaaggcatcacaatgctggaagaaatcaaagtcccatccatcaaattggtgtacactttgacggtccccgaggccacggtgaaagacagtggagattacgaatgtgctgcccgccaggctaccagggaggtcaaagaaatgaagaaagtcactatttctgtccatggtacattccgctttctaaaatgtcagttgtccatgctgctcgggatccatatgtggtaatcattatttaatggaaactcttccctgtrcagagaaaggkttcattgaaatcaaacccaccttcagccagttggaagctgtcaacctgcatgaagtcaaacattttgttgtagaggtgcgggcctacccacctcccaggatatcctggctgaaaaacaatctgactctgattgaaaatctcactgagatcaccactgatgtggaaaagattcaggaaataaggtaaagaaactctctgcccaagtatgcytttttttagtgtgcatcagaggyrgactgaggtttgtgtgtgtcttacaacccagacccaaagtcagtctagaaaatgtaacaatctgagttaagagatgcttgaaatcacatccctttaatgataacattgcaaagtggtattagtatgctggtaagtatttaatgagaagatgagaagaaagaactaaaagctctggcccctggggaaagacaggtcactggattcagctagggtggaagaaaggaagtaaaattggactcaccaggattgaatagattgaatatattccctgatgttcatcatccatatcgcaagtagacagatatggtgattacacccatgaggcagttatcacatcaccttacgtgaaagttaacgtcataggcttaatctggaacccatttgccctaattgaggactccacaggaaagaagagtagagcctggctaatcagragagagatgtgcagtgagttgcttggatccctaccttttaatcagaatggtagattgctctcatctcttaaytggtggtggagttttkaatgagtcacccctcagccacagtttcctcatctacaatgtaggataaacaataccttatgtccttcaaggcaaggaattggatcagatgatatcatgaggcctcttaaggttttaagctgtgattagaacccaagagtcagaagrtacatctcacagcacccagctaaccagccctatacttttgtcagaaatcatctcagaaagacaaagtcagtcctgtatttcaagccttcaggaggaagaacagagcctttctcatcagttccattcacctcaggatttgctttcttctttgtgaactaaattccacgtgtaattgagaagcaatgtctgagaaaatggaattttacagcctctatagaatagtaaaggaaaaatgaagtgggatactgaatctggaaggctttctgttgacacaaaatgaaggtgtacaacaaggagggcagctttccacgaggaacttccatgaggctgtgcagccagagaggaatagggtaacaaccctggtacagctaacacctccaacacgtgtgtgagcactgtctgcaagccataatccatagcagtggcaggacaggctcgccaactgagtggttctggaaagctgccttttccttttagtgattcaaggatgcttcaacgtggattttttagttcctgttatgagccagtgaatacaaagatgaacatggtagatgggggatctggcttcctggagcttaaaactccaggatgggggatctggctttcctggagcaagaaaaccagtggttttcttggccgaagaagtgaagagaacaaacagcagaggataatttggtaatcagcatcctagtgtgccccagggtactctcttaaggaaatccagtcctggagcacacccagtatggtccagcctgctgtcttcgtaggtctgagtgccccagtatttgcaaagtgttttggagcctatgaaatgctttcacacatacaatctcctttaattaactctcacaatgactctgtgctatgtgtacaattatcacgttttacacacaaggaaactgaggcatggagcattgtaataatacccgagatcttctcactccatgaccaatgcttttcttctccattccagttgctttttcaactgtgatgatttataaaggacaatcaaatgggcacatactatatttatgcacatacatacacacacacacacacacacacacacacacaaccagatgtcatttataatccatgtaaaatatttttggggaagtttctctttaataaagtttgaagagacatatattttttttttttgaagaggcatattttttctaacttttttttttttttttgagatggagtcttgctctgtcacccaggctggagtgcagcggtacgatcacggctcactgcaacctccgcctcctgggttcaagcgattcttcagcttcagcctcctgagtagctgggattacaggcatgtgccaccatgcctggctaatttttttttttttgtatttttagtagagatgggggtttcaccatgtttgtsaggctggtctcgaactcctgacctcaagtgattcacctaccttggcctcccaaagtgctgggattacaggtgtgagtcatcacacccagcctataactttttttwaataggtgatagaatcccgtgcttgaaaaataatcaaacaaaaagagaatgcattgtaagaagcctcactgtactcctgtccccagctgcccagttctcccctcctccccacrgggaaacatcttcattagtttcattaggttcttatgaaaccttccagagtttctttaagcaaaatacaagcaagtaggactgtcatatcctgcagaccgctacatacaaatacatagaaagtgtcctcattctatcctccagtgatattccattttttggctgaaccacctaaatgatggatatttaggggaagcaagtattttttaaaaaaggtaaaaatcaaaggtttttattttttatttttttaaagaaaagttggtaggctgtgtttattcattcagaagtcaggccgtggctgaactgatagctcttggagatggccattgctcatctctgaatgtctggttttctcttgtaagaattgtgtgtatgatccagaccttcagtgtgtgcactatatattgagaattccagaagagatgatatggacaagaaaaaaagatgactttactttttacagtaaaaataaaacttaaattgaagagtacaattgtttaaacaattggaacttacttagctactgcttgttgaaacaaaatcctttttttaaaagstatcgaagcaaattaaagctgatccgtgctaaggaagaagacagtggccattatactattgtagctcaaaatgaagatgctgtgaagagctatacttttgaactgttaactcaaggtatgtaaagggagtataaagataatgctagctctgtagatgagtgtcttccaaggaaagcctggcacttttctccccggtcatggaagaaaagcagcacttaggggagaagcagtgtctgcatatgtcacatatcgggaatacctctgctggactcatgaattcargtatttctgggaggttctgggttactctagagtaggcgaggaatccctaggctccaccagctagctttatttttgtagagatggagtcttgccatgttgcycaggctggtctcctgggttcaagctatcttcccaccttggcctctcaaagtactgggattacaggtgtgagccactgcacctggcctccaccagcttrcttagcacctgcttctcaatctgagaagagagaagcagatgaccttagattgttctggagagttttgctacaagttttccttatagacattgtacagtggtccttaccagaagggagtgcccaagtctgtttacattcaggctcagcacctatccagagtcccagccatgagccaggtgctgtctgaggtgcgctcatgtgatcctcacagtaaaacctgtgatacaagcaacaccgtatatctaatttatttgaccacagatttagaaaagaatctttaaaacctaataacataccacagatgcattttggtaaatgctgctttagattatactttagctgaatccattagttgaatcctaagctataatataattttaagaacctccttgcctttcaagccaaataaccaagggactttctctctctctttccctccctcccttccttccttccttccttcttctctccctcccttgttatctcttttcctttcctttctctccttccttccctcttccctttttcctttctctccttccttccttccttgcttccttcttccctccctcctttgttctctcttttcctttcctttctctttttctttccttccttccttcctcactcactcttttcttttcctttctctccttccttccttccttcctccctccctcactctctcttttctttgcctttctctccttccttccttccttttcctccctccctccctcccttgttctcccttttccttccttccttctttcctttcttccttccttccctcttccctcactctctcttttcctttctctccttccttccttccttcattctcccctcccctcccccctcccctccccctcccctcccccctccccccctcccctccccttcccttcccttcccatttttcttctcaccatgttgcccaggcttgcctcaaactcctgggctcaagtgtttctcttccacctcagcctcccaagtagctggggctacatgtgtgaggcatcacaaccatggacttttcactttcttcactccaggttaaaaacatcacagggataaatctcaaaacaccaaaactgtgaaaatgctgctaaccatgtgggtctgtctaaactggagtgttacttgtacaactggtttcagcccctcsggagtgttttgaatgccatgtagatgagttgtgaactcatattccactttgtagtctcatatgttctgggacacgagctattccattctgacttctttctgcctcttgcagttccttcatccattctggacttggtcgatgatcaccatggctyaactgggggacagacggtgaggtgcacagctgaaggcacgccgcttcctgatattgagtggatgatatgcaaagatattaagaagtatggaaaacagatgtgtcttcttctttcgtggtcagaatatttctcccttgacacaaatgatgtcaaatacattttacttattgactataagatagggttttgggtgtgatagcttcagggtgtgtatcttttgtcatgaatagctgtgagaagaaggtccagggctctcattagaccttcaaaatgtctccaatctaaaaacaagagtgaattttaagaaccactgttctaagaagatttttactaccctggctcacatatcttatttggtgaactttgtttggtagtcggactgcatgtaaacataaatgtgactgcttagtcccttatctgcccacctgctgtttggtgggttaattcgccattccctcctccctcccccgagtcctcagccttcttaaatgggcacatgagcaatgtgtttacacttcatccatggtaactggttgtgttcagaagcctcagttgtttcttcctctagacagagactcctcatcttaacttctagggctaagaacagacttggatgttgactggggtttctagtagattccagtgtggagcaggattctaggtcttataactcaatctgaggatcatcgcaaccctagtgacaccctaggggctcttcccagtgtgagtgttgagaagggagggctccaggcctttttgaaggggtgggagattgagatcattaaatatggttgaagttgaactgttcagtttgctcataggttcaagattggggaatggtagtcatattttattaaacttgattatctctgcctgctatgtaaacacttagctttcagttgttcatgtgtgagttattccctcttcagcacatgcagacaagttttaatgttcatctgcatgtaaaataaatcagtgtgtattgccccgaaatgcagacaaggtcccaactccttgccatcttagagtgttcccgtggctccactcattgccatgactctcaggaattggccctatacttaggccctttttctctctagatgtaataatgaaacttcctggactattttggccaacaatgtctcaaacatcatcacggagatccacycccgagacaggagtaccgtggagggccgtgtgactttcgccaaagtggaggagaccatcgccgtgcgatgcctggctaagaatctccttggagctgagaaccgagagctgaagctggtggctcccagtgagttcctcaacagtcaggacaactcatcagctgagccgcatctgccccaggcggaactttgaatcccagataggggtyatatagaaatgaaggtcccaaggcagaaattcagttaygaatgctcttaaagkcatgtgggactttgttttattttgttttgttttttgagacagagttttgctctgtggcccaggctggagtgcaatggcacaatattggctcactgcaacctctacctaggacgttgttttagattcagatccaaaactgcatttttgcagaggcccctcaacattttgcttgtctaataatatagctacagtctctactttgaatgtctgtgtatgtggatggagtgtggggaaggatcttctgtctcattgctccttaaaagatagatgaagccaaaagcaatataagcaaaatgcaacttacaaaataagctttataataaagcatatgaagtagaggtgtctgcccatatagtagctgtcaattgcatttatcctattcaaattctgtccacaaggttactgttggagcaactttggagaaaatactgagttctcctgattgaattttgtccccttcttgtataaggaaagagttgatgtagtttcctgggtgtagatggtttgagagatggtactgcctatccctaaaatgaaccaggcagccctcacacttccccaccagcagtgagagattcctggctcagacacagccacactaccttgctgcccctgtgcatgtctgccaggaaacttttcattgtgcctctctctcttgtcacgtagccctgcgttctgaactcacggtggctgctgcagtcctggtgctgttggtgattgtgatcatctcacttattgtcctggttgtcatttggaaacaggtagatattttctcataaaactaaagatctttgaagccaatgagaacaagcatagcaacctagttcagtgcttggcacagagaaggagctcagcaattacatgtggagtgaacgttgttggactctactgtgtccagtcactgtgctgcttcagtgaagctctggtgcactgggactttggtaattcaccagttacctgtcctggtcatttatagaaaccgaggtatgaaattcgctggagggtcattgaatcaatcagcccrgatggacatgaatatatttatgtggacccgatgcagctgccttatgactcaagatgggagtttccaagagatggactagtgcttggtaagttccatggggtaacctyccaagactcccttttcccttgcacacaactttacaatttataggccttggcagaatagagatctgagcttgtgcttagtaagaactaggcaatggaaatttgctttcagaaatacatttctgtcttgacartaagttaattggatcattgcaatgatttttttaaatctctttccataacaaattatagttaaggaaaattttacaaagggagaagagaatatgaagagggctggcaaagatacccaccaaaattgcttttctttagaaatgacacaaattgaaaatgaatttctgtgactaaaaatgagcagatgagaaatgaatgaggacaaccacaaaatgtattttgattcagtacattctgaagwtgcattagatactcctttttacatatttggaatatggaatataaaaatataggtacattttgaggcaaaatatgtaaaaataagcaagccaacttatcacaagcatttcaagtatttcaatcctgggctgagaccaagtatatgaagctttagtccaagggagtatttcttttttaaatcacattcctaatgaatgaaagcaagacaaaggcaaatgaaagtagaggtagaggttgtgttatgatgaatgatctaacagtatatatgttaaagaatgccaaatgcaggttttaattatccaccggtctcaytgcaaaatacagaagagtttaagtcttcttagagagttaggtaaactgaaatcaagcaaggcaccagagtgaaatcacctttgcaaaaattgtaactgaggaaattatgacagtgaatgagatatgacctaaccaactccattttgctttagcctccaagttgtccttgttccttcctgggcataggccgaactaactttgagaggaacttagtttatagtttgactttgaaaaaaagacaataatagccctttgccaaaacaaaccctctttttscctgggaactagactgcctttgcgggactaacgaattagctacaagattagaaagtatggtttaggggtcactgttgtaaaacctraggtcagtgcttgagatattttggagaccctgtatttcgatgcaccagctgacaccacccaggtcaataaactggctcatctgatcttggggcccctacctaggaactgactcagtgcaagaggacagcatcagctccctataatttcatctttgacccaaccaatcagcactccccttttcaccccctacccaccaaatcatccttaaaaaccccattcccccagtttcagagacactgatttgagtaatagcagaatagtagaaattcccccagtttcagagacactgattcgagtaatagtagtaatagtagaataggtctcccgtacagctggctctgtgtgaattaaaccctttttctattgcaattcccctgtcttggtaaatcggctctgtctaggcagcggacaaggagaatccatggggcggttataagagctgccccccaatttcaaatatttatatctaagctttctttattttcctgcctatttcccaacaagggatgaggagcttagggagttaaaaagtagtaaaatatggggaaaagggcataattcccattataccaagaggcattgctggtgaagcaatacctttccaggtacgattttcagtaacacagacgtgcagtaagaggcagtgttggctgttagtgtcttttatgagccaagtcttttcctggcttggctatccgtggtgagactgacaccccgggaaatgtttctctcagggtgagctctttcagggtgggacaacagcttcagtgtctttacgtatgtctcctcccaacatgaagctaattgctgtgctctcgggcatgtttagctcttggtagagtggctttcctaacaaatagggagcagtgagcccagcctgaagtttttatttagtcactccttagaatcagtgatattttgaatactgaagtatttccagtggctagtaatttactaagacaaaagatgcccctgtttgcatatggaaaacagaaggggagagagccaggaggtgtgggtgagagccccgaaggcaagaggatcccaggggctggcccagcacggagctggtagacagcrcgctcacaccagggagggctgcaccctcctttctcccgtctgtgttttctttcccttgcaagtgttattcgacaaaagcaattatgctaatttccttccctgtgggctcaattccttttttgacasgatgacttggaggagtcattatgattactccaaacaggaaagacactcgcccagctgtccgcccgcagaragctggctacggtgcagaaagctgaggaggcgtctggagtttttgggtgttaatgattctgcctgcccacaggtcgggtcttggggtctggagcgtttgggaaggtggttgaaggaacagcctatggattaagccggtcccaacctgtcatgaaagttgcagtgaagatgctaaaacgtaagtgctccttcctggggattttttgagcacggggattttttgagcatggggatattaagggaatttctcaaaatcatgcagctagtaaataagacatttaggactaggtcctgattattttgactccaggttttatgtgtatttagattaggtttatttagattgctcttgctgcctgtatgttggaaaattaagagcttgttatttccagtgacttctttttactagaaagaccaggaattagttattagcactgaggccaagtagctatctgcttcttttagacttctggtaaatagaatgatatccaatcacaggattagtcatattcttggtttttttctgagaacaggaagttggtagctcagctggactgatatgtgatttattctttcaacagccacggccagatccagtgaaaaacaagctctcatgtctgaactgaagataatgactcacctggggccacatttgaacattgtaaacttgctgggagcctgcaccaagtcaggtgggctcactgacctggagtgaggattttcactggacacatgtggttgtgaaaactgttcaatcaggcttaaatcctccactctccatccccacacatggcagggaatagaagtcccttgaatggagctgactggtcccttgaattgatggaagctcattggtttttgagcaaaatctgttgccagtccagtcatagccattcatggctctttattaaaaaaaaaaaaaaaaaaaaaaaaarcttttttggtatcttatttttttctgygccatatggtctgcaggacaattcatggcttttctgttcttcattttcatacccatctcctaacggcttttgtccccataggccccatttacatcatcacagagtattgcttctatggagatttggtcaactatttgcataagaatagggatagcttcctgagccaccacccagagaagccaaagaaagagctggatatctttggattgaaccctgctgatgaaagcacacggaggtgggtgcaaagagagatgttgctgtctatcattatcttacaggcatcacaaatggaaagacccatgtcctgatagatatcatgtctgcagattcagtgcccaaggtagcaagacttagagtcaaaccaccctgtccagtctttccatggtcatgcagagagatgcatgatgtctaaaggtgttttggactggggtgtcacatgggaaggccttgctgataggtttgaatgagagtgagttagaatgactctgggagctcttctgctatttacatgtgatccacttagacctataaaatgcagctctggccagggatgcttgagttctggaaccttgcaagaactgtctgtggatctccaagctcgaggtccttgctgaacctggacctataaatgacgtcaatgatagtgatccctactgcagaaatctacaagtggctataaagaactctgtaggtaagaaattctgtaagatcagaaagtacaatgaattcacttcataataaattacttggtggacaccaaatgggtgctaaattgattgggtagaaggaattgtatgcccaagccacatgrccacacggctcaagttccaaccaaggcttgtgagttgaaaaactgagaaagaataatgacagacttaaygtagtgaattcttcaaactttaagtgtaatggacttacaggtccatgggagcacagccccactgtcttagatgtggctcttcaggatgtgcgggctcctgctaargatgtgcagggaactggctctgaaaacaagtgaacagtagtcatcatggcagctgacatttgtggagtcctttgtatgtgccaggtgccatgacaaatattccgctagtctttcccatctttgtcagtgggatccattctacgtcttctgaaaagtgcttccttgacccccagatcaagtcattttccttacaagctattgaaacctttcttccttcacaacacagctgagtttgagttgatctgtgtatttattttgttttttacatttctttttttccctatttaaaaaatttttttatttccataggtttttggggaacaagtggtatttggttacatgagtaaattcttcagtggtgatttgtgagattttggtgcacccatcactggagcagtatacactgaacccagtttgtagtcttttatccctcacctgcctctcaatttttccccgagtccccaagtccattgtgtcattcttatgcctttgcatcctcatagcttagctctcacttatgagtgagaacgtacgatgtttggtttccatttctgagttacttcacttagaataatagtctctaatcccatccaggttgctgcaaaagccattaattcattcctttttatagctgagttwyatatatatatatatatatgcacacctacacatacatatgtatagatacactgcagtttctttatccactccttgattgatgggcatttggggttggttccacattttttcaatatgtgaattgtgctgctataaacatgtgtgtgcaagtatctttttagtatgacttcctttcctctggtagatacccagtagtggaattgctgtgatgcatgtatttgtgcgactatttgattaatgctcatttccttgactagatcacctcatgtgaaaggtatggattggttttgcttttacccagttagctcccatgcctayctcagtacctggcacattgtaggtcccccagaatcatcatctactgaaagtggaatgaccacttcagaagggcaccctgggtaagatttctctttctgtttttacagctatgttattttatcttttgaaaacaatggtgactacatggacatgaagcaggctgatactacacagtatgtcyccatgctagaaaggaaagaggtttctaaatattccgacatccagagatcactctatgatcgtccagcctcatrtaagaagaaatctatgttaggtaaaagtgtctatactcactctgggtgttgggactttccagtggtttaatatgatacttaaagtatttagrgggaagtgtatagggatggtaagtgaacctggmagcccaygtggtctctaaatgcaggtctgcacaaccagttctgtgacatgtttccaggtttgtggcctgtaaattgaaaagaataaaagctgacaatgtaacaaattttttaaactttaaatttaatagttttaaagaattttcttggtgtgttcctgcagtaaacattttwwaaaaaaaataattatttattctgatataatgaacttccttttttattgctgtctttttcttttttaatgaaaatatggtgattgattttttttaatgcccttacttggcagaattacaagttggctgtcttatgttggttcctcaccttgctttttttcccttaagttttagaagtctctgatgtctatgagttcagtaacccttgcttttacttttcctaacattcaatttgtgataggaactctagagtagataatttgcagttatattttctggaccagtgtttctgttgaatgtattttgaaggtgggtctatctgtttttcaagtacatgaatatgtggcagggttaaattgatttataaactccagggagtccagctgatgcccagaccagatggatcacttcacatctgctcagggtggttcctccagagccctgaactggtcacagacatgaagctggaagtctgacattggcttgtcctgtgagcttgcctttttgggtctgagccttcccattagtcaatgcaaaaaagtgttgagctgccctggacattgttttggaaattattgatgtgctctgaatgttttcaggttcttaagtgaaaggtacaatccatttaaaaaagaatgtgtttgttttgcaaagctcagtacacaatattttccatttctgcggttccaagttccattcacttctcattgccaaatgggtgaacttccaagcgcttttaaaagattagccagtgagagttatcggaaccagtacttcctctcccctcccatattgttaaaaatagtttacattgcttcccaggctgggctggtggagttggcaygagatgtcagaggaacctgagtcatgctcaggcccaagccctgttggcaggcagaccactgctttctggccttccgtgactatctgaaaaaaatcgtgaatggctagagctactcttcacttgctgaacattttcaaaaagaattgagaacttctggattaaattgccttcttcctcgaaaaccctgggacccttccagatgggactaactggggaaagtggacaagttacaaacaaagaaactcaaaggaaagtcattggcactgatctctaagatgctatcacatgtgattggtggttgattttattaacaaattataagcaaagtactacaaaggtggctttaaaaagaaaataaagcaattcacagaaactactttttcatgtagcttgtatgtgtgctccatgtatttcatcatggaagattttagtgtgtgtttatgtgtatgtgtgttttaaaggtagctgagatgatttgctaattatggttgaaaaaaagaaatttaggaggtaaacaaaataattatgtgtaagattggtccttgtggctgtgtgtgtgttttgtgtgtgcgtgtatgtctctgtgtgttttaggctgttcttttattgctataaataaatacttgagactgggtaatttataagggaaagaggtttaattagttcatgattctgcaggctttacaggaatcaagatactggtagatctgctcagtttttggagaggcctcatgaagccatgaagtcatggcagaaggcaaagcagtgcaggcacatcacatggccagagcaagagcaagcgagagagagaaagagagaggtgccacacacttctaaacagtcagatcttacaagaagtcacttactattgcgaggacagcaccagaaggatggtgctaaattgttcgtaagaaatctgtccccatgatccattcatctgccaccagtccccacctccaatactggagattacaattcaacatgagatttgggtggggacacatattcaaactatatcatactgaccctggaccctcccaaatctcatgtccttctcacatttcaaaatacaatcatccctccacaatagtcccctcaagccttaactcattccagcatcaactcaaagtccaaagtcttatctgacacaaggcaggtcccttccacctatgagcctgtaaaataaagaacaagttatttactttcaagatacaatggggttataggcattgggtcaacattcccattcccaaagggagaaatcggccaaaagaaaggggctacaagccccacagaagttcagaacccagcagggctgaaaactccaaataaactccattgactccatatcccatatccagagcacactgatgcaaggggtggagctcttgggagggatggaacaccctgtggctttgcagggtttagcccctgcagctgctctcaggggctgttgtcgagtgcctgtggtttttcctggtgcagagtrcaggctgttggtggatatattattcatggaggatggtggccctcccctcgtagcttcacgaggcagtgccccagtggagactctgtgtggggacttcaaccccacatttcccctctgcagtgccctagtagaggttctctgtgagggctccaatcctgcagcatgcttctgtctggacaccctggttttttaatatatmctccgaaatctaggcagaggctcccaagcctcaactcttaacactctgtrcacccacaggctaacaccacatggaagcggccaaggtttatggctgtcacaagctgaagcagcagcccaagctgcacctgaactcctttgagccacrgctggagctggagtcatagggatgcagggagcagtgtctcgaggctgcacagggcagtggaccctggggctggcccatgagaccattcttccctcctaggcctctgggcctgtgatgggaggggctgccatgaaggtgtctgaaatgccttaaaggcctttttcccattgttttggcaatcagcctttgcctcctttttagttatgcaaatttctctagcaagtggttgcccagcagccctctttaattctctcccaaaaaagcttttactttctctgtcacatggccaagctacaaattttccaaccttttatgctctgcttcccttttactttttttttattttaaagagatggggtctcactatgttgtccaggctagtttgaactcttggactcaagcaatcctctcactcatcctcccaaagtgttgggattataggtgtgagccactgcgcccagcctctgcttctcttttaaatataagtttcaacttcaagtcatttctttgcttctgcatctgactgtaggctattggaagcagccaggccatatcgtgaacactttgctgcttagaaatttcttccaccagatatcctaggtcatcactctcaagttcaaacttccacatattcctagggcatggacataatgtggccaagttctttgctgaagcttaacaagggtgacctttactccagttcccaataagttcttcattttcatccgagaccttggcagcctggatttcattgtccatatcattatcagcattttggtcacaagcatttaaccagtctctaagaagttccaaactttccttcatcttcctgtcttcttctgagccctccaaactcttcttatctctgcctgttacccagttatctttacagcaattccccattccttgataccaattttctctattaggctgtttttgcattgctataaagaaatacctgagactgagtaatttataaagaaaagaggtttcattggcacatggattctgcaggctatacaggcatttgcttctggagaggcctcaggaagcttccaatcatggtggaaggtaaagggggagcaggcatatcacatggccagagcaggagcaagtgagagagagagagagagagagagagagagagagagaggtgccatacagttttaaacaggcagatcttgyaagaagtcactcacttttgcaaggatagcaccaaggggatggtgctaaaccatttgtgagaaattcacccccatgatccagtcacctcccaccaggccccacctccaatactggrgattacacttcaacatgagatttgggtggggacacatatccaaactatatcattgygygtgtgtgtgtgtgtgtataatttttaaaccagatatatgtttctgcatatctctttcctttctttcattctttctwtctttttttttttttttttttttgagacagagtctcactctgtcacccaggctgcagtgcagtggtgtgatctcggctcactgcaactcattgcaacctcctcctccctgattcaagcaattcccctgcctcagcctcctgagtagctgggattacaggcacatgccaccatgcctggctaatttttttgtattattagtagagatagggttttaccatgttggccagactggtctcaaacttctgacctcaggcaatccacccacctcggcctcccaaagtgctgggattataggcataagccaccatgcctggcctatatatctattttctaagatagaatctttgcatagtgatattcatctgtgagatctaaacattctacaaaaaaattaagaaaatatttttggatgtgttctttgggcatgcctctgcaacctgatgatttcctgctgcctgccagcaccaatacatttaatttcttttctgcagactcagaagtcaaaaacctcctttcagatgataactcagaaggccttactttattggatttgttgagcttcacctatcaagttgcccgaggaatggagtttttggcttcaaaaaatgtaagttcaaggaacacagacctttttagacccagatttcagtgagtggagtgtggamggagatgctaggagatagatgttggaaaggccattaataacaggggcctcttacttacctgtctctctccttcatcccctacgcaggtcagggagtctgaaatyatcaggcatctactcttctctagagctttctctctgttgggagtgggtggagtgagaacctgggagaaggccagccctttatatccaggcagacagctccaagtgccaccatggatcagccagtcttgcaggggtgatgctatatcagctacagatggcttgatcctgagtcatttcttccttttccatgcagtgtgtccaccgtgatctggctgctcgcaacgtnctcctggcacaaggaaaaattgtgaagatctgtgactttggcctggccagagacatcatgcatgattcgaactatgtgtcgaaaggcagtgtacgtcctcacttccctcactggtcaggctcatcctccttcactttaatctctaaagtcaggtgttgcttctagagattcggtgcctgttttttaaaacatcaatagatttcaaggggtcagtacactgccttggcagcagattgcccaggtktgagtgccagctccaccacttacttaatttggatttggggctagatacttgactgttctgcccctctgtctccctgattgtagtgggaggtgataatagtacctatttgctgagttgctatggggattaaatcaatgaattcatgtaaagtgcttaggacagtgcctggcatatagaaacagcactcaataatgttagctattttatttatttattwatttatttatttatttatttatttattttctttttttttgagacagagtctcactctgtcacccaggctggagtgcagtggygcaatcttggctcactgcaaacttctgcctcccaggttgaagcaattctcctgccttagcctcccgagtaggtgggattacaggcatgcaccaccatgttcagctaatttttgtatttttagtagagacagsgtttcaccatgttgcccagactggtctcgaactcctggcctcaagtgatctacctgcctcagcctcccaaagtgctgggatgacaggtgtgagccactgcatctggcaagtgttagctattaatatgtcaattgcgtgtatgcatggacaagcatgcattcccaaggatggtgtctttatattttaagcttttatcagattttcaaaagccatctgtgacccctaaaatagattggaaccatttgggtttatgtatcttggaggcacagtttccttaaagatactcattttgttgtctacttgaaccattcttcccatcccttccacttctcagcagatgacatagctccctgtggggatatatctgctccctgtaggtacaattccaaatcacctcactgcactggatgtgagacagcttatggcagctgctgcttccacctagagaaagacatgggcctgcatccatgctgtgtgtgattcatgtactcatgtggccgtgatagctgtaatcggctcatagatcattggatctgttcttagttttgttcccaggaatatctaaaaataggaaactggtccattcagggcttacaccttttgggtgaaaattcaggattaatgtttttggatattattcctttggaggacataaaaggcaatattgaccattcatcattcatctagtatttattgagcacctactatgtgccagggactgagagttcagtaatgaacaaaacacatgtaaaagacactcaaatgggacaagataattagcacaagttattaagagcccaaggggaacccttttctatttccactgctgtggatcatcagtgagtagacatgggtttaactgtctccctccttccttgcagacctttctgcccgtgaagtggatggctcctgagagcatctttgacaacctctacaccacactgagtgatgtctggtcttatggcattctgctctgggagatcttttcccttggtatgggcctgacattgctgcttatttgggctgttctgaaacaccactggaaggaaaatgtgttctttcaagccccaggatgtagacagtgttaagataacctggtgtgaggccagtatgctgcagccrcctcaaaccacatgttgtgccttattgtgtctgagataggcccatgcaggtggagatgggggtttttgttgggggttgcgtctyactcctggcctctgcccctcctctcctttgggctatgccagagtgacttcctcccactggaagtggtcccaatgacattcgcatcccagctgctttttcattttgggctttgggtcacatgggttcacccatggagagtgggccctccctcacctggtggcgattgatgctcaggtgaaaaggggtacgtggcgggaagggcagggctctcattcctggttgtcattggccagtcttgacaacccaggtgctgaacaacccaggtgccctgggctatccggtgaggtccctaagagaaggatgagccataaccctgacatctggatggttcatctggggagatgagacttacacacttagggataaacagtgtgctgctgatttaaaattgtaatttgagtcttgagtaaagagaaaggagtcctggaatagtgtgggaaggcttcagagagggaacttaacttgacctggccttggctttgaaagtgtgaaatgtttcatgaatttatctgtgatcaggatgtaatagtaaagtgtgtcttcctgccccgtctcctttttcatcctagttctccctccatggatgatcacaatggatcatccccgagtggcttaatggagtcctgtactcccttaaaagcagagaggccacaactttgatttttgctttagctatttgaacatacctggtgaaaaagactctctgggttttaatgattcagaatttctccttgcttttctagttcattttgtctgtgttgatccagtagtcatacacattgaaaaacacttgaacgcttatttctaaagatgtagaatttttgtgatggtacttggacttgaccaacctggagtcctaattaaacttaaggtttgagctggtctctgaagtcaaggagatgatgacactgaattttcttgaaaaaaccagtgcttcaasgcyataggatctgaaaggttttctaacagygttctatcatgccaagtgtttcarcaatgcactgagcgtttgttagtcctggtgttttattgtttggcttttaggtggcaccccttaccccggcatgatggtggattctactttctacaataagatcaagagtgggtaccggatggccaagcctgaccacgctaccagtgaagtgtgagctccttccccatcccgggggcctgtgttcacagtctgtgggtctagggggagggaggggccctgagacttccccctgtgcccactcttgagttctgtccccacagctacgagatcatggtgaaatgctggaacagtgagccggagaagagaccctccttttaccacctgagtgagattgtggagaatctgctgcctggacaatataaaaaggtgtgtttggatctgtgggtggaaaggtctggataaagctggaagttataccagtgagctgtgctgttccgcagttctagaggagcattttcaaaagaggcaaaagactgtgtgatccagtggctgggcttcatggcggtgctccacgagaccctagtagcaatgatgaatgaaaaccctccccttcccgtggggctttcctttcatcttatatgtrcagtacctgtaagcactattctccagatgtttgagtatcagaagttagtgtgcagttagaagactcagggcatccatggccattacatcactaatttgagtgcacttaaatccatgcgaaattggcttttaccagcggactggaaggaacaacctcagctgttatctgtggcaccagctggttttttgtggaatrggaagcattgttcaaaggaacaaatgtaatttcttggaaccaggcaggatatgtaaatgaatgaaacaactttctgctgaggtgttgagaggaaaactcagacataacctcagtttcttagattgagattagtccctgtgtagactttttatacttatcatttttcttccttcttctcaaggaggaatagtgttaggagattgtgtgccgaactggaagttaaatgcttctgtctgttaattatctcactgcccactacaactttcacaggtgaggcagtgaggaggcagaaggaaattaaccctcagttggtcaaagatgctctgactggtggaaatgtgttggtgggaagagattgaagttattgttgaaaatagggtcttttcacatccaatgtkagacctctccaatgtttaaggatcatgaaggctttgggtattatccacccaatagaaggcctcactgcctctctrtgggacccatccaagccctggaaaggcaacgtgatggggaccagaaggattctcagttgtagctactgacttggagaaggggctactggtatcttagcacctaatggcagaagctctttaccattggtggcccyttcttcatgttctatgtctctggggatagttgacatgactctccttcaactaagtcccacatcttccaggtagtttggaratatgtacagttaaataatrgtaagttctgagtgtctctattcatttttgaggtttggttgttaacacttgattaaatatgttcaatgaatgtttatagagttatgaaaaaattcacctggacttcctgaagagtgaccatcctgctgtggcacgcatgcgtgtggactcagacaatgcatacattggtgtcacctacaaaaacgaggaagacaagctgaaggactgggagggtggtctggatgagcagagactgagcgctgacagtggctacatcattcctctgcctgacattgaccctgtccctgaggaggaggacctgggcaagaggaacagacacaggtagctgtgggggcagcctcggtgtctcacctttcccctcccctataggccctgaaggagaggacccattttcccgataatggtgcactcccggttggtaaatatgtactcagggacaagttgcagaatcctcaggaggtccacgtggttttgaaaatgcttcccagatgattctaatatgttccccctggggctgggagagggatgtgcatgttgtggggagagggacatgcttccctggtggagaatctttgagctaaattctcaggtaatttgatcaaattgatacagaactgtgattactgagatcatataagcctctcctgccattgtcttaaatagtcattgaactggggaaaaagtgaagagaggcgggactgggtcctttgacgctataccctacctgtgaattkgaatcacctgcagagatttaaaaactgctgatctacaagcctcacccaaaacaacaaattagaatccctgggggtggtggccaactgctccctggctgatttgtttcttctttcttttaaattttgtattatggaagatttctaacgtgtgcacaattcacatagtatagtgagctgttcagtattcgtcacccagcttcaatgactatgccctctgccagcctggatgcacacatggccatgtctgtctctcctcagcctcctctggattgtttggaagcaaatcctagacaccttatcatttcacccataaatattccagtgtgtgtctcttaaagataagggctctattttaaagaagaacaacagttattaaaaataactacaatgccgttatctcacccaaaacagggacaataaatcgttaaggcatcaggcagccagttaaagttcaaattatctcacaaatattatcatactccattaaaaagtgggcagaggacataagcagacacttttcaaaagaagacakacctgcagccaacaagcatatgaaaaaatgctcaacatcactgatcactagagaaatgcaaatcagaaccgtgatgagataccatctcacaccagacagaatggttattattaaaaagtcaaaaaataacagatgctggtgaggttgtggagaaaaggggaagcgtatacactgcttgttgaagtgcaaattagttcagctattgtggaaagcagtgtggtgatttctcaaagaacttttaacagaattaccattggatccagcaatcccattactgggtatataaccaaaggaatataaatcattctaccataaagacatgcatacgtatgttcactgcagcactattcaacgatagcaaagacatggaatcatcctaaatgcccattgacagtagactggataaagaacatctggcacatatacaccatggaatactatgtgttgataaaaaagaacaagatctgagataccatctcccaccagtcagaatggctattatttaaaagtcaaaaagcaacagattgtggcgaggttgtggagaaaaagaaacacttttacaatgttggttggagtgtaaattagttcaaccattgtggaagacagtgtggcgattccccaaagacctagaggcagaaatactgtttgacccatcaatcccattactgagtatatacccagagtgatgtaaatcattctattataaaggcacatgaatgtgtatgttcactgctgcactgttcacaatagcaaaatcatggaatcaacctaaatgcccatcaatgatagactggataaagaaaatgtgatacatatacaccatggaatacgatgcagccgtaaaaaggwatgagatcatgtcctttgcagggacatggatggagctggaagccgttaccgtcagcaaactaacacaggaacagaaaaccaaacaccacatgttctcacttataagtgggagctgaacgatgaggacacatggacacatggagggaaacaacacacactggagcctttcaggggttggggattgggtggaacatcaggaagaatagctaatggatactgggcataatacctgggtgatgggatgatctgtgcggcaaaccaccatgacgcatgtttacccatgtaacaaacctgcacatcctgcatatgtacccctgaacttaaaaagtggaaaatacaaaaatgaaattaaaaaaagaacaagatcatgtcctttgcagcaacgtggatggagccggaggtcactatccttagcaaactaatacgggaacagaagaccagataccgcatgttctcacttataagtgggagctaaaacaacgagaacacatggacacaaagaggggaacaacagacaccagggcatagttgagggtgcagggtgggagaaggaagaggatcagaaaaaatacctatcggatactgtgcttattatttgggtgatgaaataatctgtacatcaaaccgccatgacatgtgatttatccatgtaacctgcacacgtgcccttgaacataaaataaaagttaaaaaaaaattatcatacacttgttttgttctgtctgagatccagataagagtcacacattgcacttggttgctatgtctctgtaagttcactatgcctctattttttgccctcttacatattatttgtgaagaaaccatagtgtttgcctgtggagttcccacaatcggcattttgctgattacatccttgaagtgtccttctcaggtgcttctgtcttctctatgtgttgtaaactggtagttagtctaggaacttaacctgactcaggttagatctttggcaaacatgcttcatagatggttctgtgtgcttctgtcaagaggtatgcactgtccagttgtctgccttttgtaacattatcagtcattgggtgatcattacctagaatttcttttttttttttttttttttgagatggagtctcgctctgtcacccaggctggagtgcagtggtgtgatctcagcttactgtaacctccacctcctgagttcaagccattctcatacctccgcctcctgagtagctgggattacaggcacatgccaccatgcccagctaatttttgtatttttagtagaaatggggtttcagcatgttggccaggctggttttgaactcctgacctcaagtgatctgccggtctcggcctcccaaggtgctgggattataggcatgaaccacctcacctggcctagattctttaactcagcaccaaggtggagctaatgcccaggcaggactgagaatcactggttgacgtggtcagatggaggagaccatgccccagttctccgctgtctttgcatggcccttggacagaggtaggagaaggtgatgatagtggcccctagttcaaggtccaagttgcttgtgtgtgtgtgtgtgtgtgtgtgtgtgtgtgtgttttcctcttctttcccatcagaacattattttggaggcttatgactgtgacctttgttaaccaatttaggtataatatgtagacagcccttgtttatttgtatggactgggtaattttgaaagtatggcttttctattttgttttagaatatgttatgtgatttgaagatgggacacagtggcccatcagtcttcggttttttattatgctttgctcaggccagtttttataacgtgtttatatctcttgagcatacggtgttcctccaagttttgggggtctgcgatggaacttcacgggggtcggggaaggctgggcagtgaatctagggctctctgtctcagatcctttctcaatttggttactttgtgtttgtgggctctgaataatatttgagttgtaagagggttctgcttttatataaagttagaaagtcacattggaataaataacatgagaaaggtgcccagaagttttctagggctacaacaggctgagctgcagaatttgacacgccaggaattgaactttctcagttgaagttcacgttcaagttaagtaacttgtgtggcatcacacagctagtaagtggggggaccattccagacctaaggctttctgactccagaactcccctttcagccacttctctagtacgtaaggagccgtcacctgggccctcaagttgggggttggtgggggggcatttgatgtcaagagagaggggaagagggcattccaggcaagtggcaggagatcctgagaacacagtttggatgctcaggaggcttccgggagagcacctgatgggcctggctgcagcttgcaccctgatgggcctgacttcaccccctgctctgccttcccaggcctttggatcaggcattgcttatgttctcttccactaggattgagtagggaaagtagaaattcttgcagcttgtcagtaactttgatgaaagacccagcagaaaagcaggaaagctgaagagtaaaaatgatgggtggaccttggttttccacgtggcctaccacagcatgtcaggcctgggggcagaatcttgccatactgtgcagcccaaatttgaatgccaaaggctttcgtttgtctctggggggccacagtctaggtctagttctgtgyaggagttgtaatatttgctcttctctccctcctccagctcgcagacctctgaagagagtgccattgagacgggttccagcagttccaccttcatcaagagagaggacgagaccattgaagacatcgacatgatggaygacatcggcatagactcttcagacctggtggaagacagcttcctgtaactggcggattcgaggggttccttccacttctggggccacctctggatcccgttcagaaaaccactttattgcaatgcrgaggttgagaggaggacttggttgatgtttaaagagaagttcccagccaagggcctcggggagcgttctaaatatgaatgaatgggatattttgaaatgaactttgtcagtgttgcctcttgcaatgcctcagtagcatctcagtggtgtgtgaagtttggagatagatggataagggaataataggccacagaaggtgaactttgtgcttcaaggacattggtgagagtccaacagacacaatttatactgcgacagaacttcagcattgtaattatgtaaataactctaaccamggctgtgtttagattgtattaactatcttctttggacttctgaagagaccactcaatccatccatgtacttccctcttgaaacctgatgtcagctgctgttgaactttttaaagaagtgcatgaaaaaccatttttgaaccttaaaaggtactggtactatagcattttgctatcttttttagtgttaaagagataaagaataataattaaccaaccttgtttaatagatttgggtcatttagaagcctgacaactcattttcatattgtaatctatgtttataatactactactgttatcagtaatgctaaatgtgtaataatgtaacatgatttccctccagagaaagcacaatttaaaacaatccttactaagtaggtgatgagtttgacagtttttgacatttatattaaataacatgtttctctataaagtatggtaatagctttagtgaatyaaatttagttgagcatagagaacaaagtaaaagtagtgttgtccaggaagtcagaatttttaactgtactgaataggttccccaatccatcgtattaaaaaacaattaactgccctctgaaataatgggattagaaacaaacaaaactcttaagtcctaaaagttctcaatgtagaggcataaacctgtgctgaacataacttctcatgtatattacccaatggaaaatataatgatcagcaaaaagactggatttgcagaagtttttttttttttcttcatgcctgatgaaagctttggcgaccccaatatatgtattttttgaatctatgaacctgaaaagggtcagaaggatgcccagacatcagcctccttctttcaccccttaccccaaagagaaagagtttgaaactcgagaccataaagatattctttagtggaggctggatgtgcattagcctggatcctcagttctcaaatgtgtgtggcagccaggatgactagatcctgggtttccatccttgagattctgaagtatgaagtctgagggaaaccagagtctgtatttttctaaactccctggctgttctgatcggccagttttcggaaacactgacttaggtttcaggaagttgccatgggaaacaaataatttgaactttggaacagggttggmattcaaccacgcaggaagcctactatttaaatccttggcttcaggttagtgacatttaatgccatctagctagcaattgcgaccttaatttaactttccagtcttagctgaggctgagaaagctaaagtttggttttgacaggttttccaaaagtaaagatgctacttcccactgtatgggggagattgaactttccccgtctcccgtcttctgcctcccactccataccccgccaaggaaaggcatgtacaaaaattatgcaattcagtgttccaagtctctgtgtaaccagctcagtgttttggtggaaaaaacattttaagttttactgataatttgaggttagatgggaggatgaattgtcacatctatccacactgtcaaacaggttggtgtgggttcattggcattctttgcaatactgcttaattgctgataccatatgaatgaaacatgggctgtgattactgcaatcactgtgctatcggcagatgatgctttggaagatgcagaagcaataataaagtacttgactacctactggtgtaatctcaatgcaagccccaactttcttatccaactttttcatagtaagtgcgaagactgagccagattggccaattaaaaacgaaaacctgactaggttctgtagagccaattagacttgaaatacgtttgtgtttctagaatcacagctcaagcattctgtttatcgctcactctcccttgtacagccttattttgttggtgctttgcattttgatattgctgtgagccttgcatgacatcatgaggccggatgaaacttctcagtccagcagtttccagtcctaacaaatgctcccacctgaatttgtatatgactgcatttgtgggtgtgtgtgtgttttcagcaaattccagatttgtttccttttggcctcctgcaaagtctccagaagaaaatttgccaatctttcctactttctatttttatgatgacaatcaaagccggcctgagaaacactatttgtgactttttaaacgattagtgatgtccttaaaatgtggtctgccaatctgtacaaaatggtcctatttttgtgaagagggacataagataaaatgatgttatacatcaatatgtatatatgtatttctatatagacttggagaatactgccaaaacatttatgacaagctgtatcactgccttcgtttatatttttttaactgtgataatccccacaggcacattaactgttgcacttttgaatgtccaaaatttatattttagaaataataaaaagaaagatacttacatgttcccaaaacaatggtgtggtgaatgtgtgagaaaaactaacttgatagggtctaccaatacaaaatgtattacgaatgcccctgttcatgtttttgttttaaaacgtgtaaatgaagatctttatatttcaataaatgatatataatttaaagttatactaaggtttcagcatttttgtttttagtttaatcataagaattaaagcaatcctgttctatttactttcttagcaacatttgtaggactctatattaggccttttttttttttttcctgagatggagttttgctcttgtcatccaggctggagtgcagtggcgtgatctcagttcactgcaacttctgcctcccgagttcaagcaattctcctgcctcagcctcccaagtagctgggattataggcgcctgccaccatgcctggctaatttttgtatttttagtagagatgggggtttcatcatgttggccgggctggtctcgaactcctgaccttagatgatctgcctgcctcggcctcccaaagtgctgggattacaggtgtgaaccaccacgcctggcctttattaggcttttgatgaaccaatagaatatctaaggtttaagacattatatgagctagattgttccacgacacagtatttgacttaaagatgattggcacttggctcatctttggtctcatcatttttttgattgttcatctttatcctgtggtgttttcttcccctgcataaggaatacaggactgcagtaactctgtacaacattcaactgtcgtaaaagtgtaggaagtaaaatgttaaattatttttttcaccgtgtcttcttccctgtccctgtcctgtttccaagaggcagagctgcaccacttggtgtgtcttttaaacttccagttccctttgtatgcatctgtgtatatatattcccatacacacatctctacgtttgcttcatatctacctaaatgggttctcactttatgtaatcctttgtaatgttcttttttctttcctttttaaaactatttattaaagcagttttagatttgcagtaaaattgagtagaaggtacagagatttcccctgtgtgccctgcccccacaccaacatagcatctccatcactaacattctccacctttgctacagctgatgaacctacattgccaaatcattacccataacacagtccacagttctgttttttttttaatgctgttttagcgatctctgtgaaaagtatacagaggtattagctccattggatcccattatgtaaatgtaccataatttatgcaatcatggtcttgtaaaatggatttacagtttccagttctttgctattaaaatgatttcatgaacatttttgcaacatacatatttgcatacaaaaatgtgttttgtagaatggatttctacaaatgaaattgctaggccaaagggtgtgcagaaataaattgatgttgagctgaagtcttcagataggattgatacataagttcttgagcatctgcacgtgaatcactggctttgcacattacatgcagttttctagtctctgctccacattgcccaggaatcatggtcttcaaaataggattggaagaaatacaatgtggtaagtgtgagagaatgtgggttttgtgttctgaagcatactgaagcaagtgactttaggaatttaaaaaaatggtacaactcaccttattttgagctcacggataatgaaaattgattatgttgttaataatcagaatatagcaccctattccaatataactccttatccaaattcaagtagcctgcagctggaagcatacttctttggagttaaacctccaaggagggattcagaagatcatggcatatgagaggcaagactagattgcagctcaggacagagcagcatgcagcagcttgcattgtgaattttagctccagatcctgagaggacccacagaccctctgatggaagtggacttctcctgcaggaccggggagacaccccaaatattgtgagttgccccaaatgcggaagtggtacagggagaccctcctctaccgaatgcgcagtcccactggagcagctgaagttttgcttgcgggagaagtttctgactttacctcaagctgagtcaagttagagagctgagcaaaatacaggggtggaggaagcagcagaaaggccctgggagctcgctgagtccccaagcagcccattcctgcctggcaccacagggatccatagggagggtggccagaggagcagggggtaaaactccacagggagaaggaaatctctagctgaactttgtaacaatttgaaaggggcaagaagcttcctggccggaactcgggggagggtgcaaatcgggcgtacagacttcacaggcagaggaagaactaaagcccttttctctcccagctgggaggaggatagccttgggcaagttttcaagcccatcttgccctctgcctggaaacagactcagggctgttgaggtgggcagggtgggagtgagacaagcccttcggtttgtgggggagctgggtgaggcttgtgactgccggctttcccctacttgcctgacaacctgcatgactcagcggagacagccataatcctcctaggtgcacaactccagtgacctgggaatctcactcccatttccccccagcagcctcagcaagacttgcccaaggagagtctgagctcagacatgcctagcctcacccgcacctgatggtcctttcctatccacgctggtagcataagacaaaggacataatcttgggaattctagggctccgccctccactggttcctctccacactactatagctgatgcttcctgggaagtaccaccttctggcaggaggccaaccagcacaaagataaagcattaaaccaccaagactaaggaccctcatggagtccattgcactgtccaccacctccaccagaacaagcactggtatacatggctgagagacccatagatggttcacrtcacaggactctgtgcagacaacccccagtaccagcccagagctgggtagactaattgggtggctagacccagaagagagaaaacaaccactgcagtttagctcataggaagccacatccataggaaaagggggagagtactacatcaaaggaacacccagtgggacaaaagaatctgaacaacagccttcagccctataccttccctctgacagagcctacccaaatgagaagaaaccagaaaaccaaccctggtaataggacaaaacaaggctcttcaacacctcccaaaatcacactagttcaccagcaatggatccaaaccaagaagaaatcctgatttacttgaaaaagaattcaagaagttagttattaagcttatcagggagggaccagaagaaggtgaagctcaatgcaaggaaatctaaaaaatgatataagaagtgaagagagaaatactcatggaaatagatagcttaaggaaaaaacaataaaaaattcaggaaactttggacacacttttagaaatgtgaaatgctctggaaagtctcagcaatagaattgaacaagtagaagaaagaactttagagctcaaagacaaggtcctcagattaacccaatccaacaaagacaaagaaagaagaataagatgcagccataaaaaaggatgagttcatgtcctttgcagagacatggatgaagctggaaaccatcattctaagcaaactattacaaggacagaaaaccaaacaccacatgttctcactcataggtgggagctgaacaacaagaacacatgaacacaggcgggggggaacatcacacatcagagcctgtcagggggtgggggsccgggggagagatagcattaggagaaacacctaatgtaaatgacgagttgatgggtgcagcaaaccaacatggcacatgtatacctatgtaacaaacccgcacattgtgcacatgtaccccagaacttaaagcataataataaaaaaaagaaaaaagaataatatgaacaaagcctccaagaaatctggaattgtgttaaacaaccaaatataagaataattgttgttcctgaggaagaagacaattctaaaagcttagaaaacatacttgggggaataatggaggaaaacatccctggccttgtgagatactagacagccatatacaagaagcataaagaacacctgggaaattcactgcaaaaagatcttcacctaggcacattgtcatcagattatccaaagttaagaccaaggaaagaatcttaatagctgtgagacagaagcacaaaggaaaacctatcagattaatggcagatttctcagcagaaaccctacaagctagaagggattggggcactatcttcagcctcctcaaacaaaacattttatcggccaagaattttgtatccagcaaaactaagcatcatatatgaaggaaagatacagttgttttcagacaaataaatgctgagcgaattcaccattatcaaactaccactataagaactgctaaaaggaaccctaaattttgaaacaaatcctggaaacacattgaaacagaacgtctttaaagaataaatcacatagggcctgtaaaacaaaaatacaatttaaaaagcaaaaacaacaaacaaaaaaccaaaccacagaggcaacaaagagcatgatggaagcaacagtacatcacatttcaatactaacattgaatgtaaatggcctaaatgctctacttaaaagatacagaaccacagagtgggtaagaattcaccaactaactatctactgccttcaagagactcacctaacacataaggacttacacagaattaaagtaaaagaatggaaaggggcattttgtgcaaatggacaccaaaatcgagcaggggtaactattcttatatcagaaaaaaacaaacaaacactttaaagcaacagcagttaaaagagacaaagagggacattatataatggtaaaaggccttgtccaacaggaaaatatcacaatcttaaacatatatgcacctaacactggagatcacaaacttataaaacaattactaatagtcctaagaaatgagatagacagcaacgcaataatagtgggggacttcaatactccactgacagcactagacaggtcatcaagacggaaagtcaacaaagaagcaatggatttaaactatactttggaacaaatggacctaacagatatatacaaaacatttcatccaacaacctcagaatacacattttattcaacagcatatggaactttctccaagatagaccatatgataggccataaaataagcctcaataaatttaagaaaattgaaattatatcaagtactctctcagaccacagtgaaataaaactggaaatcaactctaaaaggaatcttcaaaaccattcaaatacatggaaattaaataacctgctcctgaacgagcattgggtcaaaaacaaaatcaagatggaagtttaaaaattctttgaactgaatgccaataacgacacaaccaatcaaaacctctgggatacaacaaaggcagtgctaagagtaaagttcatagccataaatgcctacatcaaaaagcttgaaaaagcacagacaacctaaagtcacatctcaaggaactagagaaacaagaacaaacaaaacctaaacccagtacaagaagaaaataaccaagagcagaactaaataaaattataaccaaaaaaaagataaatgaaacaaaaagctgatcctttgagaacataaataaaatagaccattagcaagattaaccaagaaaagaagagagaaaatccaaataacctcactaaaaaacaaaacaggagatattacaactgacaccactgaaatacaaaagatcatttaaggctactatgaacacctttatgtacataaactagaaaacctagaagagatggataaattcctggaaaaatacaatcctcgtggcctaaatcaggaagaattagatatgctgaacagaccaataacaagtagtgagattgaaatagtaattaagaaattataaaccaaaaaaagtccaggaccagatggattcacagcagaattctaccagacattcaaagaagatttggtatcaatccttttgacac

SEQ ID NO: 8761 - DNA, 20309 bp, Homo sapiens
caccgtgtcactctgtgacctgtcccatggatcctgaaactgcatcttggccctgttgcctgggctgacaggagcattttttttttttccagtaaacaaaacctgaaagcaagcaacaaaacatacactttgtcagagaagaaaaaaatgccttaactataaaaagcggagaaatggaaacatatcactcaagggggatgctgtggaaacctggcttattcttctaaagccaccagcaaattgtgcctaagcgaaatattttttttaaggaaaataaaaacattagttacaagattttttttttcttaatgtagatgaaamttagcaaggatgctgcctttggtctctggtttttttaagctttttttgcatatgttttgtaagcaacaaatttttttgtataaaagtcccgtgtctctcgctatttctgctgctgttcctagactgagcattgcatttcttgatcaaccagatgattaaacgttgtattaaaaagaccccgtgtaaacctgagcccccccgtccccccccccccccggaagccactgcacacagacagaacggggacaggcggcgggtcttttgtttttttgatgttgggggttctcttggttttgtcatgtggaaagtgatgcgtgggcgttccctgatgaaggcaccttggggcttccctgccgcatcctctcccctcaggaaggggactgacctgggcttgggggaagggacgtcagcaaggtggctctgaccctcccaggtgactctgccaagcagctgtggcccccagggctaccctacacaacgccctccccaggcccccctaagctgctctcccttggaacctgcacagctctctgaaatggggcattttgttgggaccagtgacccctggcatggggaccacaccytggagcccggtgctggggacctcctggacaccctgtccttcactcctttgccccagggacccaggctcatgctctgaactctggctgagaggatgctgctcaggagccagcacaggacaccccccaccccaccccaccatgtccccattacaccagagggccatcgtgacgtagacaggatgccaggggcctggccagcctcccccaatgctggggagcatccctgggcctggggccacacctgctgccctccctctgtgtggtccaagggcaagagtggctggagccgggggactgtgctggtctgagccccacgaaggccttgggctgtgcgtccgaccctgctgcagaaccagcagggtgtcccctcgggcccatctgtgtcccatgtcccagcacccaggcctctctccaggtctccttttctggtcttttgccatgagggtaaccagctcttcccagctggctggggactgtcttgggtttaaaactgcaagtctcctaccctgggatcccatccagttccacacgaactagggcagtggtcactgtggcacccaggtgtgggcctggctagctgggggccttcatgtgcccttcatgcccctccctgcattgaggccttgtggacccctgggctggctgtgttcatccccgctgcaggtcgggcgtctccccccgtgccactcctgagactcccaccgttacccccaggagatcctggactgcctgactcccctccccagactggcttgggagcctgggccccatggtagatgcaagggaaacctcaaggccagctcaatgcctggtatctgcccccagtccaggccaggcggaggggaggggctgtccggctgcctctcccttctcggtggcttcccctacgccctgggagtttgatctcttaagggaacttgcctctccctcttgttttgctcctggccctgcccctaggtctgggtgggcagtggccccatagcctctggaactgtgcgttctgcatagaattcaaacgagattcacccagcgcgaggaggaagaaacagcagttcctgggaaccacaattatggggggtggggggtgtgatctgagtgcctcaagatggttttcaaaaaaatttttttaaagaaaataattgtatacgtgtcaacacagctggctggatgattgggactttaaaacgaccctctttcaggtggattcagagacctgtcctgtatataacagcactgtagcaataaacgtgacattttataacgatgccctgcagtccccgggttctttctggtgtcacatgtttaggaagggaagtgggggggggccctgacgttcacctcgggtgcagcaaggaccgtggtccaccctgtgcactgggcttcctcgaagcgactcctcactctgaggagcccatggctcccagggcggctgggaacctgcatgtgtactcagggctccaggccacctggaagcaggattggctcccggggaaaagcagctccctgggggctgcacttgggcgcgtaggaaccatccaggacctgcggtcctcccagcccccatctgggagggctccccatctcccaacgtcccccccccgggctgttggaacccacttccctgccccttcctgctccgaagtcggctcgaagtctgagtctgtcactgctcctctgaaaccttccacggctccgttgctggcagcgtcaaccccacactccttagtgcggcatctgtgacttcctccacaaccggatgcccacggaacccacggacagagctctcggggggaaggggtgtggcaggacctgtgggggcgctgctcatcccaaagtgcccactggcaggcatctgctgctgtgcccagggacttggccgctgcatctctgcgaggacacagctggactgccctgctcccctacagggttggggtggaaggagtgccttcctggccacttgacggggggtggcccccaggagagagccctttggcacacaagtgccttagggaggagaaggctcagcacagtgactcatatctgtaatcccagcacttcaggtggctgaggcgggaggatcgcctgaggccaggagttccagtccagcctgggcaacatagtgagaccccatgtctataatttttaagggaaagagagtggccaggagttgacagaaggtgctgagggagccctgtccaccactctacccagctggcctctaaattcatgctggaaaacaacttttaaaatatacattggccgggcgcggtggctaacgcctgtcatcccagcactttgggaggctgtggcgggtggatcacttgaggtcaggagttcgagaccggcctggccaacatggcgaaatcccatctctactaaaaatacaaaaattagccgggcatggtggcgcaagcctgtaatcccagctatttgggaggctgaggcaggagaatagcttgaacccaggaggcagggattgcagtgagctgagattgcaccactgcactctagcctgggcgacagagcgagactgtctcaaaaaatcaaaattaaattggttgtacctggtgacacacacttgtagtcccagctacttaggaggttcaggtgggaggatcgcttgaggtggcagtgaactgtgattgcaccactgcactccagcctgggcaacagagccagaacctgtcaaaaaaaaagggtgggccaggtgcagtggctcatgcctgtaatcccagcactttgggaggccaaggcgggcggatcacgaggtcaggagatcgagaccatcctggctaacggtgaaaccccatctctactaaaaatacaaaaaattagccaggcgtggtggcgggcacctgtagtcccagctactcggtaggctgaggcaggagaatggcgtgaacctgggaggcggagcttgcagtgagccaagatcataccactacactccagcctgcagcctgggcgacagcaagactccgtttcaaaaaaaaagggtggaggggacatccagatggtccaacaaaataacaaaaaccggctcaagaaacaaaaaggaagttctatgtcatgttgaatggcttcaggcacagctggatccaggtgtcattacaaatctctctccatctctcagctcttgtttatgtcactgtctctgatgaactcttttttttgtctgtttgttttgagacggagtttcactcttgttgcccaggctgcagtgcaatggcgtgatctcggctcaccgcaacctctgcctcccgggttttcaagcaattttcctgcctcagcctcccgagtagctggaattacaggcatccgtcaccatgtccggttaattttgtatttttagtagagatggggtttctccatgttggtcacgctggtctcgaactcccagtctcaggtgatctgcccgcctcaacctcccaaagtgctgggattataggcgtgagccaccgtgcccggccactggtgaactcttacattgtggcatctggaaactctgggctgacattccagcagcccttgtgttcctgtcctttctcttaatagtctctgtgtcagcccctgcatcccacttttttaagtttccaccaatgggaagagtcttattcaggtgctctctgatcccaagctcaaaaaccccaagccaactggaaagttctacaaacaatgcccagggccgggcccggtggcttacacctgtaatcccagcattttgggaggcggatcacttgaggtcaggaattcaagacaagcctggccaacatggccaaaccccatctctactaaaaatacaaaaactagccaggtgtggtggctcacgcctgtagtcccagctacttgggaggctgaggcaggagaagcttgaacccgggaagcggaggttgcagtgagccgagatcgtgtcattgcactccagcctgggccacagagcgagactccgtctcaaaaaaaaaaagaaagaaaaacagtgcccagactgtggtgtccaaaacctatttccggctcccaccctgagtccttaaccagggatagggatgggttagcacccgcagtccccagagagctgcaggcttggggtgtactgaggggctgaccccaggaggacaggccaggctgggcagaagaacccacggtgtccattccttatcacgaggcctgcaagtgacgctggcgcccgagagacaaatcacgcccagtgccccgtctaggctatggcctttccgttcatgctgtaaaggtgcctgtgggtcaggcagtccaggagggcttcctgagggaggcaactcttgaatatgggggaaaaggcacaaaagtgcaatggcggtgtctgggaatatgcccctcttccttctgcccacaccggcccggtgtgcaggggggaggctggaagctgggagctgagtgagcatgtacggtgctgcgccgggttgtgggagagcagaggaagcagggactggagaaaggcgagcccaagcgagcctggtgcggtggaaagcaggaggcagaaagacctgcctgtcatcagctaagagcatccagagacgttcaccgagcaaggagccaggccaccctctgctgccggaatgaggaataacccaggctcgcaaacggaatcctgcaaagagatttccgacagggcctccaagcaacgggcaacgctgaggctcagggaagcactgccgctcgaccaaagtcctacagcgaatcaggaacaacgcctgacgcctccaaaagtgggctccaatcccagctcttcccctctgtgtgactctgagcaagacccttccccgctggacctcagtttccttcattgtaaataacgttctggcacatactaggcgcacaaaatcactggcaggtagccccgcggagcccagaagcacaatcggccgccagaccacgtggccagaaagcmccgccctaacgccgcccactccggaccacttctccgcggtcgtccaaccctcgccggaagttactgtaagtggcttccgggtctgcgcgcacagtggcggatgatgtttttttttccttcccccccccccgccctccccgcgcgcgtgcgcgccgcggccgcgcctgcgcagtgtagccgggtcagctggacagggtcatcctgagggtgcgactccgccgcgatggtgacccggttcctgggcccacgctaccgggagctggtcaagaactggtgaggacgccgacccgcggccccatccgcgctcccgcctcggcccagccccgcgccgctgcgttccgtatttgtgcgcgtttccgggggccgggccgggccgggcccaggtcccttgttgttcccggtgacagagggggaaactgaggccgagaggcggagcggcgcgtcccggcgtgaacgggacgtgacggacccaaggccaaaccccagcatgcccggctccgcggctaggccgctccaagcctcagtttccccatctctaccgggggatccgaatggtgaccccctggacggaagcgcccagaaggtgccgagtcccgatccccagcccagcactcgcggcatcttcggcctttgccactattttggtttttatgatttttaacaaggagcgtgaaagcttcagctgcgcctgagcccacgtgggcagcgggacggcataggggtggcccccatagaagccgggctgggggtggcctccgtagggttgtctggtgtttccacgtggggtgctaagaagcaaggcctggctgggtgcggtggctcccgcctgtgatcccagcgctttgtgaggccgaggcaggtggatcacctgaggtcaggagttcgagaccagcctggccaacgtggtgaaacccgcgtctctactaaaaatgcaaaaattagccaggcgtggtggcgggtgcctctaatcccagctactcgggaggctgaggaaggagaatcgcttgaacccgggaggaggaggttgcagtgagctgagattgcgccattgcactccagcctgggtgacagaatgagactgtgtcccaaaaagagaaaagaaaaaaaaagcagcaaggtcttagccgggtgcagtggctccggcctgtgatcccagtgctttgggaggcccaggcaggagaatcacttgagcctgggagttcaagaccatcctggacaacacaatgaaaccccatctctacaaaacaaaaaattatcagggcatggtggcacctgtctgtagtcccagctactggggaggctaaggtgggaggatcgtttgagcctgggaatttgagaccagcctgggcaacacagcaagaccttatctctacaaaaaaatttagagctgctgggcgcagtgactcacgcctgtaatcccaacactttgggaggccaaggcgggcgaatcacccgaggtcaggagtttgagaccaacctgaccaacatggagaaaccccgtctctactgaaaatacaaaattagccaagtatggtggcgcgtgcctgtaatcccagctacttgggaggctgaggcaggagaatcgctcaaacccgggaggtggaggttgtggtgagctgagattgtgccattgcattccagcctgggcaacaagagcgaaactccgtttctaaaaaagaaaaaagcaaaggcttatgattggcagtgtctccggaagccagaacatacttcctctatcccagactgggggacaggtcggggacagggtctgcacggtggagctgactgggaccttcaagtggaatgtgatggtgccggtggcgttttacagcgtgggtaactcaggcctgggatgaggaagcctgctcctagctgagaacccagtggcccatggtagccagtgcagcccctcccgggtgcagcaggtctgcttcttctgtgttcagtcacagcggggaccacccgtcatccgtgctttcatccaacagcaagcatttatttatttatttattcatttatttatttagagacggagtcttgctctgtcgccccggctggagtgcagtggcgcaatctcggctcactgcaagctccgcctcccgggttcacgccattctcctgcctcagcctcccataagtagctgggactacaggcgcccgccaccacgcccggctaattttttttgtattttttagtggagatggggtttcaccgtgttagccaggatggtcacgatcttctgacctcgtgatccacctgcctcggcctcccaaagttctgggattacaggcatgagccactgcgcccagcccaacatttattgagcacctactatgtgttagggacgcgccaatagaccgaacccttgtgggcrgacattctggttggtgggcaaggaaaggtaaagaaacgagacctgtggtgtggggctgacctaaaataacgaagcgggagaggaaggggtgcagacacgtgcgtgcgaggggccgtgcagggctgtgccaccaggcagtggctttgggaggctagggagcgggtctcatccccaggaggcactgtggggttgtgtctcagagtctcagacttaggactgagagggccacagttcaccagctggggaccctgcagtccacaccccttctaggccctgctggggcttgctttgaggaaggggttgtcgtggcgacgaggtcgttggtcagtgtggtcatggtctgtacgtccttcctcagtggctagtggaaatcaggttttgtgggctcttcccacactgtccaaatccacagggtcctacatggggtgaccaggatgataggggaggcggaggccggcccactgggcatatttatgagcaggcttctctggtgattaataacccagggctgggcgcagtggctcacgcgtgtaatcccagaaccttgagaggctgaggtgggtggatcccttgaggtcaggagttcgagaagagcctggccaacaaggtgaaaccctgtctctactaaaaatacaaaaattagtcgggcgcggtagtggacacctgtaatcccagcttcatgggargctgagacaagagaatcacttgaacctgggaggcgggggttgccgtgagctgagattgcgtcattgcactccagcctgggtgacagagcgagattctatctcaaaataaataataaataaataaataaataaataacttatccagaatgccatcaagacaacacgtgcgaagattcctgccctgttggtggcatctgcctccgagccaggttccaggagcagctgtgcgtgcccccagctggtgagcgggcacctggcctacacttggagastctctggtgaggccccttggggcaatgtgggcagggtttcttcatccgcctccaggaggagcaccccctaccgccccaacatcccagctgtgtgatttgctrtgayccagggaggtgaatcggatttttttttttcttccgagacagagtctcactgtcgcccaagctagagtgcagtggcacgatctcggctcactgcaacctcgacctacagagttcaagtgattctcctgcctcagcctccccagtagctgggactacaggtgcgcaccaccacaccgggctagtttttatatttttagtagagatgaggtttcaccatgttggccaggctggtctagaattcctgacctcaggtgatccacccgcctcggcctccsgaagtgctgggattacaggtgtgaaccgccgcaccccgcccggaattggattttaatttcagccctctgttggccagcagtgggacctgcaattgttatctagtgctgtgtgcataagaaatggtctcccaaaattagccgcttaaactagcaaatgctgcttatctcacagtttcagtgggtgcactgagtcaactcctcaggctctcttgtgaggctgcagtctcatccgagggtgtgaccaggcagatccgtttccacgatcactcacggggttgttggctggattcatttatttcttcctttttttttttttttttgagmcggtgtctcgctctgtcaccaggctggagtacaatggcatgatctaagctcactgcaagctccgcctcccgggttcatgccattctcctgcctcagcctcccaagtagctgggactacaggcgcccgccaccttgcctggctaattttttatatttttagtagaatggggttttaccatgttagccaggatggtccctatctcctgacctcatgatccgcccacctcaccctcccaaagtgctgggattacaggcgtgagccaccatgcccggccctcatttccttcttagctggaggctgccgtcagttctctgccacatgggtcccttcatagggcatctcacagcatggcagctggcttctccagaggcagctagaggttgcacaaaggtgcccaggatggaagccagtctttttcttttttttgagacggagtctcactttgtcacccaggctagagagcaatggtgcaatcttggctcactgcaacctccacctcctgggttcaagccattctcccgcctcagcctcccaagtagctgggattacaggcacccaccaccatgcccggctaatttttgtatttttagtagagatggggtttcaccatgtttcccaggctggtcttgaactcctgacctcaggtgatctgcccgcctcagcctctcaaagtgctgggattacaggcgtgagccaccacgcccagcctctttttcttttttaattttttttgagatatggtctcatatttaccgaggctggaaggcagttggtgtagccacagcctctgcttcctgggctcaagagatcctcctgccccagctttcctagtagctgagactactggcatgtgccaccacacccggctaatttttcttaattttgtgtagagatggggtctcactctgttgtctaggctggtctcaaactcctaggctcaagtgagcctcctgcctcaacctcccaaagtgctgggattccccttgtgagcctccatgtctgaagccagtcttttgtcacttgacctcggcagtgatgccccattgctcatgctgcgttctactcattagaagcctgtgcccggccgggcgcggtggctcacgcctgtaatcccagcactttgggaggccgaggcgggcggatcacgaggtcaggagattgagaccatcctggctaacacggtgaaaccccatctctactaaaaatgcaaaaaattagccaggcgcagtgacgggcgcctgtagtcccagctactcgggaggctgaggcaggagaattgcttgaacccgggaggtggagattgcagtgagccgagatcacgccactgcactccagcttggtgacagagcaagactccgtctcaaaaaaaaaaaaaaaaaaaaaaagaagcctgtgcccaagttcatactgtgcgagggcgtaaacgccagcaggcgggtttgctgggccttcctagaatctgctgggccttcctagaatctgctgggccttcctagaatctgctgggcccaggcaactcaggggagctctcacagcacgtgccgtggtgggcaagagcrtgagcttggaaccggaggcctcgatcctcgccagctgtgtggcctcaggtgagggcctcgccctgtctgttgtttggtgtcctcgcctgggaacagggactgtgatggcggcacctgcctgagtcctgcagctgtggcagggatggatgaatttctgcagactgcmgcagaccggacccatcatcatggtggttgcaaacttacaaacacctacacatgcgccaggcccagcctccccccagctccactcccaccccagcagccccttgagcagttactggcttcctgagagccggcagcatgggcagggcctgtgctgctggtgccagccctcagggctcacagcactgggcgggcacaggtgccaggcccgcacctcagccatcaccgctcaggacggggggccggggtgggcaggagagggtcttggagaaagggtccagagcaggcctgaccatcccctctcctctcgcagggtcccgacggcctacacatggggcgctgtgggcgccgtggggctggtgtgggccaccgattggcggctgatcctggactgggtaccttacatcaatggcaagtttaagaaggataattaattacacaaacccttcacagactgctctggtaagtttcagtgggctgcggtgggtggactgcatgatggccggatggtggccgaagagtgggttctccaggctcccagagccggggcggcagccctcactgctccccctggagagacctgcattcgagagtggggccctgggtgccccttctggcatctccggcccacgggcacagaactgtccgccccgcagccttgggttgtgtgattggggtgtgggcctcgccctccctctggacaatcccagtgagtctttgaggcaaaccttgcttccgtctcagtgggcactgcagcctgaactgggtggggcccatgttacagacagagggggaaggtggaggctggcccacagtggctggacaccccatgagctcttggaagcgcctgtgaggccctggacgcatccacgtgtttctccagcatgccagctgcccccttaaccacagtgcctgtggcatcttcccagtgcccacatgacagtcccacgtggccgtgctcttacacccccattttccaggtgctggcctgaggcctgaggccatgccactgtttgaacctgggcctcagagccctgctccggtctgtgtttctccctactgcgtggagcccggggcctgtgctgcattggtgttcctgccaggctgctgtcctgggccacttccgcagccagcttcatatggaagggacgtttctttttttttgagacggagtctcgctctgttgccagactggaatacggtggcgcgatctcagctcactgcaccctctgccttccaggttcaagcgattcttgtgcctcagcctcccaagtagctgggactacaggtgcccaccactacacgcagctaatttttttttttttttttgagacagagtttggctcttgttgcccaggctggagcgcaatgacgcgatcttggcgcactgcaacctccacctcccgggttcaagcgattctcctgcctcagcctcccaaggagctgggattacaggcatctgccaccacaccaggctaattctgtatttttagcagagatggggtttctccatgttaatcaagctggtctcaaactcctgacctcaggtgatgcgcccgcctcggcctcccaaagtgctgggattagaggcgtgagccactgcacccagcctggaagggacacttctactcaccctgcctcgtctgctctccctccaggtgcctggtggygctagctcctcccacctcagcacctgctgcatytggagcagcccaagcctcaggatggacaagaggaaacccmcagctcagcttcaggcttyttatgtttctgaaaacagcttggatattttaatgcacgttgcattaaacctcactgaaacctgmtccgtgcccggatgttgatcatgctggtggcttggttactgtgactgtagctggagtggcacaggtgacccaggcgtcctttcagctccagaatgttgcaagtctaggagagtgttccaatggctgacagaaactgcctatttgaaatggctcataagtagtatctgcagtgtgttcatccgttgctgccttaacaagtcacccacacgtagtggcttaaagcaacgaacattcactctctcacagtctgtgtcagtcggggatttgggagtgatgtatctgggtggttgtggcccagagtctctcatgaggttgcagttaagacatcagccaaggccacttcgtctgaggaaggctcaactggggctggagccacttccaagccagtgccctcacgtggctgtcggtgacagccacagttccttcccatgggggcccctacacgaagctgcttgagcatcctcacggcatggcctctgccttccccagagcaggtgaaccaagggagaggaaggagcaagccacagtgcttctatgagccaccctgagaagtctcacgtgatcacttccgccacagcctgtttatcaaaagcaagccccccaggcccagcccacgtgcagagggaggagaatgaggttctgtgttttgaagggaagaatatcagaattggtagacatttcaaactgtcacattagggatacaaaaatgaacaggctgggagtggtggctcagcctacaatcccracactttgggaggctgaggaaggggcatcacttgaaccaggagttcagtactaacctgggcaacaaagaggcccctgtctctgataaaaaraaaaaaaatgaaaaaataaaaatgaacaggtataaaaagagaatatggtacaaagtcacactccctgatacagctgcccagttttttccagctcttgccaatctctgagccgacattgcaccactgcactctagcttgggcaacagagtgagactcaaaaaaaaaaaaaaatcctagacatactgtctgcatacataagtgtgttgatggaaatagctattatatcagtctgctagggctgccataacaaaataccacagattttgcatggctcaaccaacagaaatttattttacttattcttttttaaaagacagtcttgctctatcgcccaggctggagtgccgtggcacgctcttggctcactgcaacctccgcctcctgggttcaagcgattctcctgcctcagcctcccaaagtgctgggattaacagctgtgagccactgcaccaagcctatttatttatttatttttggagatggaatcttactgtgtcacccaggttggagtgcagtggcatgatcttggctcactgcaacctctgccttcagggttcaagcgattcttctgcctcagcctcccgagtagctgggattacaggtgcctgccaccacgccctgctaatttttgtatttttagtagagatggggttttgccatgttggccaggctagtcttgaaatgacctcaggtgatctgcccacctcagcctcccaaagtgctgggattacaggcgggagccactgtgcccggccagattttgttctgatttttaaaaaaacattggccaggggtctgtgcgtggtggctcacgcaccactgcactccagtctgggtgacagagccagactctgtctcaaaaaatatataaaaatttaaaaaaaaaaattgtctgcaggctaagtgtagtggcccacacctgtaatcccagtactttgggaggccacagtgagaggattgctggagcccagaagtttgaggctgtggtgagccgtgattgtgccactgcactccagactgggtggcagagtgagaccctgtctcaaaaaagaaattgtgtgacttgagccctgaatctgtaggttaccagaccccagtagcagtgagcttcccctgcctatttctgtatctgctgtcctggtacttaagtcccgaaagggaaggcagagacttcagcatggtggcactgaggccctcgccagcccaggaggtgacaggagccagactggcggatggggtcctgtgtttgttgccacagtgagtcactggactccactgtaaagaggagcagtctcgtggtcccatcagccatttattcagtcatttatttctaccagcatccactcgaggacattttttctttttccttttttttttttttgagacagagtctcgatctgtcgcccaggctggagtgcagtggcgcgatctcagctcactgcaacctctgcctcccaggttcaagcgattctcctgcctcagcctcccgagtagctgggactacaggcgcccgccaccaagcccagctaattttttgtattttttagtagacacggggtttcaccgtgttagccaggatggtctctatctcctgacctcatgatccacccgccttggcctcccaaagtgctgggattacaggcatgagccaccacacccggccttgatgacattttttctacagactataaatcctttataaactttaattttgttgctcaagttgtcctctctgtttggccatcgtgaccccttccaaatgggctcctgtgtgcacatgatatgtcccgggtcactttttttgttattgaggtgaaattcacataacataaaattaaccattttcaggtgtgcaatgcagtgctttaatacattcacactggtatgcagccactgcgcccagcctggaattggccattttaaagactattttattgacttacttattttagacaaggtctcgctctaccacccaggctggagtgcattgtcacaatcatagcccaattttaaaaataatcttggccgggcgcggtggctcacgcctataatcccaggactctgggaggccaaggcaggcggatcacctgaggtcgggagtttgagaccagcctgaccaacatggagaaaccccgtctccactaaaaatacaaaattagccgggcatggtggcgggtgccaccataataatcatctcccttgcatgggggcaggccttgcactggctgccctagtcaagtaatcccagctacttggaaggctgaggcaggagaatcgcttgaactcgggaggcggaggctgcagtgagccgagatcgcgccgctgcactccagcctgagcaacaagagcgaaactccgtctcaaaaaaaacacaaataattaaattaaaaaaataataataatctcccagccgggcgtggtggctggcgcctgtgatcccagcactttgggaggctgaggcaggcacattgcttgagctcaggaggttacagtgagccaagatcacgccactgcactccagcctaggcaacaaagtgaaaccctgtctcaaaacataattatcatctcccttgcatgggggcaggccttgctctggctgccctagtcaggtaccacggctggttctggggtgtaactgcctggctttgagtccacagcatagactttcctgtctccttgggagcactgattcttccatggcagcccaatgccatggggcctcggtctcaggccagtaaccagctcctgagcttctcgggagacagagctggctgtctcacacctcacctcacctcacgacgaggtggggtgagcggggcatccgaccatcatccacccatccatcctgatttattcagtgcttctgtggtcagcacaacatcccgaaaatgtgcccgttccgtcggccgctgtggctcacacctggaaccccagcacttagggaggccgaggtgggcggatcacttgaggtcaggagttcgaaaccagctggccaacaaggtcaaatcccatctcttctaaaaattcaaaaaaattagccgggcatggtggtgggcgcctgtagtcccagctacttgggaggctgaggcaggagaattacttgaacccgggaggtggaggttgcagtgagccgagatcacgccattgcactcgagcctgggcaacagagcaagactctgtctccatcagtcagtcaatcaatcaataaatgaatgtgcctgtcctactccctggaacctgcagctaaagggactttgaaaatgggacgagatcttcagatgggaaagcatcccagatcgggtggacccaatgtcaacaaaagagtccttagaaccaggacagtttctccagctggaggcaggggagcacagcagctagactcagtccttgaacacctgtgcaggcccgcccagccctagccttgggagcgacgctgtcagggggaactgatggggggcagcccacccgtttccatttcaggatccctctggctggctggggaaggggttaaggggagacaacagggggtgggcgattccgcaggaaggtcctggaactctcccggccagagatggtggctggactaaggtgcagggggtggtcggggagctgggggggggtgctcagattcctggattttgagggttcaaaaagcagctggacggggcgcagtggctcacgcctgtaatcccagcgctttgggaggccgaagtgggctgatcacctgaagtaaggagttcgagtccagcctggccaacatggtgaaatcccgtctctactaaaactacaaaaattagccgtccgtggaaccagctacttgggaggctgaggcataacaacttgaacccgggaggcggaggctacagtgagccaagatcgcgcctctgcactccagcctgggtgacagagaccccgtctcaaaaaaaaaaaagctactggagggaacttgggggcgtggaaggggtggtcacgggggaagtcccccagatttggacgctcgtaaaaagctcggaagctgggagaccaggagggcggggaagtcgaggtccagtcactgggccagagtccccaagacttgggctggagaaaggtcggaggaaaggaccccactagtccgaaagcatgtccccgcgcacgcgcaccaggcggccggcagagacagggcacagtaaaaggagccgcgcggactccgggcacagctgctgggcactggcagctcgcaaggcacagcgcgcaggcgcgcacgccacttaaggccccgccccctcccagcgcgctgattggcggggccgtagaggggcgggggcatggcgccgcggctgcgcagcgcggggccccgcgcgggcgggtgggcggagcgggccccccgagcgggggctggcgagcgcggggagggggccgaaagggcggcaaagccggcgcgcgcccggctgggggcggagggcgggggcccgcgggccggaacagccgcggcaagtggcggcggcggcagcggcagcggaggcagctgaggcggcggcggcgagtgggggtccgggcggcggcggcgggcccggcggcgggccgaggagccgggcgcaatggagcggaagaggtgggagtgcccggcgctcccgcagggctgggagagggaagaagtgcccagaaggtcggggctgtcggccggccacagggatgtcttttactataggtgaatgagcgcgccggccgcgcagggcctcaacgggctcctcccagcggcctctgcggcggcctcggcgcccctgccccgggccgcggcctgggccccgcgcgtgcgtcgtgcgtgcgtgcgtgcgtcttgcgtgcgtgtgcgcccggcgcgcggaggcccagtgcgcgtgcgccgcttgttgggccgcatggctttcggccggccgttcagggactggctgccggacggcgactgcggcctttgttcgtgcgcgctgggccaggggcgcctggcggcggccagatgctaccggggggcaggggtggagggtgggctgtccctttggttcccgtgagacgcagggggtgccttcttggggcgctcctggggtggcgcggagcccgagggggtggccagccgggatttcggggagcagggctcatgggcggatcggggagggcgtgcgtgaaaatacgggttcttgggctcgccccagtcctgggaataagcgcctcagggtgactggtctcccacgcagcgttgctttttttaaaggtattccccttgactccttccgaggcctctggtcctcttgggtcgtggccccctcagggtggagacctgaggctttcgactttccgagcccacctaacggtagtctttgcgtggatgttactggtggtggaaggctttcagagacccccccgtccccaaattggaacaaggcgctgctctgaaaggtcgcagggaaccccctccgtggaacaaagacttagtcgcctgctgcagccaagtcccagacagtcggccacctgctgtttgtcctcttttttttttttttcctggctcgggaaagatgcttttgattctgggccagctttgattgcgccctccccttggttcagtgtcccgtggcgccttcaggtcccccaggaggggaaagcggaggacgcctgccatgtgccgagcacctgggtaaaggggggtgtgcggctggtccccctttttcccacagctcggggtcgtgggcaggagaccgcccaggtgagggcgggtggtttccacgagccaaggaggggcagaacgaccgctccgtccactgtgcacttcggtcctctgtggttcttgactgtcccggtttggggagataaagtgagaaaagtgagcggggaaaggatggctgtgatcagaagcaatgtgtggggcctcgtcctgcaggaggagctcagggactggttcctggaaagttggaggacagcaagagaggggaaacttggtccccaaatgtgtacccttatgagctggaaccctgtacacgtcctgagatctgcagtgacacatgctgaaatctgggagggcagatgacggggcctgaatgagactgggg

SEQ ID NO: 8762 - DNA, 68445 bp, Homo sapiens
  misc_feature (1)...(68445): n = A,T,C or G, or insertion/deletion polymorphism (see Tables 1-2)
caattccccattcttgcttttggtgcttgaatatgtactttttttttcttttaattatcagctgggcatggtggctcatgcctgtaatcccagcactttgggaagccaaggctggtagatcactttgaggccaggagttcgagaccagcctggccaacatggtgaaaccccatctctacaaaaaataaaaatattagccaggcatggtggtacacacctgtattctcagctactcgagaggctgaggcagagaattgcttgaacccaggaggcagaggttgcggtaagccaagatcacaccactgcattccagcctgggtgacagagcaagaactggtctcaaaaaaaaaatttttttttaatttaaaaaattatttagcacttatcttgctttgcacatctaatatttcaaagaggaggaatttaataagcgtttaatcaagcttgacctggaaatcctggtctctgagccttccatccctgtcacccagtctctagcctctctttggagcccccattctcctccctgaatcccatctcccttaccaggttgtcatcctctttctgaaccccatttcctgctactcaaccttctgtccctcctactcacgtcatctccctccctgagccctcattcaagtttctcccaccaggcgagcatggaagttcttttccactgcacactcagcaactcagaaaagtccttccttttcatttttcagccaactctattgtcccagtggttctcaccgagaacatggagttaaccagcaggaccacagcactgttgccttctgcatggtcttccagaggtagaggttagaggaaggatcttacaggaagaatcctgaaggcagaggaggagccctgcaagaagggagggctttgaccttcatttccacgcccctttctccctctgtgtctcctctgtgtgggccccctccagccctgaggatcaatgggggttcactttcactgagctcagcaacactgctccctccccacttcctgtggctctgagctgactggcctgcttggtctaggctgggggctggtcagtgccacacccagatctggggaaaagaaattccttggccggcgaggtggctcacgcctgtaatcccagcactttgggaggccaagacgggcggatcaggaggtcaggagatcgagaccatcctggctaacacggtgaaaccccgtctctactaaaaatacaaaaaaattagccaggcatggtggcgggcgcctgtagtgccagctacttgggaggctgaggcaagagaatggtgtgaacccgggaggcagagcttgcagtgagccgagattgcgccactgcactccagactgggcaacagagcgagactccatctcaaaaaaaaaaaaaaaagaaaagaaaaagaaattccttgggcccctccagcacctctcgtctggtgggtggcctaagtctcttgtcctttctgggctgcacagggaaaaggaagaaggccttatctttctctcatgcttcctcctgctctcagtagaggtgggttcccaaaggtcaataatgtgatgccatcaccccctgagcactctccactccaatcccctcctaggaaggcttcctagattgagaagaactgctaggaccagggaattcccagagcatctccctgctccacctgaaacatgtacctgaagagcagtcagacgaatgggtcacgtgcgtacagccccctgcatggtctctaactttttcatgcattattgcattcagtgctgatagccagggaaagtggggaagaggtggagtgacttgcccaaggtccccaagtattccacaggtggagctaggactggaagcccagccatgacttgtagtttagggctctttctgcccctggcactgccagcctctctggatgctggtgcctcccacttcacccatcctgggttctctcctagggagccacagcctctgcagcatgcccagcctcagggcctggccaggctccctgtttcttatcaggccaaattggaccctccatcctggcattcaagtcctcctgcgtgcccctggctaagcttgctcttccgaatgctctgtaacattcttcccacaccagtacacacacacacacacacacacacacacacacacacacacacattaaagcagcacctgagtgaattaaaagccatacaaggcaagtctcttcactgagcctcagtcttcttgagtgtaacatgggaccgtgaacagtattaccgcacaaggttgtggggatgctgaaatagacaatgcaggtaaaacatcctgcataaggcttaggattgactgcaggcctcattaatggtagctgcaggcattattggttgtacttctctgcgtctctcccagtcctccccactcctgtccccaagaaagctccctctgccattgcctgtggagacttctccctcctctgagctctagcaacccttggagctgtaagaaagcccagggtcaggtggctagcaggcagagagattttaggaggcaagtgagtggaacccagacctcctcgcctcgattcaactagcgcacttctgctccaaagctttgtacacattggggtgctaccttacaattctgtctgtaaaaaggattccattgctgataaagtctaaaaatcactgacttaaaccaccccacctctcactccaggaaaggaacctgagcccttgattgacctggggtcacagtgggaatcactgacaggcttgagcctagcctgagagaccatagtcctagccacttcctgccctccatcctttcagacctggaagtttgatcccttggcacgagtaagttctagagaacaaggattggccgtgtatggttatcctcagctcccagcacccagtgcccagccggcaggtgccagtcagtggaaagcacaggtcacagttctgggggtcaccaataggctgtgtagacttaggtgagtccctgtgcctctcagagcctcagctgtctcaagcaagctgctgctctctggcccaaaagggactgggcctggcacacagatggcactcagcaaatggaagcactcgccctcccacccttcctctcartcaatacttgctccattgatggctgatggggacagtgatgaattacagaagatcttggagccctgcccacttcttgcacagatggggaaacaagtccagggtggggaagagacttgcccaggtgggagtgagtcttagtgaatgcgtctcctcagtggggcagggaagctttcgcagtgttaccagggtggagacagggcytgggggtggaaaggaaactgctgagggtggggtcaggggaacaggtgggagagggaaggaggagggtagggaaccacggtgtccagtcccctccagcagaggggccaattgagggagcctgagacagctgtttgctcagaaaagtgtcttagtcactaaaggttgtggtggggaaagtccgtcctcccagtcatgtcctgggaatccggatggcgcaggaaggccacccggtgaccctaagagtggccacctgtcctctctgaactggactttctcttctggcccttccactcttccatgtgtacacatatgccaagtaaatttgctgtggcctcctggaaccatctcccccatccctctcaccccttaggaagagttctgtgtccctccattacccatacgcccgcaggagaaacaggcttctatgccctatgaaagtccttcctgagatctaacttccatccctctagctgcaaccacagtctctttcctctttctgctgcctttgagcaggtaatctggagctggagttgggaatgatgagacactccctgcagtgagggctcctcacaaggtggggaagggacctttgtagtcccccagctgggaagagagccatgggatccagaggtgatgctgagcttgaagattagatttcccagaacagacccagtttcagatattctgggtgttaagggcaacctgaattcaaattccatttctgctacagaacaagagcctcaaaaagaccccctagaaacacccccagggcgcttgcaactgctttcctgtgcacctttcatgtcctagaccttagtcccatttcccaggatctatgattgagaagaaccagccaggcagttccacagagggaggacagtgctgcatattttgggggtgccatcttcagctcatagagagaagatgggttaactcagcccaggcaccacatccctagtggggccttggggtccagaaactgtccccagcttccagtagaggatccgggcataacctgccctggggcacccggctctggccctgggcacacctggaccaggagcagcagaagagattcaggtcagaccccagagggcacccccagctaggcagaggggaaaggatcactatggggtaggggtgtgggccggttgccaagcccagtttagggaccccacagatccctgcagcccacggccctgcctccctccctccctcactggcgctcagcagatcaatgctgcctttgctgacagctgagaatcgagctcgccttcccgccccttcccccgcccctcccgctcggcttcgtccctcgagatcctcccggaggaaccgggaagagtttgctgcggaaggctcaccctggggcagggcctgcggagggagcggctggtgtggccgcagctttccgtggaggaagagggaaagaggatcgggaaacccaagttaccaaccctgtgcagggcccaggagggctaaaggagagggactgccccctatagccagagagatggaggtcggggactaagaaaaactttccagctggagagggaatgccctgggacaaagtatccccttttctggctgggattctgtgggccttgggtagggggtgtgtgtcccctctaaggctggcttagagctcatctcccaacactccatctgcccaaacccagttccctgacctgggagtggggcaggggagcaggcccctccatcggggaggatcctcttctgggcagggtggctcttcccccatcacgatgaagggaagctcagaggtggcagttggtgggagaaagacacacccaggcccactgtgttccacacaccctgatgctgcctagcagcccgtgggctccaggcctttcaggtaagagcaggacaaccgccgctgcccacccagccacacacagcactgggcacactttaagcacccgcaccaggcacacagtgctcgaccccarcggacacacctcatccccttcggactccacctccactttcgcagccacccacacccgacccataactcacacctcactgactccatccccgcacctggtagacccacagccacccaccctgcacacacaagtagacgccgttccaccggtctacacctaaactccacgggacactgcgtcccttcccctgccgcccgcggccacaactccacattccactttccacaagcacacacgaggcgtcccaccccgggctggccttcggggccacactgccccacgcagckgtggacaccacttgcacgcgtccggcttcccggccccgcgcgctgcccccgccacgcggttcggcccaggcaccaactcggccgcccgtgcgccctgccccgccgcctgctccgcgcgttccctccctccgcctcgcctcgcttgctcgctcgctccctcccgatttgggaaggcggccgcggggcgggcgggggaggggcggggcgggggagkgtgacatgtgagcggcgcgcgccggtggcaggtggaaaggcgagcggcatggagcgcgtaataagagagttggagtcggaaagagcagccccagtcgccggggaagcgggaggtcagtgcgggctccggcggcccccaggctccgagcgcccgcccgcggccccggcccggcccctagcccccgccgcccgcgcccgccccgggtcgcccctctggccccgggtccgagccatgcgtctctgagcgccccgagcgcgcccccgccccggaccgtgcccgggccccnnnnnnnnnnnnnnnnnnnnnnnnnnnnnnnnnnnnnnnnnnnnnnnnnnnnnnnnnnnnnnnnnnnnnnnnnnnnnnnnnnnnnnnnnnnnnnnnnnnnnnnnnnnnnnnnnnnnnnnnnnnnnnnnnnnnnnnnnnnnnnnnnnnnnnnnnnnnnnnnnnnnnnnnnnnnnnnnnnnnnnnnnnnnnnnnnnnnnnnnnnnnnnnnnnnnnnnnnnnnnnnnnnnnnnnnnnnnnnnnnnnnnnnnnnnnnnnnnnnnnnnnnnnnnnnnnnnnnnnnnnnnnnnnnnnnnnnnnnnnnnnnnnnnnnnnnnnnnnnnnnnnnnnnnnnnnnnnnnnnnnnnnnnnnnnnnnnnnnnnnnnnnnnnnnnnnnnnnnnnnnnnnnnnnnnnnnnnnnnnnnnnnnnnnnngcccttccgcgtttccccgcgcaagcctggcctcccggggcacggccgccccgccctggctccgccttctacccccctgcctcagggccgaccctcatctctctccccccaggcctaagcccggtttctgatcccctcgctgagcccgaccctaagccctgatctcccaggcctgacccctgcttgacctcgcttctgacctccccgcaccgcaactgcttatttccatcctgaccgccaatctctgctcctctgtcccaggtactcccgaccgccagctgcctcccccaagtccgcttggcgaagtctggggcccctggagtgggcgcccttttcctcttccccacccctgcctccctgtgtcccagacacaaagaggaacccttggctcccacacgcttctgtcacctgctccccagctctgagctatgaagggctcccctcaggggtgctcctctccagggcggccctcattcctacccctgcccagctgactgtgggtgtgtgggggtccctgtgggccccctgggccctgacactcgcatatgctgtgtccsacttgatctgtgtcttcgctcagtcttcccctccaccctcaacttcccagtggcaacggcggccgccctgcctgccctgccctaccctgccggcttggcccagctcgcctgccttgttggctggcagcaccaggcctggctctaggcaccaggggaaaaagaaagaggagaggggtaggtttggaaacactgacgctgctggggccccctcctccctctcaccaggctcctacaactttcaaaaacactgacccctcttgggtgtgaagagtgaattttggcagctcagagctcagtcttggggtacggcctggcccagccaggaacatgagaggccccgcagatatcagttgaagggctgggcctgacgctgggacgctcagaggtgcccagagagagacctctggtccctggaaaatgtgtggctattaatccctttttgctgccaccagagagggccctttggcgctggggtctcctgggtggcccacctgcctgcccacctgactgtctagcagccctcctgctggcctggctgtccctctgccagcctgagtttccacctgtgtgcgagttggccagtctgctcacccttccacctaactgtccgcagtccttctgcttgcctgtttccatccatctgtggcctgtgcagttatccgggtgcctgtctgtgcatctgcctatccacctgtccacctgactgtccactcttcctctacctgtcttttccacctgtctctgggtctgtccttcggcctgtttctcgggtgcttgctggcctgcctctgccccatctgaactgggcccacataatttcagaggtgaaggggagaaagatgcggcacagggaggggcagggggggaagacagcagggctctctcggccattaagtgcgttgggggtggcaaccttgactctgtgcagagacctcagctgggctaggctggggcagagagttgaaattgctcaggacatgaggtcaagcttcggttcagggtcaacggtttgtagtagcccagtccttagtgtccattgggaggcctaggatgaatatttgtggctataaagaggcccgttggagtgaggaaggcccagggctggtggagttgggggtgaggggatggggactacttcttaggagtggctacagagcagcctccttgagtgcctaaggagggtgagacaccccccagagaacaactgtgccctccgtgggctcctcttgggaagggacttttccaaggcatggcagggcctggggaagccaatagggctctgaggtggggtccttacccccccaggcttggccttacagcccccacaagggtcagtggaggtgaaggacctgcctcctgtcccctggccagctgctgttggtgcctcctttgaaaggaccgccccttcctctccaggagctaatccactggcacctttgccccacatcctgccctttcctgatgccaggaaatgccctcgccagggccgtgcttgtcctgaccacttgtccccgggagcccagggccagggcatgtcttgggaactctgggggargaagtatggtgtgaaagtgtcctggtgtttaaggatctcagggaattggtcacccatcttagaggtcaaaggggacagaggtgtcaggaaccccacctcttatgtgctctgtgacgttgggttgattgctgggcctctctgagctttaggtctgtaggttgtcaaagcgggtagaaaccccaaccttgcggcctctctcttggatgaggtaatagagtgggaaagagcttggtaagctccaggggcctgtctgagcttgaaagacggttgttattattggggctggaggagggggcccacacagaaggtctctcctgtttgtgaggagctccagatgtggggtttctcagtcacactgcagggtcttgccaggaagtacttcctgctgttggactcctagccagaccattacactttgggtcaaatcctttctcctcttcccaatctgcctcagtggcagcccaagtgaggggagtccagggagtactgttagctaggacccccttcccagagacgcaggctgtggcaggaggggccccagcagaagagcctgcaagagaagggctctgggcsgggcgcagtggctctcacctgtaatcccagcactgtgagaggctgaggtgggaggatcgcttgagcctaggcaacatggtgagacccctgactctacaaaatttaaaaattagccgggcatggtggtgcacacctgtagacacaattacttgggaggctgaggtgggaggatcacttgaacccaggaattctaggctattgtgaactgtgattgcaccactgcattccagcctgagtgacaggatgagaccctatcaattaaaaaagagagagaaagagaagggctcaggaaggagggagctggggtgagaggagcgcattcgccctagggtatgcctccctcccatctgccagcccgtcccctctgagccccacacagaacctgcatctttctggctccaaraggtgggagattgcctagagtacaagcccagatttggcctgtcctgcggcagctgcaagctctgggaagagaggactgctgactcctgtcttctcctgttgggatccagaatgaggggccactgagcccctctccaagctttccctctctctgtrgaccctcagtctgatcaccaagctgcatccccctcctatgccccagtccctgatttaagccctgaagccttcacaggccctgctctctgaattttaagaaataccacctcgtggcccatcctgctcgctgagcccttatggggaatgctcgctgtccccttgctgccccctctcaaaggccactccagcttcccttgaagtcagagtgctggagggggctgagcaagaccctatctcccttcatcctccccagccactatgagccgcaggcctgccgctcccagcccccagggcccagcagactttctctatgtgaaggtttgcggctctgtaaacatcctccctcagccttgtccgtggggtcagaagctgtgggaatggggaggggaggaggtggcagcagcttctggggcccgcagactcctaacccccgagcccccgacctcccaccccggccatctgagaaagaacatcgcctgggttggaaatcatcccagcaaagtgtcctcagaaccctcaggcatccccgctaggtcagtcggtcctcacattttgacagccccattttacttgtaagaaaactgaggctctggagaccaaagtcacctgggaaatgagtagcagatacagcggactctgtgcagagacctcagctgggctaggccagggcagagagttgaaattgctcctgcytccttgtccaggactgttcgctccgttcctagtggccaccgggcttggctcttggagtctgaaatgaaatctctggttgtgtgtgcagcaccaactatgcacagggcaccctgctgagctctctctaaaccggtctcattgtgtccttctgcagccttgtgaggtgggcactgttmtcctcctcatttgacagatggggaaactgggactcagcagaggccacccagttaatgtggaagagcctcagcccggagcgggggctgactgggagctgttgcgctcagcaccacagcctcagctagcagcaccccaagtccaggctcctcaagaacagcactcctgtgtcatctgtccgtccatcccagcaccccgcacacagtcagcagggggtgggcagtgatggcattttgtggaattgagtggaaactgccagcctcacccagtgcagccacgttttagttgtagaccacgtcactgctgcgtacctgtctgaatgtctcacacatgcactcactgcaacatcgacacacatgcacaaacacacacacagcatccatccaacaaaaagagttctagtttacagctgcccctaccttttccctgacttcacagacactcaccatggacacacacccgggcccgtggctccagcccagacccctaggacagaacaaagcttgctcctgtccttgagtttttggccttcacctatacacaactgcagggctgcccttgcgggtctgtgtgtatttgtgtagccaccttggagggcagcctcagaactgtggaggagcggggtggctggcctcgtagaacttcgctggcgtttgctcctcctggggggtcctcgggggtcctttgatctgaccttggggtatactgctgggtacaccaagacacagaaaggggcagctactcatccaaggtcacacctagtgagttagtggagaactgtgccaggaacccaagccttttgtctcccagatcaggactttagataacaattttcctaacctagccaacaggggagatggatgctctaagaactttgcccttgtgattgggaaagtctttgagtgtgacccamatttttcgtgctgctgtttttcagccctagtccttttgcttggtctttgtaaggagctggggagaccatcctgttcttatactgccttcctcctcctccttgcactccccttcacgctcctttgcctccttcttctgaagttctttggtgtcactggagccggttcgatctctcactgacggcccaccccaccccaactccatagtacgttcattcttccattgaagacgcgctgctagatgtctaacttcaatccctattgctgccgaagcccttatccttgggatatttaagccaggagtgtttcaagaggtggttattattcttgggctgatggcagcactttgagtggatgattaatttcaggctctctgagccagtcaaaggagctggaactgcctgggagcagggaaaaaggaaggccgaggccctgcccacaaaggaggctgcccagggaacttccccagactccctcctacctccctagcaccaatgtgggtctttggggaaggtccgatcttcttgtgggctatggagccccccagcagggaattctgcatgtttgccctgggggaagctcctagtgtgggagttgagaggttgaggatgggggaatagcagggacttttcgtttctccagaagctgtcctgcggggagtgaagagcacgggctctgaggctgacagatctgcgttccttcctggttctagccttagcagtcgtgtgtccttgggcaagttacttaacctctctgggcttcagttttctcatctgaaaaatgggagtaatcataatacctgcctctaagattgtcaggactggatgagataaggcaccgaacactgctgggcactgttagccatgatcatcgttactgttattattatgctgttatcactgtcctcattcttctcctccggggagaggtgtggtaggtgtgctgggctcagcaaggtgagtgtgtctgagtctgctctggagagaataggagctatgtctgcctgtgtcctggggcgagtggttctccatgggagctgaggctgtgtcttttcagcctcctgtgggccctgcccatgagagtgtctgacttacattctctcgtgtaacgctcacagccatcttatcaggtgggtgctgtcttcttcatgtcacagttgagcaaagtgaggctgggtgaggggatgtcacccagctcatgaatggagcccagcctggctacctagcatgctcactgatttgtttcttccttcatctggcaaacagttacagagcatcagctccataccaggaccagggagccagagagagctagaccatgcctgtaccctgcctggcagagtgggggattgggggtcactgtgaggaggtcgcagagtctgccgggaccactggcctcagctgcttcttctcccagggagaggtttggagagaggtctggtctgtgtgtagctgtgagtgtgtctgtgagttatggggaggacggtgtatgccagagggccactgtgcggccgagtttgggcctcatggtccaaccctggcagctggcctggcccccgagagataaaagtagagccatggtgcccagagagacagccagggactcctgggagaggagggcactcccccactctctcctgagcaaatgatcatggagaatgagggcagggaatcccaagggagatttagagatctcagtccccatgcttactgggaaggtgtccacccccactccaccccagttcctgagcctcggtatcttcttctgtaaaatgggcctaacaggaaagtggacctctcagggctgcctggcacacagtcgtggtgggcaaatgagagagactgctgtctcaggaccttgaaatgcatagggtaccaggtagggagctctcttccagcatcttctctgggggcccctcaggtgacagggtgccacttcacagggcactcagggggctgcctgcccccagtggaggctctgaggggctggagaaagggtgctgagccgacctcagtggctacacagagcccccaggacttcaggttccctgggcaaccctgtccctggggcaggagctgcgtgccctggggatgaggcacaggaggggcagccccaggcagcagactaattgggctgggaatccgtgggcagcgcctgaggaagggaggcaacaggagctcagcgattccctccctcctcaccccacggagatttgggggacagtggatagagcagggtctctagcctaaaggatggagggaaaatcttgaggcacattctcctgagactccttggacacccaggccgggaaggtgggactggaggaaagctcactggaaataaatggagcatggttcccatcaaagcagaggagatggaggtcagacagcaggaaggactgcccaagaaccaggaggtgaatgagattttctgggatattgtttcaaaaacttggagccccctgtctagccgggctggacaacatttactcgaattgtccctatcaagcaaggaatggctccctactcccacagagcgaaagatggaggggagatgcctgttccctttgagcccaactttggcggggtgtgggtcgggggtggggtagggatcagatcgggtacccactggcttttgggcagtggtgggagggtcacaggctgctcctccttctctgccacttctctctgggagcctcgggcctgtccaggttgctgtctttgggtttattttttgctgggcttggctgtcccctgggaggggagggggcagggagagaaaggaaaagcaggaacagctttgtcagcacaatctcaggcgccttcgctactgcccgtcttggcccagctgccaccctctactggagggaccagcccctgggcacagtggggattcagaccctatggaacttcctcgcttasaggcaggaccagcaggaagggactaggcctttctacccccatcctctctccatatatccctgctatacagaacctcaggtctcagcgctggagcagatccacgggcttcatttcacaggtggggaaactgaggctagaagggacctgatggctcaagggcacagcccacacgggggccttttccaccttccctccttatggagtaacatgggagaaatgctgcctccctgctgcccgttccctgggtgaactcattcactcatctcattttccagcctctggggattggtggcagtctggtgggagagacgggggacggggaaaggacagtgtgacccatggcccagcagaggaagggaggtacaacctggggatgcacagaggctaggtgggggtatcaatccctcccctatatgctttttatcctaaaaaaatacattcgccctattttacagacagggggattaaggtgtaaagaagttaatgacttgcccaaagtcaacatagctgacaggtggtagaggcaggatttgaacctagcatgtgcatctctgggagccatgcatttggccactccaccatgctgcctccccaaggggcccctgtgggcccttctttcttttcttttctttctttcttttttttttttttttttttgaagcagggcctcactctgtcacccacgctggagtgcatgatcactatgatcactgcagactcaacctcctgggctcaagtgatccttccacctcaccctcctaaggagctgggactacaggcgcacaccaagacacccagctagtttttaaatttttctgtggagacagggtcttgctatgttgtccaggctgatctccaactcctggctccagcgatcctcccacggtggcctcgggagccaccatggctgcctgctgggcccttccttcttgaatgcaacccccctggctttcctcaaacctgcctctgtggcttttctctcttggttctatcagcaagcagctctgcctcctctttctgccccttgaatgttggggctttgtctcaagtcctcttcacagtacatagtttcagggggtggtctcatgcactcctacgacatcaggggtcacccctatgatgacagcctccgctctgcagtttcatccctgcgcttcctgcctgctgacacctctcctcctcattccctgggcatctcaaactcagcatctccctccaaacctgccctccttcctcaatccatgtgacagtgactccccgatccccagtgcccaagtcagaaatgccctccacacaagcatcctttgctctcacctaagaaatgacttacagtgtcccaaagcattgcgctgtttagtgcttctgtgcttttccttctgcctgcaactccctcccctcttctgcccactgcatcatctagctaactcctattcatccttcaactcccagtttgagcaccacctcttcttggaagcactccctatccccattacccccaggctcaactgagggcccttcagtgcccccagagttctgttcacccagccctgtgcgttttttgcttttctgcatgggactatgagaactgggtgtgtgggggttgaacacaattcttggcacatggtcagcaatgagtgaatgtttgatgaaggtggcattggggccaagtagtaaggatgagaagggttttgccaactagagagaagtggagaaaagacccctcagccctctgtgtggagcactgagctgtgggtgttcatgatttttatcccgagtgagctccaggtgaagggaacagcagagcaaaggccttgagatgggacttccttcccctcactcctttgccccaagacctgcagagcacagggccttgattgacaggctgtggaggtgggccttaccctgtgggcagtggggagccatacacggtgacaggccagggtggggacactggatgggaaccagggtttgactctttctgagtgagtgctgtgcagacgtgaggtcatctattttttccagtacccgctaggtagcaggcactattattgttcccattttgcagacaagaaactggggctcaaagaagagaaacaccacatactaagttacacagcttgtctgtggtygagtcaagactcaaacccatgtcggcatcagggccaagcccgagctctaaatggttctcagcctcgccagctgacccaaggcagtttccagtggcctaaggcaaaactgaggagaataaggacggggtggcgactctttcataaagctaaatttattccacttaaaggactgtcttttagtatgagatgatgtcctttcttttatgaaatgatgggctgggaaaaaaatgtccttgcttggcaaaataaaaagttgacaaccttatgcagtccccaaagtgtttttggaaattttaccggtggtgcgtgaaatccctgagtctgggcgccatcccggctcctccccactgagctgtggagccagaagagggaggggtctggtagggacagagggatcaggggacagaggagcctcaggtcccgcactttgcagtgaggaccaacccaaggctctttcctaagattgggttgggcgggtgggggggtggggggcagatcagccagaatcaagggctcacccctcagttaaaggagcactggaccgggaggcagcaggcttgggctcagctcctgcctctgcttcctggaggctgtgtgatgccaggcaggtgacccaacctctctgaggcaccagcttccttatacatagaatgacaattgccatctgtccctgctcacctcacggggctgcttcctatagcaagtgcttggtaaactgcaaagtgctgtgaagaacaggggggttgtggtggttttacctttttttttttttttttttccttttgagacagagtcttactctttcacccaggctggaaggcagtggtgtgatcatggttcactgcagccttgaactcctgggctcaagcgatcctcctgcctcagcctttcatgtagctgagacygcaggtgcacgtcacggcgctaggctaatttttaaattttttgtagagaggggatcttgttatgttgcccaggctggtttcgaattcctgtgctcaagcaattttcccaccctggcctcccaaagtgctgagattacggacatgagccactgcacccagccctggttttactgttcttatcttgccatcagaggatcccacttctctagggtcctgggcccctcatctcactttcacttttcacttgcactgctttgagccctgaggaagagacatatgggggagcggggcaggtggaatgacacaggccctgtaaaagcagggtggccacactagcaattcctgtcctcaggctcccctggaggacagctcagagatgcccaggctggagacctggggaactctaggaaaagaatgcacgaagctggagccaggctagagttctaagcacagactttgtcactgagtaataagattcatagtctaatctctaccaggtattgtgctaaatatttttcacactgcttcatttaatccttccaagagccctatgaggtaggtcctatcattatccccattggatggaagatgacactgaagcttaaaggtgaaacactgcccttgtcacacagccaggaastggtgaatgcccaagaggacgggagttttctgggctcagctcagacaactgagtgcctggagaggccgagtgtgcaacgattctgtgacatgagagggtgggaacggtttgcaggactgtggtggggggccgagggggtaatcagtgcacatcaggggcaccgggttggggtcrgaaggcaagagacacgatcctgctggctagcttctagcagtcacctccctctctgagtctcagcctccctctctgctctggctctcaataataacaaagataatactagcaggaccttactgagtgcttaccgtggaccagatgctgctctgagagcttgccacgccttctatcactttttcctctcaatgacactatgaggtaggtactgttattatgcctacttttcagatgaggaagttgaggcacaaagaggttacgtgacttgcctgggtacatgtagcagggccaggattctaaccacaagagtctagctctataggctgtgatcttacccacctaactcacccggactatgtctgcctgcttctaatggggggtgatatkaggagaagttgagccttaaagttcaaggtcctgggccgggcgctgtggctcacgcctgtaatcccagcactttgggaggcagaggcaggcagaccacctgaggtcaggagttcgagactagcctggccaacatggtgaaaccccgtctctactgaaaatacaaaaaattatctgggtgtgatggtgcgcacctatagtcccagctacttgggaggttgaggcatcagaatcgcttaaacccgggaggtagaggttgcagtgagccgagatcgtgccactgcactccagcctggatgacagagtgagactccatcaaataaataaataaataaataaataaataaataaataaatacagttcaaggtcctgctcccaccccgattctaccctggggactcattccttccctctctcgccctttcatttgagaaaccttcacttctaaatgaagttcagctgcttatgccagtctccccgggccaggccctgtgccagactctggggacagagcaatgaatcagaccttcctctgctccctgggggagatgggctgggaagctggcagttaccaggcagggtgataagtgccactgtccaggcagcacggagtccagtgggagcccagcacagagggccaagccctgccccaatctgggcatggctgggaaggcttcccagaggaagaggcttaagttgagactgaaagatgagtagaagtaggagttagctaggtgaaaaggagcaaggaacagtgtttcaggcagagagaatagcacaggcagagacccagaagtgaggctgaacagggcatttgcaaagaacagcaagaagtcagaagagcgggatcctagaggaggcaagaggtatctggagaagaggctgggatgcaacagggccaggctcggcagtgaggacaccgggctggggagctgcagcttcctgagagggtgatgggaaggaagtgatgtcaggagtaacatggcagattcgtgttttagaaactcctttctgggactggcgaggaggatgctggaggggtaaggactctggcaaggagccctggggatgctaccaacttgtccccctttttcctttaccttccccccagggtccagcctcctgagtgcctcctccagagctattgaccaaccctgctcagggcctggctcaacctgacccggagccctaggactttgcctatagggaaagttcagctgcttatgcaaactctggcttggggggagatgtgtgtggttgagctgggagctggtggtgtgtgggggtggccttggaagcagagagggtgggtgcaggcgccgaggctgtctggaaagggagtctggggatataagcttggggtccatgggggtccctagaatagtggccttataatggctccaagagggtacactgggatttggcccagataatggagggacaccctggcgaaggggcagagtcctggcagttcagccagccccagctctgtctttttcttgaagctcaacagagtatggaaatcattggtctcacccagccccctcattcttctgagggggaaacaggctcagaacagggcagggactaaactcaggtcagcagtagagcccagaccagaacccaggctcagtccaagcatcttagttgtctccaatgatgataaataacagtraaaacctttctgcagagcttcccaggggctggcctgggcttaggcaccctctggatggtcttgggcagaygtttttcacatctcgagccttagctcgaggtccaaaatactacctgtactgggaaggaggtcctctctcccactgacagtccacaaagccgttttaggcatgctggacccattgtgggctttacttattgtttgttcaatgaatcccactgaattcatgtaacaaccctggaggaagatrctattatgctattttgtgctgaggctcagaaaggagaagtgacttgcccaaggtcattcagctgagaagttgctgacttagggctggactccaggggtccagatgcctgtctaggatccctgatggacacagccccatttttgagcctgcgctctcagcgaaaatcagttggtgtctcaacgagacccatcgtcagctgggcagggtgtgtgtatatatgtggaagctgggctgggctgctggctggaactcaagccacaccaacccctgtgcccctgtgtttggacctggctgcagctgctgcccgtgggggaaggggaccttgccacttgccctcctgcatcaagggttttttctccttggcctggctgcctgggcaaaggagctggctgtggcatgaccatgtgggcacctgccagcccctcccttgttggggtctgktcatctaatgcccttcacatgacaggcatggggtgggccctggctggggagagggatttgcactctcctaatccaagggctgcagccctccctctgtcttggccagggccgtgggagaggtttgtccttgccccatgcccagcagccccagctcagatccctggcatacacccagttcctctgcttggggccttcccctgtcctgcttctgctccccaccctcctactctgtgagcagaatcaggagctagggggcaatgctggggcattcaggactgatggaggtgcagtgctacatagcatgtgggactgaaggatgggggcgatgtcagggaggtttagggcacatgttggggcaaagttgagggaagatgattggggtgcagagcaggagtgtttggggctcatcctgggccaccccttcctggaaaaatttggctacaagtcagggaggcaaatgtgtgggccatgccccycccctcgctaggcagtaaacactgccgtcgcctgggagacaagaaaacatcttggtccccccacggttgtttataccaggactccctctccttctctggcctggtctggcctctccactcctgagctgggctacctgagtygagggtccagcccccggtcatggcaggaggccctggcagcacgcccactggcccccaccagggactgagcactcaccacctcctggtggcctgtcccattggaggccctaggtcttattgatcagaaacgtgctcccaagccttggcctccacgagggaggcctgggactgtgccctggatttgctccaacccactgcctgaatgcagtcactggcctcccggtaacctcagcttcccatgttcagtagcaggcaggatctagattagagcttttcaaactgtttcaagtcatagatctggttctttgaatgacacctgatacagaagcacaatatataaaacagatcaaagtagggctactctgggtggagtcaygggttggggcccagaattctacccactctatgccagcctatatggccctggcatatcaacccagagcctgtacatggtcctccttgctctagaacacattccaggtaaccctggaattccctggccaaatacttatgcctacttccagggtctgcacaggcccttctcccaggggctgtcagagcagccctaggctcaaggacggctgtttgtagtgggtatagcaaaagcccggaagagcaggctgaggcacccccaggagtgtacccaaggcccctcccagggagggatgggcccagtgtgggaagagaatctgaggatcggagggtagcaaggggctggctgtcccttccctgctggattccagcatgggattccaaggcatccaagaactaaaattcaaacctggtcttctaggtcattatgaaggtatatgtgtcaggaaggatagagcaaattttatttaaaagtttgttaacctgattgaaacttttaaatatttagacttatggtatgtgggtctccatttatactctctccccagtcctgccagagttaggggtgagcttgcatcaatcctccttccacccacccacctacctctgcagcaaccccaagacagccttacccagaactctcaggcttcacaggacagtgtggaagtcccactcgctgaaactcaaggccctggtgactgcatctttctgttcactccccagatactgtctgagcatcagctggggccagcctgggggttgtggaggagccagactggccttgccctagagggatggatctcagtgaggagtaagcgggtaggaacactctccctcttgtagaatagtgtgagaaggggtgcctgagggggcccacaggggccctggaatcctaacsaggggctaaagaagctcctctattcaaagccgatcatggatggatgaggtggaagagagacagcccaagaaggggagacagtacaaaagccaccaaggtggaaatgtacagggagtggagaagtcgagtgtcgctggtgcttaggatgtgtgtacagcctcaaacgctggtctaaggagcttgggttttctattttaacagtaagaagctgttgtaggattgtaaatggggtaggggctgaggaagaggcattcagactgcaaggtaagtggactggaggtggggatagggggctggaattgtggtggtcagtgagaggctggctggggggaaggggaatgggggtgagtcctgggctgaccaggaatgggacttgaggggctaggaagaaagaggggatcttaactctgctttctgggaccacatctcctatctcctcctcctttgttctgtctcagtttttgtcttcttctcctgctattccactgccctaggtctccaggctggggagaggggcactcaccctaaaccccctctccaaagcaggccacttcacacaagtggccaggcaagaggccgcagttgtataagaggcttttctcagctggctggactactcattcgttcatttattcattcattcactcaacatttattgagaacctacaatgcaccaggccctgcactaggttttggagagaaagtaggaacaagatcaagtacctgcattcatggagyttacattgaggggggcgggagaaccaggaactgtatctatccccggtgtctaccatctggcacctgtgcctgggctggatgcctgggaacagggactcttcccattacctactcatttgttccagctgccctgtgtcagcactcacctctctggacaatgacagaggagaaggggtcccatgcccaggatgccagccccagggagcacctgtctctgtaagaacagcctggccctcggggccaggacctgggctcaggcctagttcttcctactcactcctgactttgagccctttgcaaggacccgactttgatttctttatctgtcaggtgggatttggggaggtcctgaggaggcgaggggaccagaatactggacctcagctccagtattctcccttggtgggcaactcctttggctatgatgggagggggaagggggcttgggactcaatattatcatcattacccatacaagatagtaatagttgctacctattgtgtaatttattccgcactatctgtatggtcggtgtgtcttctctccccattttccggatgaggaaactgagtctccgtaaggtgaaatgacttacttgaggtcacacgtgaaactacctactccaagagccctttaggatggtgctgtgaggtggaagggcgaggccgaggcggcggtggcgtcgcgtcccccctctccgcccctggcctcggggacgcggcggcaccttcacactttccgcttggcccgctgctcgcctttcaggccgccgcgttttcaattgttaatttggaaacggaaaaagtagccggccgggcgggggaggccgcggggaggtaaycggagccgcagcaccgccccggcccctcccgctctcggggcctggcattggcaaagccccgcccctcccagggacgcaagagccccgcccaccattccccgcccccggcatgccccgcccatttccgtaagccccgccctcgccgaggcgggctgggggcacctgggagtgccgagcagtggcgcccctgctgaggagaaggagcccgggcgggggaagggggccgagggctgtgctgggggaggagtcccccaggagccctccccgcaggaacccgtacctctcccgagaagtcgcgcagggtgtctgcttcccttgtccctacgtgaacccaagcctttctgcaacccctctgtaggttcacccaggggagacccctgcctccagactgccggaccagggatcattggtcccattagaaagacgaagaaactgagtcctgagagggacagttaacttgctaaaggtcacacagccaaggcagagcagagctgaattcaagcccattcttttgactgagatacatttagggactgtctgcctcatttagaagaggagggggcatcaggaccagagatacaatttgtccccttccccctatctccagcacggtttctgtggttagtaagttactggaagttctgcttatcattattcaattatgggagggttttggaggtagaaggaggtccctctaaactttccatgtaaatgaaatgtaaaagaccctcttctggggactcccagaacacagaagtccctgaggactggcagcttcaggagccgtccacggccttgcttcccattagggaagctggaattgccagtcccagatggatcagcaaaaaatagggccctcagagactcccacccaatcccttcctcccactgaggaataagctgagactcagacacagtttcccaagtcttcagctgactggtggcggagtcaggagacagaacccaccgacccagctttctagctgtgtccacgcccttctgcttctccctctgctgccccccaatcctgacacctctctcacagccaccactcaggatcctgcctccatcagctgggcctgcaggctgggcagcctttctctttacaggcggaggaaactaagaagagtatctgcagrtgtcctcccagcttccagttaaagaccctcccaaccacccttccaccttagctgtgggtcaggcccagagaagctgcgctcctggcctcgagtcacacagcaagccttttccagcttgcaaagcccactggattcagtctggctggtcctggatttggggttcccactgggagcatggctctcagggcagctgtaaccagatgccccaggtgtggcctgtgagtttgcatgctgctttgcttattagtaacaaaggcattgaaacccctcttcctcattgtgtccccaaaccacccactgggtggggtcctcaatggctgagtctacagaactcctgggctgggctcagtcttggcacctgagctccccagggaactctgccctccacggtgctcctcttcgaccctgtcagctcttggtgctctctctgccctggaagtactgagaacccagtggcaaggactaactctttcccttgtcttggactcttccctccctctccctcccccaatatagtgcacaggttctgctgactcagaggacagaaggctcctttgaggttaccctgacccctgccaggttcaagtagctgggaaactgggcaatgcttgaacccactgccacaaagtcacatgcagcaggaagggcaggggcaggtcccatcttggccccaggatgagggaatttttgaggtgggagtgagaggcaggtgcctgagtccttctacagacagaggagaaatccaaagaacattgcattaggaatcaggaaatctgggtgccaggcccaactctgtctctgatctactgtatgatcacaggtaagccaggcccctctctgggactcagtttccccatctataaatgagaaggttggttaatctctaagggacctttcagtgcccagatatagccagtatctggtcatatcttgccacttccgcttcccctcatacaagtcaccatcatcagctggtagtggctcatgcctgtaagcccagcactttgggagatggaggcaggagaattgtttgagcccaggagttcgagacgagcccgggcaacatggggagaccctgtctctacaaaaaataaatataaattagtcgggcatggtggcacccacctgtggccccagctactcagggggctgaggctggcggattgtttgagcccaggaggttgaggctgcagtgagccgtgattgcaccactgcactccagcctgggtaacagagtgagaccctgtctcaaaaaaaaaaaaaaaaaaaaagtcacacagggtgaagtggcatgtgcctgtagtctcagctactcaggcagctgaggtgggaggatcatttgagcccaggagttctgggctgtggtgagctattccaatcaggtgtccacactaagtttggcataaatatggtgacctcctgggaacagaggaccatcaagttgcctagggaggggtgaactggcccaggtcagaaacggagcaggtcaaaactcccgtgttgaccagtagtgggatcacacctgtgaatagccactacaatccagcctgggcaacataacaagaccccatctcttaaaaataaaaataaacaaaacaaacaaacaaacaaaaagtcactggcatctcttgccaggattatactttccaactcacaatggggcaaacgtcattgctccctcctcccctctcccccaccatagtccgttcactcagcagcctgtgtgatctttttaaacataaggaagattgagctactccctgctcaaactccccatctcactcagagtaaaagccaagatccttaccatagccagtagatggtccgctttccacctcccctgcctctctgccctcaccccccaccactctccccttgctcattccactctgggatcactcctttcctggtagttctggaacacagaaggcacccttctggctcagatgtgttggatttgtttttccctctggaggtgggatgggggttaagggagcatgaggtgggggctcygacctaagcctgccagtctgagctcatgctcagacacagcatgagtaaaggtggggaggggaaaagagcgcgtttgccattgtcagggacagagctatgataatgcagtgccaagtgtcaggttgggtaccggctagtgaagagcaagttggcctggtgggtggggctttccttgcaatcatgctaaggggtttgggcctgggcccacaactcagtggatttcacactttttaaaaaaacagcaaagctttttgttcacatgaaatttttttttttttttaagatggagtcttgctctgtcgcccaggctggagtgcagtggcgcaatctcggctcactgcaggctccgcctcctgggttcacgccattcttctgcctcagcctctggagtagctgggactacaggcgcccaccaccacgcctggctaagtttttgtatttttagtagagatggggtttcaccgtgttagccaggatggtctcgatctcctgacctcgtgatccgcctgcctcagcctcccaaagtgctgggattacaggcgtgagccaccgcgcccggcctcacatgaaatttttacgccaaagccagcatgtaaaactgagccacccgaatctgcacggagctgctcagtggaaccgagggaaggtttccactagccatcttgcttgagtttctcaaatcctggctgcctaaattccaccccatgtttccccttyctttcaatggcatcctgcttgggagggcccacacctccctgtttgagaagtcagctctgtctggccagtcccaacagatggatgcccctgtgtcctctttgttccactctggctcttgtcaacacattgctcagcccactgacctggtgcaacaggtaggcaggctggcacggcagaaggaagcagacagaacaagtcggaaggtttggggctggtgcaggtgggagaggaggaagctattcctcatcaaacaccttgtctagaagacactgcctttcatrtcccgtgggwcagaaaccattcaagctggctcaataaaaactggcttctgtactattacatttgggataaagaaaaagaaaaattggcttctggaggtagaggacagatatggtaaggaaagagaattctttagaggcttcaaggcagaaagcacattttggattcatgggatagagagcagggggatgaggttccagcgtagtgcagtctcatggcccatctctctgcacctctgccaactttcctctgtggttcttagttccattcctgcgaaagacaatcygattggctcagcccaacctatgggtgggcccttcttgggtcagtctccagctctccatgaatctgtggcggccaggagagtgctgtggagccaaccgcagggctgtcatgtgtcgctctgcagtctgggcgccacaaaggggccggctgagagggctgaggggtgctggaatccagcctatgcccaggggtggggcagcccaggggaagggatgcctgtgctaatgggtccgtctagaggggtcaagtttttataacttgtcaggctaacgggaatgctttttttctaagccatcctccaagagggggcatttttttcatagtttgttctatgtgctggcggctgctgtccctccagggacagcctcagggaaactcagctgagggccaactctctcctttctaccccactgctggagagtcacaaggcggaagggactttggccattactgagtagtgctccacctacatgttgcagacagggaaactgaggctccatcagggccccattgcaatttctaagccccagcgcaagcctctggcccagagaagcagcagcggcagtggcggcggccctggtgtggggccctgggtcacgtgctcttgctccctttgccatatttagaatcgctggatcaggggaaacttctcctcccagcccctgaggattcttggaaagagcctcgctctgaggcctggcttactgcccctccccttattcccctgcaggagaaagtaagtgcctgctctctctagaagagtctgggggcctccaggctgccccccttgtcaggaagtgcctgtcaagtctagctgaagtcccttcttcggtatcagctccggtttggggtttaaggagcccctttcttccagaaggtgatggtggccatagcttctgccctctagggaccttggctgaatggaggacagactggcctcagggtcctccagctgaggggagacagagccctgcctttgggccctggtctagggggcaaggaaagagtcacgcgctccccaggccagatgcacaaatcacttgagcttgggggttggagaccagcctgggaaaatagcaagaccttgtctctactaaaaatcaaaaaaaattagccaggtgtggtggtcccggctactcaggaggctgaggcaggcagatttcttgagccttggagagtgatgctgcagtgagctatgattgcaccactgcattccaacacaggcaacagagcaagaccctgtctcaaaagaaaagaaatcagggaaactgctggtggctgggcagtccccagacactggcagggctcagtctgggagggacgctggaaagacgagggaaggaaggaggctctggaggaaggagggggcaaggcctggatctgtatttaccttggccttggtggatacttgggggtggggagcggtcctcttctcacacaggctgcttcctactggataatcaagccttaaaaacaaacagcaacaaaaaacctaaataaaaccctgaaatgcatgtgttgagtgcctgtgatgttccaggtctgaagagccatcctcgctgctgaggataatggtcctgtgctcccatgggacccctctccaggcgtggtcttttctcccaccttcctctcccagctccatacctcctccatctcttcagatcccccaccccaccctcctgcccacttctgagagttgggccttgcctcttcccagagcagtccccagtgagtaggggctgtcggcctcctcccttcccacagcctcctcccacctacatgccttcctgtccctgtggaagctggagggatccttcctactccacaccagctcctccctggctctggatcccagcctcccatcttccttggggacttcattccattgaytactcactctgtctccccgcatcttcaacttctccttcttgatctcttggctccttccactctggctctctcatcttaaaagaaaagaaaaagattccctataccctgcatccttctccarctacgatctctgatctcttctttgcagtcaaacatcttcaaattgttaaacctacacttactgtctctacctcctcactgcccctcccctttctcactttttctgggcctgttctggtcttcctctccttctgagagaaggctgcccttgccaagggacccagtgaccaatgtgtcaccaaatccagaggacatttttcacgccttatctcacttgacctcttggcagcatttgacactgttgtctactcccgctttgaaacatgttcttcacgtggcctctctgacacttctctcttctgctttccctcccagctctctggctatccctcccagtctgcgtagagggcctctgttcctgctgcaccgctggggctccatcgggtcctcctctaactttgctacaagctctctggactgtctcagctgctcctgtgacctcagtcaccacctctaccctgatgtcccccagatctgcatttccagccgggtctctctcttcatacccatggagtgtttgcccagtgcccatagccctctctctctctcaacatgcccaccacccaacacctgctcctccagtggggtctcccccgtcccatgaaggcactcatggcaccttcatccatccaatgcccaaaccagaaatagagaagttgttctccttcctagttcccgtttccagttaatcaccgagccctacttcctgcggtgttttccaacccatccactcctcttccctgctgccaccaccctgggccaggccacagtcatctstcgtctgagctattgtggagctttcttggtctttctgctgagtcttatctcctttgatctattctgtgtacttccccaagtggtcctgagatgcaaattggactgtgtcatttcctctcttagaactccacaattggccaggtgcggtggctcacgcctgtaatcccagcactttgggaggccgaggcaggtggatcacttgaggtcaggagttcaagaccagcctggccaacatggtgaaaccccgtctctactaaaaatacaaaacttagccgggcgtggtggtagtcacctgtaatcccagctactcgggaggctgaggcacgagaatctcttgaacccaggaggcggaggttgcagtgagccaacaccactgcactccagcctgggcgacagagtgagactccgtctcaaaaaaaaaaaaagaactctacaatgactccccattgcctttgggatcatgttcacagtgcctgagaatgctactcaaggcccctgggtctggccctctctggtttttccactgcccccttcactttaggccacaccatccagaactgctggccgttctgggctgcctcgacggccacattcccactgcttgcacatcctgcttcctctgcctggggcaccccgacccctgtccagttacctcctccaagaagtcttcactgatccctccactttggttgtgcggaaggcttcttgggactctccccgaccccttgagtacactgtcatggcctcgtccatcccgtcaccactgtgtcatgttctgtgttgttaattccttgggacctggattattcatttctggttttacaataaacctggctgagtgtaggtgtctgaagtgaatatagcccagagrggtcaggtgacaacctcttttctgctgtgagatgccctgccatctttcctacccccatcatatccccatctctctggcctggcctcccagcagctgtccctccagggacatgttggacatgtcgagagagagagccgtggacactgggcaaacgcccagtgggtatgaagagagagacctcagctggatccagggacatccccagagaatctggagctgagctgatggccgatcctctccaccccactgctggrgagttaccaagctacagggaccttaaccatcactgagttgtccccgacctttgtgtgtgtttctgacagggaaattgaggcccagagcattagtagggcccggtggtccaggtggtcttgggctcaggtcctgcgcttatgactttgaacaagtcatacctttcttttctcatttgaataacagctttattgagatataattcacatacagtaaaattcctccttttaaagtgttcagttcagaggattttagtgtattcacagagctctgcagtcaccacagtatacgcctctgaaccgccctctccttatcagggtgatgatggtacggttccatggggtcactgtgagaactcattaagaacatgcatttagagggcttggcacagtgtctggccaataggaagcctttggccagcaggagcagttatggttattacttcaggtcaccrcatgagagccacctccccagcagagctttccccctcctgccctgtggccgcttctggacagtgacttgaggaggtataaatgtggagaaggcggtgattgcagttgtttaaaagccctgagctggctaataattgagtcagctgcaactgctcccatcacctaagccagtgattctcaaagtgtggtccccataacagcagcaatagtatcaccagggacctttgtagaaaggcatattttccacttcaaacttactgaatcagacactgtaggaataggtcccagaaatcagtattttaacaagccctccaggtgactctgacacccaccgtagtttgaaaaccacaaatctaagcaaaccattcactttttcatctctaatcctcttgctccctcctgaacgagtgggatagtcatgggatggggagaygggggaaatggagaggaaaggttggataagccttgtgatcagaccagctggggagagccagccaggcaacacccgcctgtctcattctgcctcctgggctgggcagggagaaagaacatgggccacaacttgcaggcagacatgatgggcaaagatgtcctagaaagtggccgctagtctggcctgtctgctggggagattagagagggcccaggccagccagcacccatgtttcatctatatttgtatagatggagaaactgaggtcccagagggggccagagagaatccttagaaagtcctttgwtggatgaatgaagccacaccctagttgtggcaggcatgagaccccagctaaggggctccttcaccttgtctcctctacccctgacctccagatactgatctctcttctgctgtccctgtgtgaggaccacccccactccaggaaggccaaggcagcttgagggtcagcctgagctggggttctagctgcagctctgccactgattcactgtgtgatcctgaacaagtctatccctccctgagctctatttcctcagctggaagatatggataattattcaggtgcctggaacacaggatcttttctttttttgagatacagagtctggctctgtcccccaagctagaatgcagtggcgagatcacagctcactgtagcctcaacctccctggctcaagcgatcttcccacctcagcctcccgagtagctgggaccacagatgcacacccccatgcctggctaatttttgttttgattttttttgtagagacagcatctcacaatgttgcccaggctggtcttgacctcctggactcaagcaatcctcccaccttggactcccaaatgttgggattacaggcatgagccaccrcgcctcgtcccaggatgttttctattagtccaagtatatcccttcaaatgtaatgagagtatcaagggtatagaaactcttagccagtgggttaaagcagggagaagtgaagtttgggggctttttaagcagcgtccgccaaatggagatggtcaaggtcagaggcgttactttttaggaaagacatggggcagccagaggagtcagggatggatgtgctttggggacctcttcagtgggtacaaactggaggctttggcttggtaacatggtgttttgatgtttggttacagtgaactcctgctattcatttacttagtctttcaatagtgctgtgaaatcaatcaagcaatcggtcagtcagaataaggggcaagagagtggagatgaggccattctttcagagaggggatggctggggaggcccctccaaagaagtggcattggaacagacctgggtgaggcagaggaaacagtaaagcaggttcaaagcctggaggtggaaatatgttaggtgtgttccaggactggcaaggaggccagaataagtggggtgcagtgagccagcaggagagtgaagaaggtcaagtttggaggcgggggtggaggcacagaccttgcagggccttgttgtcagtgccgaggagttggactttccctctctaagtgcgatggaagtccgacgagagttttgtggagagcgatggtttccagctgtgcattgtgggaagatgaccctggctgcgttgaagggagtggtcacattcaggcacagtggaggcagggaggccaggtaggtgccagatggtggcggcttggttgggatggtgcgacctggcctgcccagggatagattctgaaggtagagccaatggaatttgctcagaaggggatgtgcagggggagggaaaggaagaatgaaggagcctgagccctgggggagccgtggtgccgttactgagatgggtaggctggaggtgaggaggacttgaggacaaattgagaactggtgtttggaggtgttgggtttgagaggccaccagacatccaagaagagtcattgagcaggcatttggacacacgagctggacacctgggagaggctgccacatcctcactcctgctaaatggcagaggcgactgtggtcaaggggtggggcaggatccaaagtgggcttttcttgtttttgtttttgtttttgtttttgtttttgagacggagtctcactctgtcgcccaggctggagtgcagtggcgcaatcttggctcactgcaagctctgcctcctgggttcatgccattgtcctgcctcagcctcccgagtagctgggactacaggcatccgccagcaagcccagctgatttcttgtatttttaatagagacagggtttcaccgtgttagtcaggatggtctcgatctcctgaccttgtgatctgcccacctcggcctcccaaagtactgggattacaggcgtgagccactgcgcccggccttttttttttttttttttttttttgagatgatgtcttgctcttgttgcccagactggagtgcaatggtgccatcttggctcactgcaacctccgcctcccaagttcaagtgattctcctccctcagcctcctgagtagctgggattacaggcgcctaccaacacgcctggctaacttttgtatttttagtagaggcggggtttcacgatgttggccaggctggtctgtaactcctgacctcaggctatccacccacctcggcctcccaaagtgctgggattacaggcatgagccaccgcacccagcctgcattttaaattttatattagtttgttattaccgaaacaacccatgtttgttccaaacaatatattagaaatactggctgggcgagtggcttacattgccagctctgggaggcagaggcgggaggatcacttgagcccaggagtttgagaccagcctgggcaacatagttcaaccccatctctacaaaaaatttaaaaattagccgggtgtggtgtcatgtgcctgtggtctcagctactcaggaggctgaggtaggaggatggcttgagctcaggaggtcaaggctacagtgagtcgtgatcatgctactgcactccagcctggttgacagagtgagaccctgtctcaaaaaaaaacaaaacaaaacaaaaaatagaaaatacagataagcagaaagcaaaacaaaagccaaatcacttaattttaccacccatagataagccttgctgactctgggtacgtgtgtaaaaaccatctctgtttcaaacattgggatcacattgccgttaaggttttataatctgctttcctttttttttaaattgtgaagtggaaattttatagatgtgtaattactgacatggcaagaaaagtgttaatgatggccaggcttggtggctcacgcctgtaatcccagcactttgggaggccgaggcaggtggatcacgaggtcaggagatcaagaccatcctggccaacatggtgcaaccccgtctctactaaaaatacaaaaattagctgggcacggtggcatgtgcctgtagccccagctactcgggaggctgaggcagcagaatcgcttgaacccgggaggcggaggttgcagtgagccgagatcacaccactgcacttcagcctggtaacaggatgagactccatctcaaaaaaaaaaaaaagcaaaaggaaaaagaaaagtgttaatgaaacattcaagaagaagtccccagagtggcccactgctgcctgagcttctgaggtcagctgagaaacgggactggagggtgtctgtcaaggccggggtaaagtcttaaaaagtcctggctgtggccattccccgaggagagggctgcatgagataacctcatgaaggacccttctggtcctaaaccctgcttcagctgcagtcccgatgcaggtacatgtggccgctgccttttttgtgattaattattgaacatgaggagctggtgctcttctcttctgttctcccgtaccccgtgtttttgctgactcagctctggtctggaactggccgaggaataagctcttctcgaactcattcactcataacactttaccgacatctgccacctaccttctcaaaccaggggtatttgctgggatacacttgccccccaaaaaggtcaggaacccctgtccaggaggtgtaagtgagccagggcagtgccacgccctttgcatgtcttccttccatagcccccacttcatagataacgagatggctcagagaaggcaggtgacagtctcaaaaccacacacacaagcaggactgggatccaaactcaggtctctctgaccccgagctgctgtccttaaggtcaccacraaacatgaatataaataaagccacatagaaggtgacttgggccacacatagggaggcaagcatcgggagttggcagttctgaaggggggatagtggggtgcgggaatcagaggctccgtagagctttgtagcatttgtgttcctgtaggcgtggacgatgagcagagtctcgcaggcacagacatgaggtgttctgcgtagcatgcaccgtgccagcaacggtgcagaggtggggagactggggacatctgggaaggctggcgggtcagtacacagagatgtatttccagagaagcctgttccctccggagtctcctccagggtgtgtgcatgttcagcacacccccatcctaaagaggggtgctcctggaggccacctcattcgcctctgctgtgtctgcagcctgtgacctctcacctcgctctccttcacccatccacataccgcaaggccaccagtttctctcctcatgcccttggtcctcttcccatccactgggaggttgggaaccctggctctaatctcagctctgtcctgggcacactgggcgacaaagggtgagtccttcttcctcttcgggcctgtttcctcgtggtgcactgggggatgagggaagtattggatgtgctagggtctaaagttccttccatttctatgtctctggttctgggccactctgtagtttcatgctgtctgcagggaagttcctggcctcgatggcccagctccacactgcccaattcccctccctacatcctctccctgctgcatcattccttctctacctgtcctccatgatcctctttccttttctagctgtctcgttacttaattccacgaaggcaggggcagttgtcccaattctgcagatgaggccaggctcctgccactttggagtgcataagaaagaaggtccctccttcatccgctgaccttccctgagccctgggctgacctctggggcacttctcccaagacatcttaaaaccaagctggggccaaggccaccacttgtggatggctagacctggaggaaccctgagtcagtctatttccactgccagacctgctactcacagatgagtgactacctctctgagctgcagcctgcagcagggggcaattgagatagttgtgaggtccagtagcttggggcttgagggctgctgcctttggtgcccagcacagagctgtaactccagggaattccaattctgatttccacataattttctgaaaataatgttctcctctcttggctctgtaaccccctgccaggggcaccttggctgtcctgtccctccaacaatctaaccctctccytyatgttgtaattgcagatttttgctggtcttcagctgcctggtgctgtctgtgctgtccactatccaggagcaccaggaacttgccaacgagtgtctcctcatcttggtaagtgctgggagtccgggactgaggggggctgtgtgaggtagcacctctgggctgggagtccgggactgaggggggctgtgtgaggtagcacctctgggctgggagtccgggactgargggggctgtgtgaggtagcacctctgggctgggagtccgggactgaggggggccgtgtgaggtggcacctctgggctgagggctgaaggtggaaagaggcttctcataccatggctcagagagcagcttgctgtgctgtgttccctcagctgtggctgcccctctctgggcatcatctccactttatagcaagtgttgggggacctcctgcctctatgcaagggcttatgatgggtccagaatagaagtgagtaggctccaccccttctcaggacaaaatctgcaaactccacgtgtggtggattttaggtcagtttttgcctaaacacaaaacaccaaatggaagcccctcagagggagacagctgacagccagcaaccccttttgtcaccaggtcagagttagggagtctgagacagctgggacagggagggcctgttgaggagcagaaaaatccgatcakttcatggggaccggaaggggaggacacactagggcttttagtcttcttgcaggaggcggagggggccacctgccctccggaatcgtcaagtccaggaaactccaggagaggggtccgaggaggccctggtccccctaacccagggactcttggctgggtccgcgctgtgacctgggccccagttctggagactgaggaccagaactcaggcccctggtcccacaggaattcgtgatgatcgtggttttcggcttggagtacatcgtccgggtctggtccgccggatgctgctgccgctaccgaggatggcagggtcgcttccgctttgccagaaagcccttctgtgtcatcggtaatgaggcgcgccccgcccgacctgacccctgaccccaggagccagggtgacgcctttactcccaatcccgactctgaccctggagacccgcacagattcagcggaccctccccctccctccccagtcccctgccacatccccagaagtccccgsctccgggtccgtgcgcggggtaggctggctgtgatctcgccgcccccgcccctgcagacttcatcgtgttcgtggcctcggtggccgtcatcgccgcgggtacccagggcaacatcttcgccacgtccgcgctgcgcagcatgcgcttcctgcagatcctgcgcatggtgcgcatggaccgccgcggcggcacctggaagctgctgggctcagtggtctacgcgcatagcaaggtgaggcctgcaasccgcgcgcggagacccgagggcgtgtctggggcacgaccrgagcgggcagggcggagagggcgaggtcagaggggctgtctccgtgctgggaaggggtgtggcctgcgggggttggagccctagcaggaggcgaggtctaagsgggtggggcgragtggaktctgaattaggtaggggcgggcctaggagtccggaccggatcagggggcggggccggagaggcggggcttgagggtttcccctggatgcttctgggtttgaagggaccactcgtaccacaaagtgggcagctgaggtgggacttgagggtggggctggagcggggctagggtgggccccaggtggaagcctgaaagtgggacttgggggacggggcaaggtaggccgggtgctggagtcctgagcctggaacctggagactcaaggcaggcggggtgggggtgggggtgggaatgggggtcggggtagggggagtgctggcggtttcgcgaaggccggggcagggtcgccgtgatgggaggagctgagaaagaaaagcgagcctgggactccgggagatgggggacctttatccctttcccgtgtggaagccccccacatctcccaggcaggcacagcgctcctcaccgcgcccctccgcctgccccgcaggagctgatcaccgcctggtacatcgggttcctggtgctcatcttcgcctccttcctggtctacctggcygagaaggacgccaactccgacttctcctcctacgccgactcgcwctggtsggggacggtgcgtgagggtctttgtagggctgcccttctccctgggatcctccctgggaacttcccgaggtctgcccatcgtgactcctgactcagggttgagcgggcctgcccctgccctctcactagagctgggacccccctgagaccagccccaatgctaaccccccaacctgctctggtggacctgcctctgtccccagctagccccgcacatcaagaccttgtgactatacccctttcccctgaccagcccaggagagggagaatccatctatgaccctaaccagcccccgtgggtgaccaggggccccttccctcatgatcaggctcctacctgcctgtacccccaacaagccgtaggtggcccccgtgaccagtcctgcctgtaacctgtttgtgtctccagattacayygacaaccatcdgctatggtgacaagacaccgcacacrtggctgggcagggtcctggctgctggcttcgccttactgggcatctctttctttgccctgcctgccgtgagttgcctcctgctcagttggtgggggaggctgagggtgggacctgctcacccctgtcacacatttgcctggggagcctggggtacctcagaggggcaaggatggggacacccttgcagcctcttactgccccaccactgcyagcacattcccccaaccatgccctatccctctagggcatcctaggctccrgctttgccctgaaggtccaggagcagcaccggcagaagcacttcgagaagcggaggatgccggcagccaacctcatccaggtacaagatgcccgggaagaagccctaggagcagggccgtgtgactgcactggtgtgtcaaccctgtgtgctgacccatgtccccagcccaactgtgacaccactttgaagctcaaaagggctatgtgactttcctggagccacatgccaagtcacacacagagccaggatgctcactgacagtgccagaaacttccccctgcaccaaatgcctggtttagggctagccagaactgccctattgcccaactccagcccaacttcacagggcctggggaggggcggagcccagacaggagctgggaggcctctggtggagacccactgctgcccccatcagctgtgcagcagtaagcctgccccacttccagcaccttcattcattcattcattccacaagcactcacacaaatgaagagargatggtgcagacagggcttttaggaatctcaacatttagcaggtgggtgggcctgcaaagttgagctgggcaaggagacagaaggaacagccagaggggtgggtaggaagccaggagtgtgtggtctcagtttccctctgtgccatggcgtgttgtgactgtgtgtgggctgaggccagggctctgattttctgtgaccctgggactaggccttggctttttctagtcaggggtgtgtgtaagggaactccttgcaggaaatgcttcagggaatactggcccagtccacctctgcctgctccctagcctgtcaccctctgagccccaaacccaagcctcactcagcccttccttatctctcctccccagggtagaaccctcctccctgtcgctgttatctccagccaccagctcagccttttcttcttagcgtcccttggggcacaatggccactgtcccctgggagctggccttctgaggggcattgtaggggcaggcggctggcactgtccatgccaagagacagctrgtattgyggtgcccataattaatgagacagctctggcagctgctccccagcccatgccaggggcctaggcaagcaggaagtaaaaatattcctgtcttaggagggtgcctggctggtgaggtcagcagtggcagccccttaaggacaagaggcatccaaagaagggaggcgtccagggcccagctctgccttgtcctgcctagcagcctccatgcctccctgctctcactgatggccacactcacagtccctccctggctcttcctacgtggagggagagggacagtctctcctcctgtctgactttcatccctcctgctgcagaggaagctcggcaagcccatggatgctgaggggttggtaggtaatgcttttcctcccctctcagtccttagtattcccatgggcagtgacaggcagctgggaaagatggagtggcattgctagtaataataatgacattctgcaaacatttgcaaagcacccacatgtgccagacactatatttgcactgagaatgcagcggtaacaaagacacagcttgcagtctagggggagagaaagwtatcagtcaaatacacaatgaataggtattcatcaaatgtgataaggggaataacaggagtgtttaacagaggaacctggcatgaagtgcctactatataccaggcactgagcttggcatttaatatacaactgttcatttaatcctcacaacaccctggtaggcaagtagtgttacatgcgttttacaggtgaagaaactgaggtcctgaagctttacttaatttgtcctcactaataaggggcagagctgggattggaaacccatgtctgcctgacaacaaaactccagctcttaacctctatgctctatggcccctggctctgacattgatctgctttgtcccctcggggaagtcgtttctccctaggccttactttcttggctgcccctgtcagtggctgtggaattggaactggcctctggctctgggtaacccacaactggaccaaggactgggttctttcaggggagagggctggtggggactgagaggcctcactgatgccccatcccccacgtcccccataccaccaggctgcctggcgcctgtactccaccgatatgagccgggcctacctgacagccacctggtactactatgacagtatcctcccatccttcaggtaggtcctgctgggggtgggggtgggtggggggctggcagcaatgccctttgaggacaagtggctgagactcaaccctggagggtggaaagggggtgatggctcccaggggagcaccctgggctggctctgcagatcctatgtaattcagagcctggagtgtcctttattccactctgctatgcccagggaagaggtggatactggacatagggcattggtgaagccctgccccatggctgaaccccggccctggagtgctggcagtgtgcatgctcacccataggtgatgccatctagggcagtgatacagccagctcgtctcccctcagtcctgaatgggggacagagttagtggatattgcagctggttggagaaagtgtgggatgggcagaaacatgtgttccagacttaggtgcatgctcctaccctgaacccccatgtaggaatatgtgcccacttttactgggccagtcagcagcctcagggcccagaagtgggtctgccccactggcccgggccaggctaagactgcatgggggtggcaccaggagagggattattaatagcatcacaaaggtgcgtgtggccaggtgcctggctaggccctcaggcaggaatgaaaaccatggagcccagctcggtcccacgggcaggcgggcatcaagcttgtggctggggcaggatgctgtgctcagcgcttctgcgggtgccttttttgcctcattagttctccaggagaagctgttgcgcgattccactcgcctctgcacctggcttccccatccctgcgccctcccagccctaggggcttcccaggggagaagcaggagagaaggggccgggaagaggggctcccagcatcacactggtgcccccacatctctccacccggcagaggcaagctcctacctcagagtgggaaggtgactagattagaagagaggccttttgttcaaggctgggcattcgagagtggggcagggctgatttgtaagaaatacaatgtgtatgagggaagatctgggggtgggggtggtcagatggtctaggacctctgcccagaggaacagagcctagtctggagattctggatccactgggcatctgctccctggaccttagtttgstcatccatrcaatgggaaggcaggcaggagagagggaagataccctccttggctcatggcagcagaaaatggcctggagagttaggaagaagccacggtcccgaatctagtcttcaaaaacccagtggcaagagtgagtgctggaggggaaggaagctrggctagccaccctgtcacacygccctcctcacctccatctccccttaaaatccagagtcagatctggagggaaaggatgtcagggccactgctggcctctctgaggaggcacggcacgttcaggcagtcagcttgatgggctgagagtaagctccttgcacggctgcccttgagctgtgccagccttcacatccatgcttggcatccctgggaaytgggggtagaaagggagtggggaaggccagtctcccactgtccaccctgtcctattctggccgggctgtcagtgaacacctctagagcagcaggacctggcaagatctgagctcaggagctctgtgcccactgggtgaggggggtggtgccatggccctgcctgccactgatggtgccctctcctgcagagagctggccctcttgtttgagcacgtgcaacgggcccgcaatgggggcctacggcccctggaggtgcggcgggcgccggtacccgacggagcaccctcccgttacccgcccgttgccacctgccaccggccgggcagcacctccttctgccctggggaaaggtaggggccccgtggggctgccacctcctcttgcttctcctcctcttcttccattctctgtcctcatcctctctcagacctgccttcagccacttcgtgggtgtctgggcctgtttgggggactcctaggccgtcagagggccagacaggtacagactgagggcctctctggaggggtcaggctggactcacctttttgtcctgtggggctctgagggtctgagtgggagagatgtccatgccatcctttcccatcatctcctccgttcatggcattgtcctctttctttctctgttcccacgtyccccttactcctccatccctgcacccccatccctcccgggaagctggacagaggaggaggccactggccacaggtgcttacggctcaggtaatcgtgggcaccatcctggggtgtgagggcagggaaccccctcccccggcatgttgctctaggagggacttagtactgaactcgcctcttgggaacgagatgccagctggaaagagagctctgtgattaagacctctgtaggacctgcgtaaactcagccagtgactaatgttcctttcttgtgcagcccttgtctgcaactttgctaatcccagagggtcctcttggggttctgtttccttccttactgaggtacactttggcgctcccagccatctctttccccttgaactgtctctcctgaagctttttacaaaatcttgaaagaagaacaaagaacaaacaatgcttacccccacataaacgttcctaaagagaagaatttcaggcatgtttggataagggaagcccgtccactcacagcatgggaaagtggctgctcttgtagaggtttagctttgaggtcaggggttaaatccccctcattctttttccctcgtcctttacccatctctttgttttgtctcatcttcacacatcacccctgaaccagccaaatggacatctggcctttgagcttcaatgtcattctgagccccaggcccagaacaaagaataggagaagaggcgagccgcccagtgatcagcaggggaggcgtggtggaagctcgcctctgccacccgatgctgtgtgtcctggaggaagccttcagtcattctgaacctgtgtgtcctggcggaaaatcggcagtgtttaggctgattggggctctgggtactctagagtttctgggctgaaaaggcctagggaggagttttggtgcagaggatgcagggagcagcctcccttccttgttctcagtgagggcacttctgggccaggggctgaacaggaagtgggtggagagggagagtccctccaggtctggggctggagggaggggaagcgtgactgccaggccaggctgagagctccctgggagagtagggcccctctcagattctctgcccgaaggtccctcattgttaccttcatccctaccaaacatagtttccaggcggaaactcaagagtttttgtatcccagcaatcctgtccaggacctgagccagggctctctgtgcttccagttcactctggtctcattttgactgaataggaaggcaaggggaatggacattagcctggggcctagtacctgtacrctccccacggctcctttggtccctgacacccccagggcccaggaacagattactactaagggcttggctgtcactgactcccagcctcgtatctatctgcctgggaggggacttggcgagtgtctgggacacagggtgatggtagtaaagtggccctttctcccagggaccccagggggctgagccatggtttgtagatcagtcaccaggctcaggcccaatggccrtatcgttaatcgtggctgtctagacygccagccaggacacccttcctccaccaaaaacacacacacatatacacactcggttggccacacctctggtggtgcttggggatggacctgggccaagtgtgcccacaggaagtggtgctaaaggagcaggatttcctgggggatggcattgccagggccagcacctctcctcttcagggttttgcaatgagtttatcaaaccatggtctccagacctcctgcatcagcatcccatggrgtgtttgttcaaaatgcagatacctggacctgtctccaagcccacaggatcagaatctctggagaagagacacagccttctgcatatgtaacatggtccccaggggatccctatgcaaagtgtgagaacatctacgttctggtgatggggctggaggatgatttaggtgggggtccttctttcccaccagctaccggaggccggccccatcccagcagctccccacactctgcccacagcccctttcccgctaacctctgttcgtgtcttattctcaaacttccagccagatgtttaataataaacggagtttctttcggatccacgccagctggagaccgaggtaccccctcrcctgctcctcctgtccccactcctccttgccccacccaatttgggggctggagaggggacaggatgggccaaggacaaggtgcatgtgcctgccgcctgccgtctgccttgggtgcccagtgaacccctcgcctttctgggatgcctctgctaggtctggggcatgggcccagggtgccaggaggggcacgtgcaggagccttaaggatgtgtgctggctctgctgctgatgccctctgtgatcttggccaaattgcttcccttcttggacctcagttttccgtctgtggaatgggcagattgaactagaggacctctgagggtccttctcactctgacttttgccaggccttgggcttagctttctgtctccctgctacccacctggggacctagcagatgcctgaaggagctgggtttggcacctttgccagctccaggaccccagctcttttagcggcatctccatggcattccttggtacctgccctgtgccaggacttgctctgtgcactagggacacggtgatgaataaaacatcgtcctcggagagttgcaaagagtaattgcagctcagtgtgatgagtgcaacaaagggaggaagcacaggggctgtggagcccgggtcaggcacacaacccagaggaagccctaaaagcagtgggtttcagggagggcattccaggcagtgaagcagcacggacccaagcaaggaggcaagagggagcacagtgtggggaaaaaagctggcagcccagtttggcccccctgagactggacatcagagcgaaggttgggggcagagctgggtyatgcagaacctaaaagcccagtgtgagcttcaccctgttggcatgcttggcagcctgagctcatggagtcctgggtttccaaaggtgcctctggggccctgtgggctggggtcccggagctaggagatgagtggcagggctcctggctgcccatgtgtgcttctgctgagaggtgttttttcctagaaacgtgggttctggaccacaatctagctactacccactattcrtgtgtccttgggcaaatcacctgacccctttgcacctcagtttcctcagatgtaaaatgcagatgtaaayagggtctgcttccactaaaactggacctggctccaataaatattggccttatttgatttggtatgttcagcagttaagatcttatttaccttaaaagaaaatagcttagaaaccatggctgtgggcaatggtttgagctgaagcgttgagctaaggagtytctgggtcaggcccrccattttgcaagcctcctttggctgtggagggtgtggacaggaaggacacagccatggcagaggccagtggcgaggctgtttccatagtccctgaagaggggctgtatgtggcttcagaagtcgtaggctgcctctgttcccccagtgagagtggccctgggagggcagatcatgaggccctaaagaaagtccttgtggaagtgagttcaaggggttgggaccagcagggcagcctgggcagagctcggcctccccagcagggcagccacagtccagcccaccccatctttctcccaggtaccaacagatccttagccagagtttcttgaccttggcatcattgacattagataattctttgtggattgcgactatcacatgcatggtaggatgtggaacagcacccttggcctctacctactagatgtctacctactagacattgccacatgtcccctgagtgggggaacttgctccagttgagaaccactgctctacaccctatcctgattgcttgacccagaaaaagaacatagactctgaagtcagagaaggctgggttccagttcttgctccatctcataggagctctgtgaccttggccaaatcatctcacctctttccgtgtatataaaatagggatggtaaagaccgcccaccacacacagtggctgagagaactgaaagaactaaggcagcctgatgggaccctgcacgttctgggagcctgggaggggaaagagctttttggtgcccactgtgtgccaggttttcttccaccttcttttagctttcagacttagaggagctgatatgagccattttctgggccctgcccaaggaactggaatccagacccactcctgggaaaacagtgccttcttgcattaaaaaggagctcagggcctctggctggctggaaacttacagaaccccacaaaccagactggaagcttcctcaaccatcacagaatcagagctggaaagggacctttcaaggtctctagtgcaagccctcgaactccttcctccataagtcctgctgagtgcaagctcagccttgcttgcattacttcttttgacagggaggttgccctcttctccagaacgccattggagccttatgtggtgggcgcagtgatgtggagttccaggcccttggccaaagtgtcagggccttctccactctcctctcttcctctccctcttggaggagtggaggacaggagaargggttgcacggaccgggcagggtggagggtgcttgccagcatgagggagcctgcaggaatggctctgcagaggaaagtttgggagagccaacctcaaactttgattggaatctttgggatgtgtcgatggagtcctgggccagtggagagcatgctggatagtgggaactgggaactgtccctgtccttttgataccctcagggcccccatccttgacctattaacctctcccctctgggcagaggccgccacccctaaggatggccctacatcctggccaccttcctgaaggtgcccctggtttcgaggtctccctcacttcagcaccttggctccctcccctccaccccatgccctgggcatgggagaccccagttcccacccaataccgaaaccagaatctcttctctgctcaacccttgayctgaaagcctctgagagtaggtgacacggtgtcctcccccaactcctgccccacttcaggtctcctctaaggctggctggtactctcttgatctggggccccagacatttggggtgggtccccctgaacccraacctgaacctgtcggaatctctagtggcaaaccacagcaggggaggcagcgatgacgtcacagggcatgggatggaggacatttgcrtaggtcctaccccaacagccataacattgtccttgaacctcttggacacagagttactctaccagatcatggttaaccagggcttgtcctggggaatgaggcctctgctaacttgttttcctccaacgtttggggaacrtggtggggagttggatgcgggaagggaagtctgagtgcatgtgtagacgtgcacgtacacgttcacatgcacacagactgtgtaaatgctgttgaaccgggagctcagtaggcagtatsggggggtagatctttagcggggatccaagaccacacaggcaggatgtcaatcaaggtgggctgaacttaggtaggagagaccacagaagaacatgttatcaaatagagaccctcactgagagggcaggcaccaggcatggcctgggcatacatgtgggcccagcagctagaaccatggggccgaggccctcagtaggccatcacgctgcacrcctccagggcaccactgcatggaagtctgtgtgatggagtccttattttgcagtgcactgcctgcacagctgtacgaggccctaaaaccctgaccagtgtgggatcagatagccgcagcagtggggagtggaggaaaatatgaaatgacacatgtaaacacacgccaacatatgtacacacaccagtgcctgtacacccacactcgcacatgtgtgtgcacaaggtgtgtgtgtgcatgcgggcgtgtgcacaggcctgagcgcgcacacgtcttctgtgtttgctgtgaggactggaggcctacctccgtgtgcatggccaggtgagcttccgaccctcagcagcctgtctgtgcccaaaggggtcgccacccccaccctctgcccactcacctgcgccaggcccagctcccacatcctcctgtctgtgtctctgactttggatttctcccactccttccactctgacatctgtctcctgtgcaccccttatctgtccgggtgatgaggggtgggatgtgggtggtggggagaggatctgcttcgactgaccccgaatcagcctcttgtaggagtgagggcctcccttaccacatccttgttccatcccaagaagtctccgcttggcggggaatccagacctaatagccacccccaagtcctaagtcagctttgtccccactcacccccacccccagctctggctaacttggctctctcccaacctgcctgccctgccagcagccggatgggcatcaaagaccgcatccgcatgggcagctcccagcggcggacgggtccttccaagcagcakctggcacctccaacaatgcccacctccccaagcagcgagcaggtgggtgaggccaccagccccaccaaggtgcaaaagagctggagcttcaatgaccgcacccgcttccgggcatctctgagactcaaaccccgcacctctgctgagggtaagcccccggggggctgagtccgatcgagggccrgctgagggtggcagggcggggacagtctgggctgggagcagaaagatctggctcgcgtctcagctctggaactgatggaccgtctttgggctctggtcttctcatctgtaaaatgggcattataatatttgctctgctatacaatggacatcagactgtttgggaatcacgtggagggtggcatttcataggggttagcagcacaggctttggagcgagactgcctggatttgcatcctggctttgtcacttatcttaggcgagtgacctaatttctctgggcctcattctcctcattcataaaatgggaacaataatagcatccacttcctaggattattgtgaggattaaatgagataatccatggaaggtgaacagaagacttttgggaatatagkaggtgctcaacaaatagctaaacacaaatgtactttggaagcggcaggaatgcatccttgatgagccctgactatgcactgcccagcactggcttatctcatttacttctcccagtgaccctggaaagtaggttctgtttttgtccccactttacagacgtgggcactgagatctctcagcttgtgagtggcagaggtgctctcctcaagcaggtctattcagctccaaagcccaggccttctgcctacccctcttcacccagcccaggctgcaagtatgagactgtggaccatgctgatgtcacttttctgagttttggctctgctggagacttccactgtgatttaggcaggagactgcccctttccatgcctcagtgtcctcttcaggaaaatgagagggttggaccaagccccctggaagacttctcccagctttgacatactttaggcccctgggtggggagaggtggggtgagtgcacaaggatgggggatggggacagctccccctttggccttggagggaggggacccagccatgctgtttctgcctgtgctgtgtcagccctcaagatgctgctggctgacacctcagagtttacagaaccccatagaccagtctttgagaggtgctgcccatagaagcctgggcacagctggtgcccaggacctcccttccctgtcctggaagctgtccgggctcttgccactgctcctgtgaggcaaggacagcatcacctctctgcgcaacacagggcactagcctcagagaagcttctctcattcagggaagaatggtttgttttaagggccttccctagtagcagagctgggcctgggagccagccacttgggtgtccttccatcttagctgaaggagaagactgtgtgcatgattacatgcagtgccatcaaaccccttatctctggggctcactgttctgcaaggtggaaccagtggggcttcctccagggctttgtgcaacaaacttgccctggactaggccagctgtgccctaaagcagctcccacctacccaccaggcagatgtttaccctgactggccaccggggcagatgggcatgcaacacactggrgctttccaccctggggagggcagtgagacacaggagcccccaagaaggttctgagccctttctgggcctctgtcttcctattggacactctactggtggtttggcatacaagggtcggatgggaggttgggagtggccccttyggtgggccacttgccccatacctgccttttcagatgccccctcagaggaagtagcagaggagaagagctaccagtgtgagctcacggtggacgacatcatgcctgctgtgaagacagtcatccgctccatcaggtaagactgaggcctgaggcgagcacccccctccgtgtgccacccactgctgctccccatctgggcgggtggatcacttgaggtcaggagtttgagaccagcctggccaacatggtgaaaccccgtctctactaaaaatacaaaaaattagccagacgtggtggtggatgcctgtaatcccagctacttgggaggctgaggcaggagaatcacttgaacctgggaggcagaggttgcattaagccaagatagtgccattgcactccagcctgagcaacaagagtgaaactgtataaaaaaaaaaaatgtattttttatggtgggtcttggtcaaaaaagtttgaaagcccctgctctactggctgtctccatgcctcaaaaattaagcagggaccagggtctcctaggccacggcctaggcatggatctggcctccaagctccttggtgtgccgtcctggcctagtctccatctccagcctgcagctctagctccagaaaccccctcaacctccaagttttctgggctccccactttcttccctggctgatacacctgcccacaagcctcttttcttgtattccttttaaaattagagtcaggctgggcgtggtggctcatgcctgtaatcccamcactttgggaggctgaggcaagagaatcacttgaggtcagaagttcgagaccagcctgggcagcatagtgaaatcttgtctttgcaaaaaaaaaaaaaaaaaattaaaaaattagccaggcatgttggtgtgcccctgtagttccagctacttgggaggccaaggtggaaggatggcttgagtgcaggagtttgaggctgtagtgagccgtgattgagctactgcactccagcctgggtgacagagtgacaccttgtctctaaatagataaatagataaaatcagagtcagctggacctgtccccactaccccccacagtctgaagcctctgcttacccccttttcacccatccattctctcccctccatgtgcccagtgtcaaggacatagtacctgacctgccacctgacccaagccagctctcctgggccaccccaccgacctctcagccagcatgccccaaacctgctcctcttcctgggctggttcccatttcaggcagtggcaccaccatccacttggtcacccaagccatgggagtcatcctggactcagaccagggagactttcagccccacctcctgaactgctccaagctcttccatatctcctcccccatcccctaaagctagtttccctgcccacgcctctgcccctccagggtattctccacacaggctggcagagctggcatgctaaagcagagtaactgagccgggaacagtgggtcacacctgtagtcccagcactttgggaggctgagacgggcagatcgcttgagtccaggagttcgagaccagcctgggcagcatagtgrgacccccatctctttaaaaaataaaaattaaaaaaaaaaaaaacagagttattgatgtgcctgccccacaatgtcccattgcccagtctctgccagagatgcagggctcttcaaagcacaccccagcctccttctcgaggctgatctcctgtcttctcataccatggcaccctgaaccccatcctccaccccggctggttgattaacccctttccatctcatccctgtttctgctacttggaggtaggggaggctgggagacgcagcagaggctgttcatggtggccaagcaggaggtgccctggtgctggacaaggggatagcaaagagatggagagggtgctgggaaagaatccctgctctaacaggacactccctctgagccccctcccccaacaggattctcaagttcctggtggccaaaaggaaattcaaggagacaytgcgaccrtacgacgtgaaggacgtcattgagcagtactcagcaggccacctggacatgctgggccggatcaagagcctgcaaactcggtgggtgcaccgggcctgttgggaggcaggggcagggaggcagcgaccccagccctgaatgaagtctgaggccaacccccgagcacccccaagggctcactgctgcagctgagtttctagactgaggaggtccctggcttgcagtgccagcctgaggccagacccagcacccgtcccaaggmtgagaaacaacccaaccatagtttctctgtgaggtgggtcctctgtgcaagccctattgactcataygccttgsgggctttstttagaatgactgtttcctggtcctaaaataatcagcctaaaataatcactgacctcccatctcccaagagaataggcaaattgtcctcactgcccacctcttgcctctggaatcctcccacatctctctggtagacccagcattaggaagaatcctcaccccaagacccacatcacctgcaccttgcccttctcctcttctggcctgcattttcactgtccactcattcatttaatcactcgagaaatagtcagtgggcatttactacttgccagcctgtggggatatggcagaaagcgcagcagagttcccacacttatggagctttcattctagtggaaggagaataagtgataaataagtaaaactggaatatgtcagacaacgataaatactaaggaggaaaataagggtcaggctgttagggtttgcaattttaaataggtgagaaggttctagagggaacagcaagtgccaaggacttgagaggggcaagtggctggagtgttggcttcagcacagcagggagcctggtgtggctgcactggagtgagaggtagraggtgaggtcagagggctaacggcactcagagagtgtaaagtcctgtaggcccctgcaaagacgttggtgttcatcyaggatgagctgcaagcattggagggttttgtgcaaacgactgacaagatctgaattgtcttttaaaaggatcaccctgggtgctgtgttgaggatggacttagcggagtgagggtggacacaggtagaccaatgagaacctgcttcagacttccacgcatgagaccgtggggacttggaacagagtggcagctgcagaggtgggacaagtggtcagattctagatacattttgtaggcaaagttgacagggttttctgatggggtgttaagagaaagaagagagtcaaggatgaagctaaggtttttggcttcagcaagaggaaaaatcgagttgccatttgttgacatggagaaggcaatgaatggagcaagtttcggtcaggagatttgggaggtgccgggtttgtgatgcctatctgacattcaagtggagtgttgatctggcagttgaatagagaagtgtggagtgcagagcagaagtacaggatggagatgaagatttggtgtcgaaagtgtagaggaattgaaaattatggatctgaagacatcaactagtgagtggagtaaatagagaatagaggtcccaagagtgagccttggatcctgcagtgtttccaggttgcagagatagaggaggaactaacaaaggagactgtaaaggagaggtcagggaagtaggaaaagaactgggagagggtggtgtttcaaatgaagaaagggtttgctggaagaaggggtgatcagatgtgttgagtgctgctagtaagtcaagtaaaatgaggacaggagttgatcaatggatttagcaacatggggttatttgggagcttgacaacagtagttttggtgaaatggcaggggtgaaagcctgactggagtaggtttaagagagaaggggaggaaaggaattggaggtagaggatagagataacactttcaagaattttgctgcaaaggagagcagaaaaataaggtgaggtcagttctagccttgtccacccaccttaaaagtcacattcccacgtgtctccactcctcccatcctctttccccttttccccaatccatcttttcttttcttttcttttcttttttttttttttgagacagtatcttgctctgtcgcccaggctggagtgcagtggtgcaatcacagcgcactgcagcctcgacctctccggctcaagtgatcttcctgcctcagcctcctaagtagctgggaccacaggcatgagctaccatgtccagctaatttttaaaaaattatttttgtagagaggagggcttgctatgttgccaagtctgtctcgaattcctgggctcaagtgatacctccctacctagcctccccaaatgctgggattataggcatgcgccactgcgctgggcctcctagtccactatttccattcctctttcaccagacggttgttttacttgtcaggttcgtgtgtggtgcctttgcttggccagtggagaaccaccagagcaggggccagtccctccaccctcaactcagcctccatctggcagggcaatggccccttccctcagattgcctgtcccctcgtggtgccttctccttcatcaggcaacctataattcttgtggaagggagggacggcgtgtccccgggccctctgatggttcccttacccttagggtggaccaaattgtgggtcgggggcccggggacaggaaggcccgggagaagggcgacaaggggccctccgacgcggaggtggtggatgaaatcagcatgatgggacgcgtggtcaaggtggagaagcaggtgagtgtaggatggggtggcggagctggccataccaagaagctctgggggccgcggtgacatggggaggatgcgtttcccacagccacagcccaagggtccccgagaagacctaagagccccctccccggccgaagcccccgccctcgccgccagacattcccataaacccgccctctcctgctaagccccgcccccaggctgcataagcccgcccataaccttcagataagcctacctcagttccccctactccatttgaccccgcctctcagttgtcgctgtagctcgcggactatccccatcggtcacacctaaccaccccccgggttatgcaccagtgcccagcttcgcccctcgctctagccaagctccacctttccaggcgggatttgtgcttcccagataagccccgcccactccaccggctagggtccgccccgagacccaagccccgcccccggccgcgtcccctccggtcccaggccctgcttcccagctgcgccccgtccccaggtgcagtccatcgagcacaagctggacctgctgttgggcttctattcgcgctgcctgcgctctggcacctcggccagcctgggcgccgtgcaagtgccgctgttcgaccccgacatcacctccgactaccacagccctgtggaccacgaggacatctccgtctccgcacagacgctcagcatctcccgctcggtcagcaccaacatggactgagggacttctcagaggcagggcagcacacggccagccccgcggcctggcgctccgactgccctctgaggcctccggactcctctcgtacttgaactcactccctcacggggagagagaccacacgcagtattgagctgcctgagtgggcgtggtacctgctgtgggtgccagcgccccttccccacctcaggagcgtgagatgccaggtcgcacagagggcagcagcagcggccgtccygcggcctctgggccccccagtgccctgcccactccatcaaggccctatgtggcccacctggcaggggcacagccccgggagtgggagcgggcgctggggccctgggccctgacccagcttccagctatgcaaggtgaggtctctggcccacccttcggacacagcagggaagccctcccgccaagtccccgccccacttgggggtgggccaaggtgcccccacaggtacccacaaagcacaggaccctgccacaaggcaggtggacaccatatatgcaaaccatgttaaatatgcaactttggggacccccatggggtctctctgtccctcccccattgggagctgggcccccagcagtagctggtctcaggctgcttggccaccaccctgtccctattctttggcttatcactccttcccctcccagcatggggcctgtttctcccctgccctctcctaagggcaatgcctgggcctttcttcccatttgcaagtgtcagctcccaggggctccctcctcctgctgggtggccactcccctccttggccctccagacaccactcatagtcagcacaggtttctgtatcctccccaaaactcccagacagtgcttcgtggacgatcgcacaaacatagccttttagtttctccagacaggaagaaagcctctcacacttaaacatgcaatgacgtgacacacttggagacatgagtgcagagccactcagccgctcctgggcctctgcagcagatgccagtggactggccttgcagggtgacgwccactaagaggaagacccccaactccatctgagcaggagaaggagctttgaagtaacccgagagctctccaggccccacccagacctttacccgctccccttcttcaagaagatctcctcctctctggtccaggagccctaacccactgcctctgcctgtccccaagggcccgcctccgtgtctccacagcacaactcgggcccaggcctgacaccactggagagaccccaggcccacttctagccaggcctgtgccttcctagtcactctaactcccagagagaataagaatgcatgtaatagctataccaaccgcgcatccggctttcacatgcactgtctcccctccctccacaccccacttcttcacttcaattggcagcgccacatccaggcgtcagcccccattcactccaggaacactttcttatccccacccctttgctcctcttctgcaaagccaatgcaggtggcaggaaggtgaggggtagtggaccaatggcaaccctctgtgggaacaaggggccgaggccacgctgcctgcatctcgtgctggggacctgcatgcgccagcaccagggcttggactggatcttactcagtccatggtgcccagcctctgccccaacatgccctctgcatgtgaccgtcatgccctggatggagccactcctggctcaccccacctgcactgcactgtccccagagagccacccctccacccactcagagacagctgtggagagggccaggagaatgggattaccctatgaccaaggagacatgggaagaagccctccttccttccacgatcgaggttccgccatcaactcggttctcggatatgcaagtacctcactttgttaacttattaacttattggtttcattaaagttttcaagaggaggtgattgttcttggttttgttcagtggctgtgaggtgaggctcctggtttgggggtggggacaaggagatttggattggtcgggactctttgttgtatacaacaaaaacccaaccctgtatggtttaaacagacaaacaaaaagaaacttattggcacagagaactgagaagtccaggggatagatttggtttcatgcacagtgagatctagatgcttaaacgtgtcaggactcttgtttcctgtaagccttcctttctggcaggctgacctctcatggtgaccagtaaaattggccaccactttcctaatagtttgcatcagtcaagatcaagtcaggaaggcagaaacaacactaagtttttcagcaaaagaatttattataggtaatgggttacactgatgcaggagggctgaaagaacaaaagagaattttctctaggtgactctgagatagcctagagaaaataactgcagaaagcagttaccactcccagagctgcaagagtataggaaacaggttggggttatcagaacccacaagcttgcggagagggagcccggtagtgttggggctcagagatctgaaaaggaggtactccctggctggtgctagtacctcttaggggacacaatgaggcttgtctgggagtatgggaaaaaagccgaagtctgggatcaactgttgcaacctggctgttgctgataaggataggaagcaaaggaagagagaagtctccacttttcttgccttccagtcttcccctagtgccccttattgtcaaagctagcgaacaaaggagtgatgtggtttgcagagtcccagccccagtatcacagagttagaaggctgcacttggaactgaaagacaataacatgggcacgggccacccctttggacacacagtttccacaaacatcaatccatacatacttgaaccgccatataacgacagtagcttccacctagtaagatgaaactgtcctttatacaaatgaagacactctagtcccctccccctaaatgggaaaaacacaacgtcccacggttcaacagatgcatccatctccaggggttagtcactgaatccatatttgggttaagtattcctctaattcaggcacaattccacctacaactaaacactaaagtaaagttgatcatcacatacaatgtttatataaaatatgggagaaaggaggagggaggaaaaaataatatgtacagtgcacacacacacatgcacacacatcccaagcaaggaaggaagtacgcatagccgcaatcgacctctttctggtatctctggtcacagtgccatggttggtatgaataatttccttattccattgcccttccatgtttcctttgccctcagccaacacctcagctttttagggacctttttttttttttttttttgagacagagtctcgcttggttgccaggctggaatgtagcggtgcgatctcagctcactgcaacttccacctcctgggttcaagcgattctcctgccttagcctcccaagtagctgggactacaggcatgtgccaccacacccagctaatttttgtatttttagtagagatggggtttcaccatgttggccaggatggtcttgatctcctgatctcgtgatccacctgccttgtcctcccaaagtgctgggattacaggcgtgagccaccgtgcctggccagggatctttatatggtggagtgacccagataatcattcctgaagggtctgaatcctcagcggtcctgcatgggtgggtgtcacagcttttcattgacttttgctatcatacatggaagtacttattatagaaaggccttagagaatcccttgggttccagacttagtcctccttgccctgttgtgtggcagcaaccaatttccgctcggtaatgaagatcagtcatgcagccagtgtattaactctttatttttcctgctggttgagtggcatgaggagcccacaatggcctggttaaagtttaaacctccaatgtaatgaaaactatgttgcctcccttcccttgaaaactaagacctccaaactagcagagctcaatgctacagggaccagaggcagaagttttgtgagtgggtggagtaggctgaataatagccattcaaatatagcaagttctaatttctgggacctgcaaatgttacattataaggaaaaggggcctttgcagatgtgattaaattacagatcatgatatggggagattatccgagactgtctgatgggcctaaatccagtgacaaatgtctttttaagagagtggcagagggagatcaagtcacacagaagaggagaaggtgatatgaacataaaaacagggactggggtgatgctgccacaagccaaggaatgccagcagccacaagaaactggaaaagtccaggaatggattcttgcctagagctctgaagggagcacagccctgcacacaccttgatttgggctcagtgaaactgatgttgaacttctggcctccagaactgtgagagaataaatttctgttgttttaagcaaccaattttacagtaatttgttatggtaaccacaggaarctaatacggcggattatttggtgtcatagtgagagaagccactctcaccagctcccttggattcctggaaccttatatcctggctatgtcaatgaggataaacatacctgcttcatgatggaaagggtccagtgggatcgacctggcaccaagtggctaggtggacccttgcagagggatgatatactaagtacttagcatttgtcttggctggaggcaggttggacatacagtgtggcattagtcagatcagccttgacgagttacgttcatgttgttgaacctgtaaatagtctccattctggccaccatgaccacattgtacataaacatatggagaatgcgctggagagactagggagagaggctggctgacatccatccaatgtgccatcttgtccatcgaattatcaagagctgcctctgccatggatgactttgggtgagattttacttggaatacaaatatcttcatattctgtgtcatttctgaaagtccatctactagtctctcccagtttttcttatggccagtcctccagttctgtgctttctgaacccctgaccatccagccaaaccattagccactgcccataaatcagtgtagatccatacttcttgtcatctctcaatcagacaaaatggacaaccaaatgtactgaaggacaggtaggatggagccaggcctgggaactggggtggtggcagtggtggtgatgttccaggaaaaggcacagtatgtgatagggtccagaggcaccagtgagtgtggtagatgaaaggaacagaaagaaatcccgtggctggtcccagacagcaacggagagaggggtgcaagatgggactttagaattaggggtcaaagtttacaggatttcattaatcattccaaagagataggacttagccatgatagcagtggggagacaataaaagatttttctcaggcagcacactggggtagatttgcattttagaattttttttttttcctgggatggaagatgtatttgagggagtaagtgtgggtgtggggagagcaggtaggagactgctgcagtcacccgagcaggaggtgctggtaacccgaacaagtcccatgacatttcactaattgagttaaatgtctattgagcacccgctatatgccagaccctgcctcagcacaatatacaggatgaacagacacgggagaacaagttacagccctgaggtcatccagcccctgggggagacagatgcacaattaaccaatgcacagctactgtttatcttctaaatttgcctggctcagcaaggagagtttgcaggtggctctgggagtccccaaactgtcatcaaatacggccttgacagcagatacaattttagcttggtgtgtcatttatctattgctttgtaacaacttattttaaaacttaatggtttaggacagatgtggtggctcatgcctgtaatcccagcactttgggaggccgaggtgggtggatcacttgaggccaggagttcaagaccagcctggccaacatgatgagacccccatctcctaaaaattacaaaaattagcctggtatggtggcgtgcgcctgtagtcccagtcactcaggaggctgaggcagagaattgcttgtacccgggaggtggaggttgcagtgagccaagatcatgccactgcactccagcctgggcaacagagcaagattctgtctccaaaacaaacaaacaaacaaacaaaaaaccaccaacaaaaaaccttaatggcttaaaataacaactattttattttatttactcttgattctgtgggtcagcaatttggggtgaactcagctgaacagctctgctggtctcacctggggtcactaatgtgcttgcaatcatctggcatcaacagggtctagatggcccaagagggccttccccacgtgtctgcaatctggtgtgagttggtctgcaggcaagacggctcatctctgttctatggagcttctcatcctccagtagattagactgtacttcttcatatggcaagagggcaaaagcagaagccatcaggcctctggaggcccaggctcagaagctgtaccaaggggctcagctcactttgatgggtgctctgaatacgttgcgatgtttacactcttgtagatctaaaaaaacccatgcagttatttctctatttagataatttatttcatgtacttttgtttttttgagagtgcagagtgcagtggccactgcactgggccatatttcacgtacttttgacagctccaattgttaaaacagtttcgttttccctctgagaagctgagaggcacatcttcccctaccacccacctctgtgtatagcaggaccgtgatagctgctaccacggtgtgttggtctgtgtgggatggcatagcaaatatcatggactggaaggtctaaacaacagaagtgcatgatcacacagtcaaagttctggaggctggaaattcaagaccaagttatcagcagggttggtttcattctgaggcctctctcctatgattgtagaggctgccttcttctggtatctttgcatgattatctcttgttctctatgtacacaggtctgaggtctctctctgtgtcctaataatctcctcttcctcttcctcctcctcctcctcctcttcttctttgtgttcctagttttctttttcttttcttttttcaagttttattttaggtttggggacacatgtgctggtttgttactaaggtatattgcatgatgtgcatgatgctgaggtttgggatacgacagaacctatcacccaggtagggagcacagtacccaacaggtcatttttcaacccttgatcccctccctccctctcccttcttgtggtctgcagtgtcaattgttgccatctttatgtccatgtgtaactaatgtttagttcccatttataagtgagaacatgcagtatttggctttctgtttctgcattagtttgcttaggataataacctccagctgctcaagttgctgcaaaggacatgatttccttctttttatggctgcatagtattccatggtatatacgcaccacattttctttatccagtccaccattgatggatacctaggttgattccatgtctttgctattgtgaagagtgctacaatgaacatacagttgcatgtgtttttttggtagaatgatttattttcctttgggtatatatctagtcatgagattgctgagtggaatggtagttttatatttagttctctgagaactctccaaattgcttaactaatttacattctcaccaagaatgtataatcattccctttcctctgtaaccccgccaa

SEQ ID NO: 8763 - DNA, 93143 bp, Homo sapiens
tgatttttatatttttagtagagacagtgtttcaccatgttggccaggctggtcttgaacttcgtctgaaaaaactccgtctcaaaaaaaaaaaaaaaaagaaagaaaaaggctcaccggaacctccacctcccaggttcaagccattcttgaacctcaggcaatccacccacctcagcctcccagagtgctgggattacagacgtgagccactgcacccagtctgcagtggatatttttatccctgctttacaaaaacaagaaaacagcagtactacaacttggcaggagttacatagtatgagtctctctcctaccactttaagagctgaattttaaggccaggtgctgtggctcatgcctgtaatcccagcactttgggaggcagaggcgggcagatcacaaggtcaggagttcaagactccacctgaccaacacagtgaaacccctgtctctactaaaaatacaaaaattagctgggtgtggtggtgggcgcctgtaatcccagctactccggaggctgaggcaaagaatggcttgaacccgggaggtgaacgatccagtgagcctttttctttttcttcttttttttttttttgagacggagtgtcgcttttgttgcctaggctggagtgcaatggcgtaatctcggctcactgcaacttccacctcctgggttcaagccattctcctgcctcagcctcctgagtagctgggattacacgcatgtgccgccatgcccggttaagtttgtatttttagtagagacgaggtttttccatgttggtcaggctggtgttgcattcccgacctcgggtgatccgccctccttggcctcccaaagtgctgggattacaggtgtgacccaccgcgcccagccttcttttgttttctttccttttttttcttcttttcttttcttttttttttttaaggaagggtctggctctgtcgcccaggctgaagtgcagtgtcaccatctcggtttcctgcagcctctgcctcccaggcttaaatggtcctcccacctcagcctcctgagcagctgggactacaggcatgcaccaccatgcccagttaagttttgcatttttttttttttttttgagacggtgtctccctctgttgcccaggctggagtgcagtggtgccatcttggctcactgcaacctccgcctcccgggttcaagcaattctctgcctcagagtagccaggattacaggtgcccaccaccacgcctggctaatttttttatagttttagtagagacagggtttcaccatcttggccaggctggtcttgaactcctgaccttgtgatctgccggcctcagcctcccaaagtgctgggattacaggcatgagccaccgcgcctggccaatttttgtattttttgtattattattgttattttttgagacaacggctctctcctgttgcccaggctggaggtcagtggtgcaaacatggcttattgcagcctcgatttcccaggctcaggtgattctcccactttaggcttctgagtagctgggactgcaggcacctgccaccaagcccagctaattttttgtatttttagtagataaggggtttcaccatgttgcctcggctggtctcgaacccctgagctcaagccatccgcttgcctcggcctcctaaagtgctgggattacaggtgtgagccactattcctggccaggaaaccttttcttacacttaaaaaattctaaatgtatttctttgagttcctttttctcagaaacctacacagacttcttcgtagacagaattttacctatttttgcatccacactagaccaggatctaatttctagagtgcttggttaactaccatccttcatgttaatttcagtggctaatgtttttgctcctccttatttaatatccttgttcaagcttagttttccctgagatgtgtttattattttacaaaatcaatctaatttctaatatctttaggtagatttgcgttttacccactttaacagtgttaacacgtttgaaatgtctgtcatccctagcttttctgacttgtttcctggtttgaaccttaattcagatgctcagcagaaggaaataggttgtctgctaaacatagccacatggctgaatcccttgacattggcaaatagggaaaaactaatgctagaatatgggatgaacagtctgagggagttttagaacgattcaaaaagctcaagtggttataattaggtagtgttcatacagttttaaaagcggagctctggaactgggcgcggtggctaacgcctgtaatcccagcactttgggaggctgaggcaggtgaatcacctgaggtcaggagttcgagaccagcctgaccaatatggtgaaaccccatctctactaaaaatacaaaaattagccaggtgtggtggcacgtgcctgtagtcccagctacttgggaggctgagacaggagaattgcttgaacctgggaggcagaggttgtagtgagccgagatcaagccacagtactccagcctgcgtgacagagcaagactctgtctcaaaaaaaaaaatttaaaaataataacttaataaaaaaaaaaagcagagctctgagatgcgtggtggttccatttcacaagcgtttcctgagcatgtaatatgtgctgagcaggctcctggctctgggtgagctgggcaggtgagaggcttggggtgaagaccctctctggaggagttcacagcctggtacttcttacttatctgtccattcagggctggagtggcccagctaggcaggtgctgaggccacccagctgaagcctgaacaggttgacccctccgctgatgtttgagcgtgtttaccacaggaagagaagctcctcagcaattgttccttcttttcaaagcagcatttcctatttcatttagaattaaagaaagaataaggaattctctaggccagtggttttcaaaatatggccactggtgcagcatcacctggaattttgtgagagctgcaaactatcccccactccagacttacagatttagaaataatggggcggaaatccctgatcgaatggaacattctggagttcgtcccctcacccaaccttaagatgaacttggaacaagggtgctcagccagaggggcaggtgaggccgcaagtccagctgcccctgttcacctaggtaagcacatagactgtgtctaccccctgggggcaccttgctctaaatcatctgcccaatcaggaccaacatggtctctacaacgtcacttctgagaaccacttgtccacaatgaagggaagaagaaaatccatcagcacctggtgaattgggaaacaatggggctctcacttgctaaatgcattcacctgttcacttatttaatacactctgccctgcagggtagagaaaagacacatgaggggcccaaggaacttagaacccacctggttagaagaaactaacaagcaagagacagggttagaaatataaatgtgacataagggcaagcccccaaataagaaagaacacaagaagagaagaagggatagatcaaatcctagtggtctggagagattagatgtggcttctcaaagccaacaaagatagcaccaccaacaataatacaccagcaataatcgctatttattttttcaacttttttattgagagaaaatttacataaaattcaccattgtaaccatttatttatttattattttttgagatggagtcttgctctgtcgcccagactggagtgtagtggcaggatctcgactcactgtagcctccacctcctgggttcaagtgattctcccgcctcagcctcctgagtagctgggattacaggagcgcatcaccacacctggctaatttttgtatttttagtagtgacagggtttcaccatgttggttggccagctggtctcgaattcctgacctcagttggtccatcctcctcggcctcccaaagtgctgggattataggtgtgagccaccacgcctggcttgttttgtattttatttatgtatttgcttttttagacggagtctcactctgtcgcccaggctggagtgcagtggcgcaatctcggctcactgcaacctccgcctcccgggttcaagcaattctctgcctcagcctcccgagtagctgggattacaggtgcctgccaccacacccggctcatttttctattttcagtagagatggggtttcaccatcttggccaggctagtcttgaactcctgacctggggatccacccgccttggcctcccaaagtgctgggattacaggcatcagccactgtgcccagccgttttgtatttttttagtagagacggggtttcccccatgttggccaggctggtctcgaactcctggactcaagtgatctgcctgcctcggccgcccaacgtgctgggattgcaggtgtgagccaccgcgaccggccgctttctctttctttcgagacaaggtcttgctttgtcacccaggctagagtgcagtggtgctatcatagctcactgagcctagaactcctggtctcaagatacctccgccttattctcctgaatagctgggtttacaggcatgtgccaccgtgcccggcttttttttttttttttttttttttttgagtctcttgctctgtcgcccaggctgcagtgcaggtggtgcaatctcggctcactgcaagctccgcctccagggttcacgccattctcctgcctcagcccccggagtagctggaactatagcgcccgccactacgcccggctaattttttttgtatttttagtagagatggggtttcaccgtgttagccaggatggtctcgatttcctgacctcgtgatctgcccgccttggcctcccaaagtgctgggattacaggcgtgagccaccacgcccggagtttttttttttttttttttaagagggaagtggggtttctctatgttgcccaggctggtcttgaatttctggcctcaagcgatcctcttgcctcggccttccaaagtgctgggattacaggtgtgagccaccacacctggccaattcagtcttaaaccaattttctgaggcttcgttttggcaaggctacttatctgttttaaaaataaacgatgtattttagtaaaagaaaaaaaatggaggaaaaaacagggttttgatctcatggaataattatgaggctaatctaatgagcttcataaaatactatacccatacatagtatgcttgttattttattgttttgtcagggtccagagaactaggccactgtgttgcttaggcaccgtgtctgcacatagttcattccggtgtacattcattcatctttacactagaatgttagtttcaagaactcagtcacctcgtctacactgtcctttaatccccaatacctgcgacagttcctggggcaaaaacaaatgcttgttgaattaaaaagaaaaactgggccgggcgtggtggctcacgcctgtaatcccagcacttcgggaggccgaggcaggcggatcacctgaggtcaggagttcgagaccagcctaacatggtgaaaccccgtctctactaaaaatacaaaaacattagccgggtgtagtggtgggtgcctgtaatcccagctacttgggaggctgaggcaggagaatcgcttgaagccgggaggcggaggttgcagtgagccgagatcacgccattgcaccccaacctgggtaacagagcgacactctgtctcaaaaaaaaaaaaaaattcctgtagaagctcccaagcccaattaaagctcaaggctatcgtccacgtagtgggttccaaatcgctaagttcccaggccagcagggagagcgagccgagcgaaggtcgcctgtgtcaaaggcggggatttgcacagtatttacatggaagcggaggaaaggctgcttagcaaccgggctgaggggacgggctgcactgcgcacgcgtacatgggcggggcatcttgcgcatgcgcaggcgacagctcatggcgttcagggcctgacggttgctagggtgacagggacacaacatggcggcgggatctctaacgctctccttcgagggaccaccacggagatcctagtgcgggaccccgcctcagggaagtggaaagcagggggacaaccttcctgcttctttcttttccgtccagtgtcggcaaggggttgtcaccggcttccgcatccaagatgaagagtgagtggggccggggaaaggggcagggactggagagcgagtggcgggggagggagggactgggggagcttgaggagcttgaggggcctgtggggccgggcgtcgtcgccttctgccgtggctcgacaggcccgggaggctccgcatgtggrccccgaatccccctcggctgtgagaagccggtgcccctgggggaagcttgaggggttggggctaggttgggaactttggggtctcggagagccgactcgagttcccgctcaggcatattttggtgcaggtgcgtggttcttacattggagtttagggagttgactgtgattcattttattttattttaaatgctggcttgaacctgacactcttttcctgaacattcggcagaaaacgggggagcgcttacagcgtggctccctgccttttcatgatactggtttagtgaccaattgagaggaaagctgggctgtgtgctttattttattttttgggtcaagcagtagtgttttataggaaccactttttaatagtagttttgaagcaaccttttagttaaaagctgttacttcaaagttgggaaatgaggtagtcattctagaaaatgtaacgggtaaaaaattttctttagtgggatttgtggattattgacaatccaagtgcaaccagctagaatgatgtttttaaaattattattactgtacagatataattgtttatggttgtgaaccagaggtgcagtaaaaattcagacctttgctgtgaaaatattatgttaggagtagttataatgttaaatttgcattgtatcctaattgtcaatggtgtacattgcataacatttaaaataattaatctcattcaccctttacaaggcatttttatttttattttattttgttggatattgtttaatgtttacctttttcattaatgcactacaaagctgtagttagaatccaaggtctacaaaagactttacacttttacttacagtgcagactatgatactgcacatattttgtactatattcatttttttcttcccatctgtttgttttgaaaattttcagatgtacaggaaagttgcaagagcagtacattgaatatttataaacccgtccttcacttagctgcaccattttgccttatttttgtgtgctcgctttcgctctggtgttttctctctcccatttatgtatttattttcactggacctttcaagagttagttgtagactactaataattcaccacttctttcagcagttatctgccaagaacaaggacattctcctacatcatcacagtacaaataacacatttagaaaatttaacaatgatacaatactctgatacacagtccatatttcagtttttccatttatcccaataacatgtgttatagttgtttatattttttctatccaatcaagaatcaccaattgtattctgttgtcatatctctttggtctcttttaatatggtgtccctgccttttgtgtctttcatgacaatgatattttcatttttatttggctgtcctctgtaggccaaatgacatttttaaagaatccagcccagtgttttgcagaatatcgctcaatttggatttgtctgattttcgcctcatgattagcttcagcttaaatgtttttaccaggaatatgtgagaggcaacgttgtgtctctgtcagtgtggcccttccagagtgcctgatgtcagttcgttgcagttttgctgaagttagatttgatcatttggtttatttatctaccttctttttctcttagactctttttttttttggacagggtctctctgtgtcaccctggctggagtgcagtggtgcaatcttggctcactgcaacctctgcctcccgggttcaagtgattctcctacctcagcctcccaagtagctgagattacaggtgtgcaccaccacgcccagctaacttgtattttttggtagagacggggtttcaacatgttggccaggctggtctcaaactcctgacgtcaagcgatccacccgcctcagcctcccaaagtgttggaattacagacgcgagccactgtgcctggccttcctcttagactcttcataccccactacctagaggcatcactttcagtaatttactctctatatatatattatatataaatatataaatgtgtatttctccctttttaaaagactaatgttagcactgcatgtgtatacctatatagaaatatgtacatatgctgcctgggcgcagtggctcacacctgtaatgccaacactttgggaggccgaggcgggcagatcacgagttcaggagatcaataccatcccagctaacacggtgaaaccccrgctctactaaaaatacaaaaaattagccaggcgtggtggtgggcacctgtagtcccagctactcgggaggctgaggcaggagaatggcgtggacctgggaggcagagcttgcagtgagctgagatcrggccactgtactgcagcctgggcaacaaagcaagagactccgtctcaaaaaaaaagaaaataaatatgtatatatgcgtatatatatataaaatttacatttgtgggccgggtgcagtggctcacgcctgtaatcccagcactttgagaggctgaggtgggtggatcacttgaggtcaggagttcgagaccagcctggtcaacatggtgaaaccccgtctctactaaaaatacaaaaattagtcaggcgtggtggcaggtgcctgtaatcccagctacttgggaggctgaggcaggggaatcgcttgaacctgggaggggggcgttgcagtgagctgagatcgcactactgcactccagcctgggcaacagagcaaaaaaaaaaaaaaaagtatatgtgtgtatacatataaaatttacatttatggggcgggtgcagtggctcaygcctgtaatcccagcacttcgggacgccgaggttggctgatcacttgaggtcaggagttcgagaccagcctggccaatgtggtgaaaccccatctcaaccaaaaaatacaagaaaaaaaaaatcaaaacaaaacaaaatacacaaaaaatgtacatttatgatttacttcttgtaaacttttgtttttaaagtatatttagtattgtttggtatgttcttttagatggtcattttggtagttttcggttacttggtttagtggtgacatctttattctccctttcttccttctaccttaaaatgtactctaagaattattgtaaccttttatccccctggtttacatcctgatcattaaataaatgatttaaaaatagttaacaatggagagaatattccagaactggaaatcacagagacagagttatagaagtagaatgatcaggaaaagtgagtaatggtgaaattggatccatagcttggggtcagagtggggctgggaatgctagattattacaggggtctgtcaggattttctaggtatatttttgtacttgttttctaggtgatgccctgtgtttaggggtgtgttattctgtggagtattcctgtccttctttttatttggcatcgtttgcaacagtagagagcaaagagtgacacagtgcagttgataagagcgtgggctttggaaccgggtgggcatggcagcttcaggcatgttactttttcttatactgcttttcttcattgttccggttatctattgctgcgtaacagatcacttcaattttgtggcttaaaggaacaacagtccttcttgtggttcttcaggttgcctggattcaactaggcaggtcttactggaagtctctcatgcactcagatggtggctggagctgaagtcatcttaaaagtttgttttttattttgagatggagtctcactctgttggccaggctggaatgagtacagtggcacaatcttggctcactgcaacctctgcctcctgggttcaagcgattctcctgtctcagcctcctgagtagctgggattttaggcgcaccaccacacctggctaatttttatattttgagtagagacggggtttcaccatgttgttcaggctggtcaagaactcctgacctcaggtgatccacctgccttggccttccaaaatgctgagattacaggtgtgagccagtgtgcccagcccacattcatctttaaacagggatgataataccaatcacatagcattgtttcaaagattaagtgaaatcatctatataaagctcatagcacagtgtctgatacatgataaattgtgaatgaattattatttgctatttcagcagatggaaggcagggatataaaaagggaaagaatgaaaacatcagtcagatcctgacttggaaaagtttccccttatctagtctagttaaagtaccactcttttttcctgtctgaactttcttttttgtttgagatagagtctgttgcccaggctggagtgctgtggtgtagccacagctcacgacagcctccatctcctgggctcaggcaatcctcccacctcagcctcctgagtagttaggaccacaggcatgtgcctcctcgcccagctaatttttttttttttttggtggagatggggttttgctgtgttgcccagcccaggctttttttttttttttttttttttgagatagagttttgccctgttgcctaggctggagtccaatggcgcgatctcggctcactgcaacctccacctcccgggttcaagtgattcttctgcctcagcttcccaaatagctgggattacaggtgcctgccaacatacctggctaagttttgtatttttagtagagatcgggtttcaccatgctggccaggctggtctcgaactcctgacctcaggcaatctgcccgccttggcctcccaaagtgctgggattatatgcatgagccactgtgcccggctccccggcttaagtttttaattgtttactagagatgggggtctccctatattgcccaggccggtcttgaactcctggattataggcatgagccactgtgcctggtcctgtctcaactttttaatgaattattcaaaacatacctataaaaagagaaaagtggccaggcatggtggctcatgtctgtaaacccagcacttcgagaggctgaggcaagagattgcttaaatccaggagtctgagaccagcctgggcaacatgacgagactctgtctctactaaatttaaaaattggccaagcatggcagtgcatgcctgtggtctcaggtactcgggaggctgagggaggagcattgcttgaacccaggagtttgaggctgtagtgagctgggatcacaccactgctctccagcctggatgtcaaaggaagaccctgtttcaaaaaaataaaacaaaaacccagagaagttacactctgaagacggtaacagtttgctattgtatcagagagaatttttctttttttttttgtaggtagtctcactctgttgcccaggctggagtgcagtggtatgatcttggctcgctgcaacctctgcctccagggttcaagcaattctcatgcatcagcctcccgagtagctgggatttataggtgcaaaccaccacacctggttaatttttgtagttttagtaaagatggggtttcaccatgttggccaggttggtctcgaactcctgacctcaggtgatctgcccgcctcggcctcccaaagtgctgggattacaggcgtgagccactgcgtccggcccagagagaatttttaaaagtatctgttgtaattacaatgaggtttaaactgtctttttttttttccgccatggaaagagtcaagtwatttgtctttcttaaatgctggtgtgtccgcagttggtgggttcttggtctcactgacttcaagaactaaacctcagaccctcacggtgagtgttacagttcttaaaagcagtgtgtctggagtttgttccttctgaagttcagatgtgttsagagtttcttccttctggtgggttcgtggtctcactggcttcaggagtgaagctgcagaccttcgcggtgagtgttatcgctctgaaggcggcgcatctggacttgttcattcctcctggtgggttcgtggtcttgctggcctcaggagagaagctacagacctttgcagtgagtgttgcagctcataaaagcagcctggacccaaagagtgagtagcagcaagatttattttaaagggtgaaagaacaaagcttccacattgtggaaggggactggagcatgttgccactgctggcttgggcagcctgcttttattctcttatctggcaccacccacatcctgctgattggtccattttacagagagccaattggtctgttttacagagagctgattggtccgttttgacagggtgctgattggtgcgtttacaatccctgagctagacacaaaagttctccaagtccccgtgagatcagctagacacagagcactgattggtgcatttrcaaaccttgagctagatacagggtgctgattggtgtgtttacaaactttgagctagatacagagtgctgattggtgtatttacaaaccgtgagctagatacagggtgctgattggtgtgtttacaaactttgagctagacacagagtactgattggtgtatttacaatcccttagctagacataaaggttctgcaagtccccaccagattagctagatacagagtgctgattggtgcatttacaaaccttgagctagacacagagtgctgattggtgtatttacaatcccttagttagacataaaggttctctaagtccccactagactcaggagcccagctggcttcacctagtggatcccacaccagggctgcaggtggagctgcccgccagtcccacaccatgtgcctgcacccctcagcccttgggcagttgatgggactgggcaccctggagcagggggcggtgctcctcggggaggcttgggctgcgcaggagcccacagcgggggttgggaggctcaggcatggcgggatgcaggtctgaagccctgcctcgtgggtagcagctgaggcccagaaagaatttgagcacaggcagggccggtgggccggcactgcagggtatccggtgcaccctcagcagctgctggcccgggtgctaaacccgtcactgcccggggccagcagcaccagctggccgcacctagtgcggggcccgctgagcccacacccacccagaactcatgctggcccgcaagcaccacgtgcagccccrgttcccgcctgcacctctccctccacacctcgcggtgcctcttcctccacacctccccgcaagctgagggagccggctctggccccggccagcccagggaggggctcccacagtgcagcggcgagctgaagggctcctcaagcgtggccagagtgggcaccgaggccgaggaggtgccgagagccagcgagggcttcaagggctgccagcacgctatcacctctcactagtattttcatggaatcaaaaaaggtacctcaaataatccttttcatctccttctgtgagcatcaatttttgtttttattttatttgtttatttatttgttattgktattattatttttgagacggagtcttgcagtgtggaccaggctggagtgcagtgacgtaatcttggctcactgtgagctccgcctcctgggttcatgccattctcctgcctcagcctccagagtagctgggactacaggcgcccgccaccacaccctgctaatttttttatacttttagtagagatggggtttcaccgtgttagccaggatggtcttgatctcctgacctmgtgatctgcccaccttggcctcccaaagtgctggtattasaggcgtgagtcaccgtgcccagcctatttattattattttttgagacagagtctcgctgtgttgcccaggctggagtgcagtggtgtgatttcagctcactgcaacctctgcctcctgggttcaaggtattctcccacctcagcctcccaagtagatgggactacaagtgtctgccaccaygcctgggtaatttttgtatttttagtagagacagggtttcaccatattggccaggcttgtctcgatctcctgaccttgtgatccacctgcctcagcctcccaaagtgctgggattacaggtgtgagccattttattttacttatttattattattatttttttagagatgagggtytcaccatgttgcctagactggtctcaaaatcctgggatctggtggtcctcctgtctcggcctcccaatatgttggaattacagctgtgcctggccactttctgtttttataagtagatgcattatctagcaactgtttctcttgaaataaaaacaaaatgaggtaaacttaatactggctttgtgataaatccaaaccatagaaggttttgagttagcctcaggaccttcccctatttgccacagtaaatcctggttaacattgtcttagatggacattcatacattttctatgcatatttttgtgtatatacacacaagttttatatattggtgtgtgtgtatatacatataaatatatggttgttccttacccaaaatcaaatgggattacattaaatatgttgtattgtagcttgtaggatgatgcatctatgaagatgyttgaacatagttttttttttgtaatagatcttgctattttttttttttttttttgagacgtactctcagtctgttgcccaggctggagtgcagtggcgtgattttggctcactgtactctccaccttctgggttcaagcgattctcctgcctcagccttccaggtagctgagattacaggcaggcaccaccacgcctggctaatttttgtatttttagtagagactcggtttcaccatattggccaggctggtcttgaactcctgacctcaggtgatcgacccgtcttggtctcccaaagtgctgggattacaggcatgagccactatgcctagccaggtgttgctatgttgaccaggctggtcatgaactcctgatctgaagtgatcctcccatcttgcactcccaaagtgttaggattacagatgtgagccatcacgcccagtccagaacatagatctttgaataattcttcaagtttattaacagtggacttactgggttaataggtgtaatttcaattttaaaattttaagaatttttgaatagttttgtgttcttttctgttttcacaatgtttagtaattcaggtcataattttcctcactatatcaaataattaattgtgtacagctcctcttcactgaagcttcctgaccttgttttagtaatttggtttgaactgtttaatctctcgaagagaatggaaattagtaagaagctgaaatcttcttcctcgcatactctagttgtagtcagcaattaacctcccccaattcttttcctccctctactggtgaagccccatagctctgatgcctgtcacccaccctgattaagaactttataaacagcacatgaataaaaatgtttggacttgaacgtgacaagttttgcatttcacaaaaagtgaatttgaccttcattttcacttgttaaataaggcttaaattccacttcaacaaacaagccttggtttaataaatgtgcatagaatcttaatacagaggtattcatttatctcccttgttctccctttttcatccagctctgttattttaacccctttgtccttgagtctgtttttctttttgttttggtgcttgtttactctattcccaataatgtggggcatgacgttcatttacagtatcatagctctgttcccttcagagctttgtatcatgctttgtctgcatttcagtgtttcttgtttaattttgaaggcctatgaaaatacgccagatcttgttggagagaacaggaacttttcccaggaattttttcatagaggtggtttcttttttaatccctgcctcttatccttgttttataccccatactttctgcctactagaagagccatgagggaaacaagtgacccctttatctaccaacagacacctccagtgcggcaagttccatttattgctggttgtgatggtttcgagccagcctgggacattggcacacactgaatttgtgtgctgaaaccactttacagttcacagttgacctattttttttaaagcaagtctgcttaatttatctgtgatgaaacacaaattggaattgattgtgtaaattccctcttctcttaaatctgaattccttagtccacagcttgactttgagtgattgacctccaatccctcctttgattttcttttttttttctttttgagacaaggtctctcgctgtctgtcactcaggctggagtacagtggcaccatcatggctcactgcagccttgacttcccgggctcagaggattctcctatctcagcctcccaagtggccggggctacaggcacgcatcacgatgcctggctaattttttttttttttttttttgagacggagtctcgctctatcaccctggctggagtgcagtggcgctatctcggctcactgccagctccgcctcccgggttcatgccattttcctgcctcagcctcccgagtagctgggactacacgtgcccaccaccacgcctggctaattttttgtatttttagtagagacggggtttcaccatgttagccaggatggtgttgatctcctgaccttgtgatccgcccgccttggcctcccaaagtgctgggattacaggcatgagccaccgcacccggcctcacctggctaatttttttgtatttttggtagagacaagatttcaccatgttacccaggctggtctcaaactcctgggatcaggtgatccgcctgcctaagcctcccagagtgctgggattacaggcatgagccaccacacctggccccttcccgtgatctttatgactgtcttcctttaaaaggatattgtagttttaagacagttcattttaagttcatgtttttcgtggcacttagccaacactttcactgatttcttaaaattcttgaaatgttcacctttacacacatttaaagtaatgtgtattcattgcgaacattgagtaatgtagataattataatgaagaaaatttaaatcaccttcagtcccactcagatacattaaaaaaattacatatttatattcagtctttttcttttttttcttttcttttcyttttttttttttttttttttttttgtgatggagtttcgctcttgttgcccaggctggagtgcaatggtgctatgatcttggctcaccgcaacctccgcctcctgggttcaagtgattctcctgcctcagcctcccgagtagctgggattacaggcatgcaccaccacacctggctaattttgtatttttagtagagacagggtttctccatgttggtcatgctggtctcgaactcctgacctcaggtgatccgcctgcctcagcctcccaaagtgctgggattacaggcgtgagccaccgcacccagctgtattcagtctttctctgtgcatgtgttgtgtgtatgatcattatcatcctttttttcacttaacatgaaattatggctgaacattttcccatgtcatgaaatattatttgaaagcatcgttatcaatggttacataatatttcagtctgtggctatttcatagtttgttagaacatttccttgatactggatatttaagtttctggcattcttacttttgtgacactgtgaataccatctttgtttatgaagttttttgtttgttcatttgttttttgtttttgagatggaatctagctctgtcacccaggctggagtgcagtggcacaatctccgctcactgcaacctccgcctcccaggttcaagcgattcttatgcctcagccttgctagcagctgggattgcaggtgtgcgccaccctcctggcgaatttttgtatttttagtagagatggggtttcattatgttggccaggctggtttggaacccttgacctcaggtgatctgcccacctcagcctcacaaagtgctgggattacaggcatgagctaccacacccagcctcaatgtggctgttaatgtacagattcactcatatacaaattgaatggttttaatactaaaataatatttaattccccaagctttttttttttcctgttggtttttgtttctctaagtgtaatggcacaagagagaacagattgtggactttctatttaagaggtttatggctttatgaggagaaggtgcatagtggagcatgagcagttctgtaacaggaggacaaggtgcacacagaaggaagaaagacatctgcttgaaagcttccyaggccggtcctggaagattggaatccagagcaccatgtatttggtattacacactatgtactccataattagttgtttttttgttttgttttgttttgttttgttttttgagatggagtcttgctctgttgcccaggctagagtgcagtggtgctatctcggctcactgcaagctccacctcctgggttcacgccattctcctgcctcagcctcctgagtagctgggactacagctgtctgccaccatgcccggctaatttttcacatttttagtagagatggggtttcaccgtgttagccaggatggtctcgatctcctgaccttgtgatccacccgcctcagcctcccaaagtgctaggattacaggcatgagccaccgcacccggcctatgtactccataatttgaccattgatattttctaaacaaaaatgttccatttcctccctccctcttttataaggaaaggacctaaaattaggggtatagggacatactgtaaattctcaagactagggattacgtcttaatgatatttgtgtctacagtgcatggcacagtgtgtggtatatagctggtgctaagaagtctttattattattattgttagtttttttttttttgagacagagttttgctctgttgcccaggcttcagtacagtggcgtgatctcggctcactgcaacctccgcctcccaggttcagacagttcttctgtctcagcctcccaagtagctgggattacaggcacaggccaccatgcctggaaaattttttgtatttttagtagagatggggtttcaccatgttggccaggctggtctcaaactcccgatctgaggtgatctgcccaccttggcctcccaaagtgctgggattacaggtgtgagccaccgcacttggctgcaagcagacctttctaaggagagaagtcccaggcctgctgtgtgagctcttctgcacaatgaagacactgatcttcttgtagagaaatttctgggctttccagtttaattcatttaagagaaggggtaaattttggtggtgttttagcaagcarcagctatcccttgactagtatgaacagggcctggtaggtcagtatgagggtctgcttgagggcagaagatgtttaggctgttgaattttcccacaaagtttcaagtttggaggctcctcaagaaacttgtcaaaattacttaatgaggttttaaactgtacaaattagtggtcagggccagggcctgtattttggtccatttcttttgcagaagcttcttggagatgcaccaaagaatctttattgcctggttttaggatttaatggaatttaattaggtttccagttgtagagaggctctgggacttagttaagctatagttgtcaagcaagttatggcttccggttttttgtcagaagggatatggtaccgtgctctgtcctgaagcctcagcggggctcactcctgccttacattagccagtttctcccagaaggcaagtgagaacaataaagctagcagaatagttctgaaaccctgccttgctgggagctagattagttcctcttttattcagggaaaacttggataaaagggattctaatagcatagtttgaagatcttcggtttggggatctagagcggtgctgggggatgttaactggtgttctctggttgtatctcacacccctctcatataccccacctccatttggagactcatctcatatgcagggaaaggcattgaggaattctgcaaacacattttgccgtatttaactctgtatttcctaaatttatttgcttatggaaccctcttttgtggaatacccattagggttcagggatcctcgtgttttgtagtactcagtttggaaaatgctagtctggagattcagcatcctcaggttgtttttcctggaagtggtaatggagagcagcccttcctggtgcagtaggccacctttcttttgctcataacacagaccagttgtgacacttggctctgtctcaggctgtgacttttaatataccgatttacttatacacaaattgaatggttaatgttccattccccaagccttttttgttcatttttactattttttttgtttgtttgtttctctcttttttttttgagactgagttttgctcttgttgcccaggctggagtgcagtggcgtgatctcggctcaccgcaacctcctcctcttgggttcaagcgattcgcctgcctcagccttcctgagtagctgggattasaggcatgcaccaccacacccggstaattttgtatttttagtagagatggggtttttccatgttggtcaggctggtcttgaactcccgacctcagatgatytgcccacctcggccttccaaagtgctgggattataggcgtgagccaccatacctrgtctttttttttttttttctctaagtgtaatgcattttatctcctgcttcttgtaagtttccaggaccaagtaatactcaaacccttcccagagggttttcatttcgaacaaggaagccacctgggaaatagggtggagacctgttttgagaaaccagaagaggatgtctcgttctaaccatggagaaaaagaatctagtctccttgttaggaagactgttgaagaagtgttctttatcctttagttcttattaagagaattgttttagtttcaattgtaaggaccagtaaatctccttacacctcacagtatggagacatattattataactgttgacaaagaaggagcttgagggctgggtgcagtggctcacgcctataatcccagcactttgggagggtgaggcgggtgggaagctgaggcgggtggattacctgaggttaggagttcgagaccagcctggccaacatggtgaaaccccatctctactaaaaatacaaaaattagcttggtatggtggcacacacctgtaatcccagctacttgggaggctgaggcacgagaatctcttgaacttggaagatggaggttgtagtgagccgagatcacttgggcaacacagtgagactctgtctcaaaataaaataaaataaaataaaaataaaaaacaggagcttaaaaataggaaaacccgagagcaggagggaattggccctcttaggaactagaatagtattgaaagcagattgttttgcaccttagcagtagggatttgtagacgtgcatattctgccattaatgagatttctcagtctgtgtttctttgtgattttccctgtatatacttttactgtgtatcatttctgttccttatactctctgcttattcctaactctgttttttttttctgattttattttggagtataacataatacagaaaactgcacaaattggccaagcgcagtggctcgtgcctgtaatcccagcactttgggaggccaagacgggcggatcacttgtgctgaggagtttgagaccagcctgggcaacatggtgaaatcctgtctctacaaaaaatacaaaacaattagctgggcatggtggcgggtgcctgtagtcccagctactcagaaggctgaggtgggatgatcgcttgagcctaggaggtggaggttgcagtgagccgaggttgcaccactgctctccagcctgggcaacggagtgagaccctgtctcaaaacaaaacaaaacaaaacaaagctgcacttacatttaagtatacaagttggtgaagtgaacatgccaatgaaacctgcttccagatcaagaagcagagtgttactggtatcatgggtgtccccttcagcccattctggtcacttcaccccacaagggtaaccactttctgatttccaacaccacagagttgtctgttttaatggagttattgaaatatacatactataacgttcactcatttaaagtatactgctcagtgattttaagtatattttctgagttgtgtaactataactataatctaatgttaaaatattttcatcatccccaaaagaaacctgtaccccaaaagaaataaggagtggttactcctttatcccacattccaccagccctaggcaattacaaatctatttcctgcctctatagatttgcttattctggacatttcatataagtgggatcacataatatgtggcattttgtgcctgatttctttcacttagcataatgtcctcaaggctcatccatgctgtagcatgtatcagtacttcattccttttcatggctgagtaatattccattgtatggatagaccacattttgtttatccgttcatctcctgatggacatttggatgctttccacctttcagatattatgaataatgctactgtgaacattcacttacaggtttttgtttggacatacgtttttgtttctcttaggcatatatgtaggagtggaattgctgggtcatatggtaactctgtttaacatctcaggccgggtgcggtggctcacgcctgtaatcccagcactttgggaggccgaggcgggtggatcatgaggtcaggagatcgagaccatcctggctaacaaggtgaaaccccgtctctactaaaaatacaaaaaattagccgggcgcggtggcgggcgcctgtaatcccagctactcgggaggctgaggcaggagaatggcgtgaacccgggaagcggagagcttgcagtgagccgagattgcgccactgcagtccgcagtccggcctgggcgacagagcaagactccgtctcaaaaaaaaaaaaaaaaaaaaaaatctcaaagaactggctaaactgtttttcatagtgtctgcaccattttccattcctgccagcaatgtatgagggtcccaatttctccacatcctcaccaacacttgttattatctatgtttttgattctagtgagtgtgaagtggtatctcatcatagttttaacttgcttttccctaatgactgatgatgttgagcatcatttcatagcttattggtcatttttatgtcttctttggagaaatatctgtcaaatcttttgatcaccttttagttggattgtctttgtattgagttataagacttatttatatattctagatataagtttcttatcagatatatagcgctgccatgctcagctaatttttatatttttagtacgatggggtttcatcatcttggtcaggctggcctggtcttgaactcctgacctcgtgatctgcccgtctcggcctcccaaagtgctgggattacaggcatgtgccactgtgcctggccaagttttgtatttgtagtagagatggagtttcgccatgttggccaggctggtctcgaactcctgacctcaggtaatctgcctgcttcggcttcccaaagtgctgggatgacaggcgtgagccaccacgcccactgaaccctcataaatccatcaccgaatttcagcagtgatcagcattttaccattttccccaccaccatcttttctgggggaggagtatttagtttttgttattttgaaataaaacagtgaaaatcatgctcttatttcaaaaaacaacattgtggaaaatatctaacttagaaaatgagacacctgtaacctcagacagagccagtattaattctgtgtgtgtgtatagtttttaaggacattattattattattattattattattattattwtttttgagacggagtctcactttgttgcccaggctggagtggagtggcgcaatctcagcttactgcaacctccacttccctggttgaagtgattctcctgcgtcagcctctcaaatagttgggactacaggcacctgccacccattattttaaatatttacagtatattccgttatacaggtaaaccatattaatccagtttcctatgggggccatttgggttatcagctttactgtattgattaatggtgcaatcattaatcttcctgtcatatgtacttgagcaagttatttttttttcttttagacagggtctccctctgtcgcccaggctagcgtatagtagtgcgatccctactcactgcagcctcaaactcctgggctcaagtggttctcccacttcagcctcctgagtagctgggatgacaggcgtgtgccattgagtctggctaattattttttgtagagacggggtctatgttgcccaacttggccttgaactcctgggctcaagtgatcctcaccttggcctcccaaagtgctgggattacaggcgtgagccactgcgcccggccggaggatgcacatctttttttttttttttttttttttttttgagacggagtctcgctctgtcgcccaggctggagtgcagtggcgcgatctcggctcactgcaggctccgcctcctgggttcacgccattctcctgcctcagcctcccgagtagctgggactacaggcacccgccaccacgcccggctaattttttgtatttttagtagagacggggtttcaccgtgttagccaggatggtctcgatcttctgacctcgtgatccgcccgcctcggcctcccaaagtgctgggattacaggcgtgagccaccgcgcccggcccggatgcacatcttaaagatttaatagctgctgccaaattgccctccaaagagactatgccagtttataatttcagcagtagtgaatgggaatgtacaggggtattgtattttattttattttttgagacagagttttgctcttgtcccccaagctggagtgcagtggtgygatcttggctcactgcaacctctgccttccgggtttgagcaattcttctacctcagcctcccaagtagctgggattacaggtgcgcaccatcacatccagctaatttttgtatttttagtagagacgtggtttcaccatgttgtccagactggtctcgaactcctggcctcaagtgatccaccgacctgggtctcccaaagtgctgggattacaggtgtgagccggccagggatattttaaagtaaattccaattattgtatcattttcacctggaaatacttctgtatttcttgctaacagataaggacattttttgtgttttgacataaccgttatcacttctgaaaaatgagtacctttttaccgatggtttgttcaaatcagaattcagacaaggcatttgaaatgtgcatgtggaaaggaatactgaagaggatgcccaccttcagcgctgcagttttgaaaacctgtgaattgggtgcagtggctcatgctagccacttgggaggctgaggtagaagtttaggcttgagcccaggagtttgaggccagcctgggcaacatagcaagaccccatctgctttgtgcaggtgcaggtttggggcctgaagtgaaggcctcttttactctaggcttgtttctgccacaatctaagtgatgtttaaagatttctggtctgtttgcttctggtcagttccacacccaaggttctcttctagatctagttctcaagcctgcattttctttttttttttttttttttgagatgrcatctcactctgtagcccaggctggagtgcagtagtgtgatcttggctcactgcaacttccacctcctgggttcgagggattctcctgccccaccctcccaagtggccgggactacaggtgcatgccaccacgcctggctaattttttgtatttttagtagagacagggttttggcatgttggccaggctggtctggaactcctgacctcaggtgggtgatctgcctgcctcggcctcctaaagtgcagggattacaggcgtgagccaccgcgcctggccccaagcctgccttatttctttgtggcctcgctcatatgcctctgggtctcaatttrtaggagcttccttgaagctttctgaaacaaatgcccagagattgtaacagccttcctgtgatctctgccgcaaagatgagccatttgttcaatggagaaggctcacagaccgttctctgccaatgttgttgcagtcttactctcctattatttgggctgtagaaacttttacaactggtgagacttttgctctctagattttacttattccttccatttctgcttgaaaagtggtatagccattcttgcctgtacttatctttgtcttgaaatagcttgttaaggcagtcagtagtaattagcgtactccatcattctgactcttcccaccactttccttaggccagcaggctcagcggacactgggtccatgaaaggcagcagtgagtgcaggcattcctttaagtgggcgatatttcatcatgatatgccaggctctctagcattttgccacctgaccaataagccaaactaacatattttagacttttgttcacagcagcaccccacatcaaggtgctcatttgttgtcagtcagggtttggtcaggaaaatggaaactaccctaggtatcaagcaggaaggcatttaacatagtgatctagaggcttccaaaaccattatcagggctggggtgatgtggtggcagcacacccagggaaagttgctgttagctttcagaaaattaggaagtgcaagaattgtaggaaactgttgcggatcagctgggccctctataggaccagggaaggtcaatttcaggagggtccttagaggctgctgctgcaatatgacatcagcccagagcctaagctcatgcccatgcccacccctgctggaagaatcccacgtctgctgctcctctatcttctgaatcttgtagggtagctgagcctctcctcactggccaggatccaggtaaggtggttcctgctatacaagggagggcacagactggaaggaaatgatgctttgttccagcttcccctaaagttgaggggaccactaaatcttacaaagataggagaaacaattctcagtatattgctgtttaaattatcttatagattaaaagtttgctgtctggaagtgaatacaagtgtatgcataaataacattttatttttgtaatcatttttatttatagactataaagcaattggcaaaataggagagggaacgttttctgaagttatgaagatgcaaagcctgagagatggaaactactatgcatgtaaacaaatgaagcagcgctttgaaaggtaggctacagagatgcacttgggaccaaacacagatccaagtttcagtcaataacrgcaacttaatattaggggggagctttattaatttaataatatgtaagatacaatcagatttctttgggcagtgagggttatatgctaatgttatgtttatcatactggagtttactcatatccaggcttactgtaatatcagtgatgaatgaccacaaaaaagtttaagtttcaaaagtgtgtctcaccttaaacagtctgtatgttcctaaaagttataaatgtgttggatttctttttttttttaattaaaaaaaacagcaaaaaaatgatatatcaaccaatggaacaggatagagagctcggaagtgaaccctttatgatccatttgattttatgatccattgatttttttttttttttttttggagacagagtctcactctgtctyccargctggagtgcagtggcacaatcttgactcattgcaacctccgccaccccagttcaagcgattctcgtgacttagcctcctagtagctgcaactgcaggcatgtgccaccaagcccggctaattattattttttttaagtatagatcaggtttcaccacgttggccaggctggtcttgaactccttggcctcaagtgatccgcccgccttggccttccaaagtgctgggattacaggtgtgagccactgtgcctagcccattgattttgtttgtttttgtgttttgttttgtttgagacagggtctcactctgtcatccaggctggagtgcaatggctcgatcttggctcactgcagcctccacctcccaggcttaagtgatcttcccacctcagtctcctgagtagctgggaccacaggagcacaccacacgcctggctaatttttgtattttttatagagacggggcttcaccacgttgcccgtgctggtcttgaactcctgacctcaaggtatctgcctgccttagcctcacaaagggctgggattacaggcatgagccactgtgcctggctgtgtgttggacttctataaatgcaaccttagtctaaatgtattagaggtccttgcaatttaactaactgtgaataaattaatatattaatattatattaatataacataagtgacaggcatgagccaccatgcccaacctgagccatcacgctcagcctgagccactacacccagccttcattttttaattaattagttaacttttaaaatggagatgggatttcactgtgttgcccaagctgaccatgaactcccgggctcaagtgatccttctgcctcagcctcccaaagtgctggaattataggtgtgagccaccacacctggccaagaacagtaatttcatcctcatgacatctggatagggtagttatccttgtttcatatatgaggataggtgcttagagatgtgaggtaatttgacattttttctagattactgggtgggcagagccagatgtgaacccagattctgctaaggcaaatccttgttcttcactgcccartgcatatggtagtttacctaccactaggaagactgaagccaccaggtgttctgctccttctcttctagcacttcttcctctctatgcattctgcattctctgtgtttctttatctttccccgactccatctttacttgtaaaccactgatgagagaggatttgatgcacagtatactgattatcccgtatctaaagagcagacagctgggtgctgtggctcacacctgaaattccagctacttgggaggctgaggcaggaggattgctagagcacaggagttcaagatcagcctgggcaacatagcaagaccccatctctacaaaaattaaaaaaaaaacacaaaaaaacagacttccttaaacagccacctttgacccaaagttgccagtacaggattttgaacagtagggtgtgatgcttttttttttcttttttttttttttttttgagtcagggtctcaytctgttgcccaggctagagtgcagtggtgtgatctcagctcactacaacctctgcttccagggctcaagcgattatccagcctcagcctcatgagtaacagggactacaggtgcaagccaccaaatgcctagataatttttgtaatttttttttttttttgagacagagtctygcattgtcacctaggctggagagcagtggcgtgatcttggctcactgcaacctctgcctcccaggttcaagcaattctcctgcctcagcctcccgagtatctgggactacaggcgtgcgtcacagcactcggctaatttttgtatttttagtagagatggggtttcaccatgttggccaggctggtctcagactcctgacctcaagtgatctgcccaccttggcctcccaaagtgcagggattacaggtgtgagccaccatgcccagcctaatttttgtatttttgtagagacagggtctcgccatattgcggctggtctcgaactcctgagctcaaagcgatccacttgccttggcctcccaaagtgctaggattacagtcctgggtccagcctctatcagataagtttagaatgttctaaggagcagttctctagcgggtgaagaacgctcagtttattgaagttctttctcatgcctcctcagcccctgggaagattgtgtggttacgtaacggacatggtttcccggtgatgaagcacatcctgggtctgccatctgccagattcctcacacaccaaaagtgcctggtccaccagaatcttggcttccttgtcatagtgcttgacgactaagcaaaggaatgaacagaaagctaacaaggtgggacacatggcaaatgtgcagtggatgctggccttccttactgtatgcagaatcattcgttgtatttcagaaacaatttatgttctttgcctttaacttcaaaagcagttgattagaacacatcccacaggttggcccagcatggtggctcatgccttgtaatcccagcacgttggaaggcctaggtgggagaattgcttgagcccaggagtttgagaccagcccaggcaacaaagagaaactctgcctccatgaaaaaattttaaaaatcagccgggcgcggtagtgtgtgcctgtggtcccatctacttgggaggctgaagtgggaggatctcttgaatccaggaaggtgatgctgcaatgagttgtgcttgtgccactgaactccagcctgggtgacagagtgagaccctgtctcactctgccttctttgacaaggaagccgaaattccgctggaccaggcacttttggtatgcgagggatttggcagaaagcagatccaggatgtacctcaccaccaggaaaccatgtccgttaggtaaccgcacacacgcaaaaatccgtttctgcttgcttatcattgtgtaagtgaatccccagagtcaccttgcacagttgtgtgggtggtgtgaggaatgtgaagcattagtagcagaaagtcatactgagtcacttgggcagcatgaggttggtatttggagcctctgacccctaccccctccagtattacttctgctcctttccyatgctttaattcaaatagaaacggatggcttttgcagtaatcttagttaatatgaagttaaagaaaggtaaaaaaatacacataatggattagtactgtggcagggagggcactttcactcctgagcattgtttgccttttgagtcactcaaggacttagttagggataaggaagttagttacttgcctgaggcctcaacagaactgagtcgttttgtatcttttctggtatatcctcagaattttcctccaccaatacttgccaaaagtacacaattaagaataggctctctttgggcacagtgggtctcacacctataatcccagcactttgggaggccaaggtgggcagatcagttgagcctggaagttaaagaccagcctgggcaacatggcaaaacccccgctctaccaaaaaaagaaataaaaaagttagctgggcatagtggtggtgcctgtagtcctagctactcaggagggtgaagtggggggattgcttgagtcctggaggttgcggttgaggttgcagtgagccatgattgtgccactgcactccagcctgggtgacagagcaagaccctgtctcaaacaacaacaacaacaacaacaacaamggttctcttgctatgcttttagtctatatttttcctatagaaatagaagaaatggagtgagtctcttaaaaaaaatccctagtcttggtatttgtaggatctccctttgtgcccygaggcagtgacattggcacaagtctgctaaacccggggttcagtgtagggttaccagctctgactctaaaggtcggaaccagcagctcctccattttagttcatgcaatcttggacaattccctaatttctccgtgcctctgtttctttctttatacaatggggataaccacagtatctaccccataagattgttgtgagggtcaaattaaataatgcagatgaagcacttagtgcagtgctggcacaccgtaataaagcaacttgctatgtaaatcagtttttccataacagataatacaagttagcagagcttgaagactattttggagatggacgtgagataataatagtaagattaccgcagttgttcactacatatctggtgtcatgaacagtactaggtgaattatatgcatgtgtcattgaatcctcactgcggccctgggaggaagatccattgttacatctttcagactagggaattgaaattcggagagatcaagttccccacctggcccgttgctacccaacctacacgtcgtggagctgactctgagcccaggtctgtataggtcctgagctggtgatcttcccaccgttcttcccagctgcagatgctgatgccaacgtcaggtctacatgtggtacatggtttttctcaagtcacacctctaagcagtcctcaaattacttttacaamaacaaaaagtctgctgtgtaaggttataaatagaaacaaaggcaaggaatttattagtctctctaaaagcctttttttttttttttacttaaaagtataatatgaaaaacctcaagcatatacaaaatgaacagcagccctaggtatccagcagccagaatcaacatccctgctatttttatttaatctatacctccacccagtgtccttcctctacttgggctgctataacaaattatactgtattctgtctggcttaaacagcagacatttatttcttacagttctggagggtgataagtrcaagattaagatkctggcagacaggtctggtatctggcgagggcttgctttaggatttgcaggtggccctcttcttgctttgtcctcaaatgacagatagcagagagagagagagaggtcgcatgttctctagagtctttctggcatttcttcttagagccactaatgccatgtgctctaattacctctcaaaagccccacctcctcatatcatcccattgggggtttagggtttcaacgtatgaattttagaggacacaaacatgcaatctataacgttatacagttttttaaagtcaaaatttgtatatcttgaagtgcacattgtttatctgtacaattttggcaaatggatattctcgtgtaatcaagatgtagaacattactataaccctagaaagttcttcttgttccttttcagtttcccactgccatcccaggcaatcactagtatgtgctcttgtgtccacctcctttaactcagcatcatgtctttgagattcatcattactgttgttcagtagtttatctctttttttttttttttgagacggagtcttgctctgttgcccagcctggagtgcagtggcacaatctcagctcactgcaacctctgcctcccaggttcaagcagttctcctgcctcagcctcccaagtagctgggactacaggcctgtgccaccacacccagctaattgttatatttttagtagtgacggggtttcactggacaggctcgtcttgaactcctgacctcaggtgatccacccgcttcagcctcccaaagtgctgggattataggtgtgagcaactgcacctggccagtttatgcctctttaatgctgagcaacattcattacaatctgtgagtacaacacaatttctttatccattttcctgttaatggactttttgatagtttccagttttgggctaccatgaataaagctgcttatgaaattcgacttcttaggctgggtgtggtggcttgcttctgtaatcccagcactttgggaggctgaggcgtgaggattgcttgagcccaggaatttgagaccaggctggatgacatatagcctggtctgtatgtcgtatgaagaaagacttttagtatctttttttttcctctacaaaaaaaaaaaaaaaaaaagaccagggcatagtggctcactcctgtagtcctagctacttgagaggctgtgatgggagcgttgctgagcctaggaagttgaggctgcaatgagccatgatcacaccactgcactccagcctaggtgacagagcaagaccctgtctcagaaaaacaacaaaagaaatacagaaattctactggtgcatatttcattttttctttttctttttttttttttttgagacggagtttcgctcttgttgcccaggctggagggcactggcatgatctcagctcaccacaacctccgcctcctgggttcaagtgattctcctgcctcagcctccagagtagctgggattacaggcatgcaccatcacacccggctaattttttgtatgttttcattttttcttaggcagttacctagaaacagaatcactgggtcaaagggtaggtatatgtttaactttataagaaactgacaagccttttctcaaagtgattgtaactttttatttttttatttaatttaattaattwatttatttatttgagacagagtgtcgctctatcacccaggctggctatctcggctcaatgcaagctctgactcctgggttcacgccattctcttgcctcagcctcttgagtagctgggactacaggcgcccgccaccacgcccggctaattttttttttgtattttttagtagagatggggtttcaccatgttagccaggatggtctccatctcctgaccttgtgatccgcccacttcagcctcccaaagtgttgggattacaggcgtgagccaccacgcccggcctgtagctttttatattaccaccggcaaagaatgaaagttccagttgctccatattcccaccggcatttgatgttgttattcttttaagtttaagccattctgatgattgtgtggaattatctcatggtagttttagtttctacttccccgatgactaatgataaacacttgatcatgtacttattggccattcatgtatcttcatttatgaattgcctgtccaagtttttgtccctttaaaaatttagaccttaagaaacaagccatcctaagggagaaaaaaagaaaaaataattttaaaaattaggctgtttgcctttttattgaatttaggagttctttatatattctgtatagaagtcttttattaaatgtgttttgcaggtagtttctccaagtctgtggtttgcctatccattttctttatggcatctttccatgtgctgaagttttttaatgtcagtgaagtccaatttatggagttcttttgtggttattgttttttgttttctgtcttagaagaaatttttgtctacttctaggttgtgaatgtattctcctgtattttctcctraaaaccttatcattttaactttttacatttaggtctgtgatccatcttttttttttttttttttttgagatggagtctcgctctgtcacccaggctggactgcagtggcgctatctctgctcactgcaagctccgcctcccaggttcactccattctcctgcctcagcctcccgagtagctgggaccgcaggcgcccaccaccacgcccggctaattttttgtatttttaatagagacggggtttcaccgtgttagccaggatggtctcgatctcctgacctcacagtccacccacctcggcctcccaaagtgctgggattacaggcgtgagccgccgtgcccggccaatccatcttaaattaatttttgtgaatggtgagcggtagggatcaagcatcagttttttcccccaaatgaatatccagttgttccagcatcatttgttaaaaaaagactttccttgccttcagtggattattttgtcaaaagctaattgactgtaaaagtataggtctgttttggactctctattctgtttcattgctctctttgactgtcattatgccaataccatactgttttgattaatgtagctcaacagtaagttttgaagtcagatactaaaagtctttcttcttctttttttttttttttgagacagagtctctttctgtcatgcaggctggagtgcagtggtgtcatctcggctcactgcaacctctgcctcctggtttcaagcaattctcctgcctcagcctcctgagtagctgggattacaggcacccaccaccatgcctggctaatttttgtatctttagttgagacagggtttcaccatgttggccaggctggtttcaaactcttgacctcaggtgatccgcctgcctcgtcctcccaaagtgctgggattacaggcgtgagttaccgtgcccggcctcttcatctttttaaagacagttttgcctactgtaggtcctctgtacatccacatacattttagaatcagctcaattttttttttctgtgaggattctaggaatatagctcatcaattctattaaaaaataaaaccagccgggcacagtttctcacgcctgtaatcccagcactttaggaggctgaaagtgggctgatcacttgagcccaggagttcaagaccagcctgaacaacatggtgaaaccccatctcgattgaaaataacaaaaattagccaagtgtagtgtcacacacctgtagtcgcagctgcttgggaggctgaggtgggaggattgcttgagcctgggaggtggaggcttcagtgagccaagatcatgcagctgcactccaacctgggtgacagagtgagaacctgtctcaaaaaaaaaaaaaaaatgcaggtacggtggctcacacctgtaatcccagcactttgggaggccgaggcgggcagatcatgaggtcaggaggtcaagaccatcctggctaaaaccatgaaaccccatctctactaaaaatacagaaaattagccgggtgtggtggcaggcgcctatagtcccagctactcaggaggctgaggcaggagaatggagtgaacccaggaggtggagcttgcagtgagtggagattgggccactgcactccagcctgggcgacagagtgagactctgtctcaaaaaagaaaaacaaaacaaaaaaaaactattgagatkatgaataggattgtattgagtctatcgttcaatttgggagagaatgcatatcttagcaatattgaactttgcaattcataaacatggtataaccgtctctccatttatttcagtttgctttagtttcagctatgttttgtttttgtttttgagacggagttttgctcttgttgcccaggctggagtgcaatggcatgatctcagctcactgcaacctctgccttccgggttcacaggttctagagattctcctgcctcagcctgccaagtagctgggattacaggcacgtgtcaccatgcccagctaatttttgtatgtttagtagaagacagggttttgtcatgttggccaggctggtctcgaactcctgacttcaggtgatccgcccaccttggcctcgcaaagtgctcagattacaggtgtgagccaccttgcctggacggtttcagctgttttgtagtttcactgaaaaggtcttacgtgtcttttgttaaatttatatctaagtgttttatgttttataacattattataaaaggatattttaaacatttatttcccattgttagccataagtatgtagaaatgcaattaatttttgtttactttgtattttgagaaatttctcaggattcacttattttttttttttttttgttctagtatgttttggttgctttcttaggattttttacttaaagaaatatgtcacctgcaaatagagacagttttactcttctttcccaatgttgatgacttttttttttgagacggagttttgctctgttgcccatgctggagtgcagtggcgcgatctcagctcactgcaacctccacctcccgggttcaagtgattctcctgcctcagcctcccaagtagctgggactacaggcacccgccaccacgcctggcgaatttttgtattttaagtagagacagggtttaaccgtattggccaggctggtctcgaactcctgactttgtgatctgcccaccttggcctcccagagtgctgggattacaggcgtgagccactgtgcccggcccatgactttttttctagcctttcccattagttcagatttccagtacaatattgaatgcaagtagcggggaagtgttcagcatttcaacattagaagcatgatgtttgctgtatatgtcttttatcaaattgacagagttccctttcatgaatagcttgctgagaatttttgtcctgaattggtatcgaattctgtcaaatgactttttggtattattattttttcctttttcttgtattgtggtggataacattcattcatttttgaataataactcaaccttgcattcccagtatagctgggattccccacttagtcataacwtatgatcagttttacatgttcctggatttgatagtattttgtcaagtatttttgtatttgtactcataagggatacttttttttttttcgtgatggagtcttgctgtgttgcacaggctggagtgtggtggcgtgatctcggctcactgcaacctccgcctcaagcaattctgcttcaggctcccaagtagctgggattacaggcgcgtgccaccatgcctggctaatttttgtatttttagtagagatggggttttgccatgttggccaggctgtcttgaactcctgacctyaggcaattcgccagacttggcctcccaaagcactaggattacaggcgtgagctaccatgcttggcctatacttttcttattatataaaagtctttgttagggagttaggcgtggcgtctcatacctttaatcccagcacattgggaggctgaggtgggaggatggcttaagcccaggagtttgaggccagcctggacaagatgagaccttgtttctacaaataaaaaacagctgggcatggtggcaggcacctgtggtcccagccacttgggaggctgaggtaggaggatggcttaagatcaggaggtcaaggctgcagtaagcagtgattacactactgcactccagcctgggccacagagtgagaccctgtctcaaaaaaagaaaaagaaaaaagtctttattaggttttgcggctgggtgcagtggctcacacctgtattcccagcactttgagaggctgaggtgggtggatcacttgaggccaggagtttgagattagcctggccaacatggcaaaactctgtttctaccaaaactacaaaaattaggtgggcgtggtagtgcatgcctgtaatcccagttactcaggaggctgaggcacaagtatggcttgaaccctggaggcagagtttgcagtgagccgaggttgcgctcgtgcactccagcctgggcaacagagcgagaatctgtcttaaaaaaaaaagtttttgttaggttttggtataaaggttttcaggtctaacagaacaagttgggaagtgttcattcctccattttttgctgaaaaagtttgtgtaagagtatttcttttttaaatgtttgaaataattcaccagtgaaattgtctggtctaggagttttccttgtggggaaggtccctcccacaatgatgtttattataacatcattygtagtgataaaaagatgggatcacgacgaagtggtggaacaaggaatgacctcaaggcacatctgtatcaaggaatattaaagaaaaaaaccagaactatgccaaataatttggaaggatttccatatgattttttaaaagctttattgaaggatgatttccttttgtttcttttgagatggagtctcgctctgtcatccaggctggaatgcagtggtgcagtcttggctagctgcaacctctgcctcctgagttcaagcaattctcctgcctcagcctcctgagtagtggggattgcaggcacctgccaccattaatttttgtatttttagtagagatggggtttcatcatgttggccaggctggtctcaaactcctgacctcaggttatccacccgtctcggcctcccaaagtgttgggattataggcrtgagccactgtgcccagcctgaagtataattttcctttcataaaattcagctattgtaagtgagtttcaggacatttatacggctgtgcaactgtcaccacaattccgttttagaacactttcatcatctgttgggaggtttttgataacaactaataagaataaaatagggctattttattaaatagggctgtttcaatttccagttttattttgtgtcagatttggtaactgtgttttttgaggaatttgtttaccctaaattgtcatatttattggcatacagttatttgtaatactctcattattattatttaattttttttttttgagatggagtcttgctcttgcccaggctggagtgcaatggcacaatctcgcctcactgcaacctctgcctcccaggtccaactgattctcctgccttagcctcctgaggagctggaattacaggcaccctgccaccacgcttggctaatttttgtatttttagtggagacagagtttcactgtgttggccaggctggtctcgaactcctgacctcgtgatccacccaccttggcctcccaaagtgctgggattacaggcgtgagcccctgtacccggccaagggggacatttagataattgattttaaccctttcttcctttagtatttacacataagtatctttctaaatcctgttttagctgcatctcataaatttctatatgttgtgctttatttggtttgaaatgttttctaatttcccttgtgatttcttctttactgtttaatttccaaatatttgagacttttctagataacttactgtactgatttctaatttaatccattgtggtctgagaacatgttgtgtaaagttttcagtcttgaaatgtattgagacttaccttatggtccagcacattatctatatggatgaatgtttcatatatacttgaaaagaatattttatatacagttgttgaatatactgttctgtaaatgtcaattaggacaggtagttaataatgctgttaagatcttctgtatctttactgatttttttgaaagattgttcaatcaattatgggagtaaggtgttaaaatcttcatctctttctttagtattgtcaacttttcctttatgtatattaaaattttctcatttaggccaggcacagtggctcacgcctgtaatcccagtactttgggaggctgaggcaggtggatcacttgagatcaggagtttgaaaccagcctggccaacatggtgaaaccttgtctctactgaaaatataagaatcagccaggcatggtggcaggtgcctataatcccagctacttgggaggctgaggcaggagaatcacttgaacccaggagatggagattgcagtgagccaagatcactccactgcactctagcctggtcaacagagcaagactccgtctcacaaaaaaaaaaaaaaaaaaagctggttgtggtggctcatcactttgggaggccaaggcgggtggatcacctcaggttgggggtcgagaccagcctggccactgtgatgaaacctcatctctactaaaaatacaaaaatagcctgggatagtggtgggcacctgtaatcccagctactcaggaggctgaggcaggacaatagcttgcacctgggaggtggaggttgcagtgagcctagatcgtgccactgcactccagcctgaatgacagagcaagattttgtctcaaaaaaaaaaaaaaattctcttatttgacacatacacatttacaattgtcattgcttcctaatgtattgactctttttttatcatcatgaaatcataagtagtagtaatccttattttgcagtctattttgtctaatattaatataaccatttcttcctcccctttactttgaggactttcttcatatagattgtattggttagataaacytattttccataaaattcatccaataaaatgaaatgttgaaatttcatagttgatctttaaataatttttttttttttttgagacggagtctcacactgtcgcccaggctggagtgcagtggcgtgatttcggcttactgcaagctccacctcccaggtttacgccattctcctgcctcagcctccagagtagctgggactacaggcacccgccaccatcccggctaattttttgtattttttagtagagacggggtttcactgtgttagccaggatggtctcgatctcctgacctcatgatccacccgcctcggcctcccaaagtgctgggattacaggcatgagccaccgtgcccagccgatctttacattttttttaaaagtctgagtcctggtgatcataatttgttccatttgtagattccacttatggtaaatgtcatctggttcttttcggagcaaaggctgcctacattcctcttacattcagttctgtggtattttgtttccaacagaacaataaacaaaaacaaactgaatgtcacctgacaacaaaattcaacgcaactccaaggcaaagaaaagtagtttacttccaggtttttttagattttttttttttcatgattttaaaagaggggacagagttgatttgaattttattaagcactgttatttgaacagttgctagatcctgatatctagcaatatccaggaaaatgtgcctttctaaatatttgtcttagctcattatttctcagtgaatgcctgtggagacatgaaagaatcctatctacaataagcaaaatatgttttggggtgtgataactggttttcctattacagaggagaagaatggatatttgtgtaaatagcatagctgtttggctgcccggttctaaaaactaagtttttcagatcgggtgttcaaaaattggaactactgctagcttgttagcttcttgctctttccacctgaagcaggatttctctatctcaacactgttggcattttggcctggaaytttttttttttttctgttctgtgcattgtagaatattgaatgatttgtattcattggtaaatagctgctgtcctgacccttctgagtctcgcctagcccccttgttcagcactccctagttctggccactttgaggacccagctccagcatggtgggctgtgtcttttctgattggttgtggacctggggtgcgagttgctaacactttcaataccaacttggatgtgagggaggaaatacaggatacaaatgaaaatgggggctagaacttttagtccaaaaatattcttaggctcttcaggctattctgttttcaggctcttcttaaatatcaggcttctatttgttggctaacatgagagtgacttaaaatattcagacatatttatttatttattttttgagatggagtctcactctgttgcccaggctggagtgcaatggcacaatcttggcttactgcagcctccacctcctgggttcaagcgattctcctgcctctgcctcccaagtggctgggattacaggcacgtgccactgcgcccggctgatttttgtatttttagtagagacggggtttcaccatgttggccaggctggtctggaactcctgacctcaggtgatccacctgccttggcctcccaaagtgctgggattacaggcatgagcgaccaygcctggcctcagccatattgattttaaactatacctatactactactgggtactcttcaaataaccaaacaaatgttgaactttccaatatatgttaaaagtttatagaacagaatttgccagttgaaaaaatagtcccacaattagttccttttggagcccctgagatgaaaatttctggtgaattgaattattcaattaggtgtgaccccatgggcctaccgtggtgaagtggcattctcaaaagaggtctgtctagagggcagtgatagctagcctcaggccttgggcctgattgcactgttttggcatgatttgtattggcagagcagtcttcataaagaagagcctgcaataaggcacacctgccaagagaatgcttgtcaccaagtgaatgaaatggaaaagagggccgggcgtggtagctcacacctgtaatgcccgcactttgggaggccaaggtgggtggatcacctgaggtcaggagtttgagaccagcctggccaacatggtgaactccatctctactaaaaataaaaaaattagccaggcatggtggcgggtgcctataatcccacctacttgggaggctgaggcaggagaatcgcttgaacccgggaggcagaggttgcagtgagccaagatcacaccattgcactccagcctgggcaacaagagagaaactccgtttcaaaaaaacaaaaaatcaaaaagagtatagcatcattaaagataagaaagaggccgggcacagtggctcacgcttgtaatcacagtactttgggtggctgaggcgggccgatcatttgagcctgggagtttgagagggcatagtgggatgcacctgtggtcccagctactcaggaggctaaggtgggaggatcacctgagcctggaaggttgaggcttcagtgagacatgattgcaccattgcactccagcctggatgacagtgaggcttwgtctcaaaaacaaaaaaaaaaaggaggggtgggtcttttcttggaactttgaaatgctcattttcagatagtgtatctataaactgaagactaaatcttaattattaatcttattaattaatcataagttttaatgtctacttttatgtttgttaatatgtaaaataaactaccaagtattctttcaggatcttagatgggaaaaattttaacgtatgttctagctataagamccttgattttttaatgcagcaatgaggtatgcttaacttcagtttctaatgggagaaataaaacctgattaacttgcttgaaatatttgtgagttttaaaattgtgatcctggataataagtaactctaattttgaagttgacctaaactgtgaatgagctatccatttttacctacacgatagtattgagcaagtcaacaacctacgagagatccaagcactgaggcgcctgaatccgcacccaaacattcttatgttgcatgaagtggttttgtaagtatatttggagcttgaaaagttatctaaatttgatgaaaataatctctttttaagaaagaaaaccatggtagacattttgaatatttactttgtagctcagagagtaaccatttttacttcatcttacatcacatttttatttggaaaaatgtgcatctgattcttttttttattattattttttgagaaggagtctctctctctgtcatgcaggctggagtgcagcggcgtgatcttggctcacaacaaactccgcctccctggttcaagccatctcctgcctcagcctcccgagtagctgggatcacaggcacccacaaccacgcccagctaatttttgtatttttagtagagatggggtttcaccatgttggccaggttggtttcaaactcctgacctcaggttatccacccaccttggtctcccaaaatgctgggattacaggcatgagccactgtgcccggccagcatctgattcttaattaatgtggaaatgccttcatttaggtgactccacatcataaaagcatccgtcatgcaaacagttcatctcctggagctcagttaggctgctaaggtcttgagtgtgaattttgacctactgggaaagcactgtttgtgttatttcagggattgtacattctcattctgtccctgccagttgccatttctgaacagtctcctgtagtctttcttactgtaattgataacatttctggggatttttcatttctgttctaattatagaatagtttccataaggcttatctatcattcaaaaaggcagagcacagcttgtccctcggtgcctgcctgagcctgggaagccttcttcctgacagctctgtgctgtgcttacagacctcactgaaccagggagtcaggctacagggttttgggaccttctttgctgtgggctagaatggcactgacactctgagagggtgcacctcagtgtagaagcttcgctgtggctccggagggagcctggcctgtaagatcggccaaggaactccagttaaacttcactgccagttaaagtctggtagattttaatcagagaatgaaacagttttaaactcaaaatgaaatgtcttgttataactgtgtgggttcctgtcctgtagcgttcttagaagtcaatttgggccaggtccagagagtgcagtttgtatgtaatagtctcaacactgcatgcacgtcgtgcacttcccacgcactttacaaagtactctgtccagaatctcacatggacctcggaacaaccgagacctcttccagccagattggaggcacccagagtagggtctgggatgatacaggctcttgctcaggactctgggaaccctttaagggcctgcttgaactcagaagttggtggctcagccagcagtctctgtccctattctgtgtcagcgttgatatcacacacttgtgatgtgactcgtttttctctttttcccctgactggtttttggtttttactctcccattgtgatttatcccaattacatggaaggaatttagctaaattaaaattaaatttgcagtcatggagcacgaattaattttctttctttctttcttttttttttttttttttttgagacagggtctcactctgttgcccaggctggagtacagtggtacgatctcggctcactgcaacctccgcctcccgggtttaagctattctcctccttcagcctcccgagcagctgggactacaggcacacgccaccacacccagcttttgtatttttagtagagatggggtttcaccatgttggccaggctggtctcaaactcctaacctgaagtgatcgaccacctcgggctcccaaagtgttgggattacaggcgtgagccaccacgcctggcctcttttattgttttgcttacccaactccccaacctttttcttctttctgctgataattaattatgtattttcaagacatatctgttttcaacttctagaattttgttcaaagttgggttttgctagtatttttagttaattttatctgaaatactgatttaaaatcaaaacctttactgtttcagcaattacactgtagtatttgatgtgggagtacctaatgtttactagaaatgtttacaaatgaattaaatattggattatattttctgattaaggccagaaaatttattttaaaaacttgctttcttcttcagtgacagaaaatctggttctcttgcactaatatgtgaacttatggacatgaatatttatgagctaatacgaggtacgtagaataatttgaaagctaacctaagatcctcttttaaggcttgtaattcatatatgcttagttattctcaacatcattagtcaccatagtgctgtagttatatataatacacagtacagggtcacttcattcaccaggaggcatttttctgactgctcatctactcagaacatggctgcaaacaagaaaggaagccccaggccctctgggtgcccatgtgatctgggggagagtggcgggaggcagcaggggcagctctgctgcagagcgcctgcagccagccccgccgtgggcatgtgtgtgcaggcccgctggctcaggggcctctctgctccccagatctgctgttgctcgacattctgttccatgcctcttaaggcagagctttccctccaaaatactgccctgcatgtgagggaagctcctaccattttccaggatgctcgttcatttccttttttctgaacaataaagcactgtttaagagagcatgtttgcctgaggtgacctcagtcagggctggtttgagatacttatagaggttgcctgaggggaacaggagaaaaggagaggctggcccacactgagccaattgttcctgggggtctgactaatggttgtgttagatgtcagaacaaatgaaccttgtatatctcactaagaaagcaacatagcaagtgttacattttacaaatcacattatacctagaggacagataaaaaacaactgtcctactgtcacatgagtgactacttatgacttggaaaagaattttagtgacagcatcatagatgatttagatggtgtattatcttacaatttgagccaaactgaagatgatgtgctatggaaaatttttagattgataaactatttttgtgatggaagaagacactgatgttgaagatatatatgaagagttcaaataaaattgtttttatgaagttggatagtggaaaaagcattatatcaatatttattttatatgtgacttaaaatatgtgtgtgatagtaaattactaacaaaacaaatagcataagtagccaagtttttctacatccataaaagttgatgtatataaagctgggtgcagtggctcatgcctataatcctagcactttaggagggacgccagtgcgggtggatcagttgaggtcaggagttcaagaccagcctgactaacaaggtgaaaccctgtctctactaaaaaatacacacaaaaaaattagccgggcatggtggtgtatgcctgtagtcccacctactcaggaagctgaggcaggaaaatcgattgaacctaggaggcgggggttgcagtgagctgagattgttccactgcactccagcctgggcgacagagcgagactctgtctcaaaaaataaaaataaaggccaggggctgggcgcggtggctcacgcctgtaatctcagcactttgggaggctgaggcaggcggatcacgaggtcaggagattgagaccatcctggctaacacagtgaaacctcgtctctattaaaaatacaaaaaaattagccgggcgtggtggcgggcgcctgtagtcccagctactcgggaggctgaggcaggagaatggtgtaacaggaggtggagcttgcagcgagccaagatcatgccactgcactccagcctgggtgacagagcgagactccgtctcaaaaaaaataataaaaaataaaaaaggccgggcgtggtggcttatgcctgtaatcccagcactttgggaggctgaggcaggtggatcacttgaggtcaggagttcaagaccaacctggccaatatggcaaaaccttgtctctgctaaaaatacaaaacaaattagccgggcgtggtggcatgtgtctgtagtccaaactacttgggaggctgaggcaggagaatcgcttgaacctgggaggcagaagttgcagtgagctgagatcgtgccactgcactccagcctggacatcgcagtgagactccatctcaacagaaaataaaaaaaaaataaaagtcaacaagaagggagaatttttggcaagttgctgtgtgtttagacgcttgagaaagctttgtttagaatatatatatatatatatatatatatatatatatatatattttttttttttttttttttttttttttttttttgagacgtggcgcgatctcagctcactgcaacctctgcctcccaggttcaagagattctactgcctcagcctcccaagtagctgggactacaggcatgtgctaccacacttggctaatttttttttttttttgtaggcagagtctcgctctgttgccaggctggagtgcaatggtgcaatcagctcactgcaacctctgcctcccaggtgcaagcgattctcctgcttgtgcctcctgagtagctgggactgcaggtgcatgccaccacgcccagctatttttttgtatttttagtactgacagggtttcaccatgttggccaggatggccttgatctcttgacgtcgtgatctgcctgtctcggcctcccaaagtgctaggattacaggcatgagccaccgcgcccagccaattgttttgtatttttagtagagacggggtttcaccttgttagccaggatggtctcaatctccttgacctcgtgatccgcctttctcggcctcccaaagtgctgggattataggagtgagccactgcgcccagccttagaatatatgtatttttaggatacatttatatttattttcagtagtagaggaattgtataattgaagaaattgaatctatttctttcaatatctgtctacagcgattgtagaaaacagacctcgcagtagacctccattcattatataaatattgtcttccataggccaggcagtgtgttcagtgcaccaactctgagatgctgtgagcaacatggagcatcctaggttcagagatgttaaaatgtaaggagaatggccaacagtgcttgtagggtagtaaatattgaaatatgcatcctgattttagagttggtaaaatttgaaaaaaaagcctgtcctagaattgatgaaatataatgataatgataatagctaacagttcatgaatggtacccatatggccaggcactgttcttaatactttataggaattaactcattttaaccttccaacaaccctgtcaggcagatacggttattttttatttttttaagatggagtctcactctgtcgccaggctggagtgcagtggtgtgatttctgctcactgcaacttccgcctcctgggttcaagcagttctcctgcctcagcctcccaagtaggtgggactacaggagcacgccaccatgcccagctaagtttttttttttttttttttgagatggagttttgctctttttgcccaggctggagtgcaatggcatgatctcggctcaccacaacctccgcctcccgggttcaagcgattctcctgccttagcctcccaagtagctgggattacaggcatgcgccaccaccccagctaattttgtatttttagtagagatggggtttttccatgttggtcaggctggtcttgaactcccgacctcaggtgatccgcccaccttggcctcccaaagtgctgggattacaggcgtgagccaccgcgcctggctaagttttgtatttttagtagagacaggtttcaccatgttggccaggatggtctcgatctcttgacctcgtgatctgcccgccttggcctctcaaagtgctgggattacaagcgtgagccactgtacctggcccagatactgttattatcctcatttgaaacatgaggacattgaggcatggggagataagttgcttgtccaaggttatatacctagtaagtggtagaactggggctgaacctagataacctgatcctagagtgcatgttcttaaccaccacccataccgcctcatgacaaccctgtgtggttggcactatttattattcccattttacagatgaggaaattgagtcttgaaggattaagtaataatccaaaattaagctgttaataaatggcagaactgggatttgaactcaagcctgactctgaaatcctaagcattaagctctgttgctgccctgggtctctatttctgggcccagctcagtgccttaaatgaacagaggcacctaattatttacggttattgatgatgatgcttctttagtgaaaactgaatcaatcactaaggctttagataccagaatggcaatttttgtgacttaaattgctgctctcaggttattagaatattgaggagcactattaaagactaaagaataagataataatgaaataagggaacgatcacatagccattattgaattgtctactttacagcagtgtgcaaggtctggcaagaactgggaagataaagaagcagcatgtcagatgcatgttttttatattgaaagagtatatagtctttttttttttttttcttgagatggagtctcactctgttgcccaggctggagtgcaatggcacgatctcagctcactgcatcctccgtctcctgggttcaagcgattctcctgccttagcctcccgagtagctgggattacaggtgcccaccaccacgtccggctaattttttgtccttttagtagagacggggtttcactatgttggccaggctgtctcaaactcctgacctcgtgatctgcccgcctcagcctcccaaagtgctgggattataggcgtgagccaccgcgcccagcctgaaagagtatatagtgtagtgtccacataaactatatgaaagtgatatcataagagaaaaggaattgctggggtagatttctttttgttgaacaggtgtcagatgaggcagagatggtgtgggctgggaaaataaggctttcctggaggagtggtagaattggacaggtgcgggagaggatgtcccatttgcagtgacatgccatgggctattccagaggcagggacatggtggggaacacagcagacacagttcccacccatgtggagctcacacttgatgaggagagacaggaaacaaatgaagaaattatcaagaatatcagtcaaaatgatcaagaattccagatagggataagtgctgtcagtgaataaaacaggccaatgtgttagagagtgatgaggatagagtacttcaggcagagggacagccagtgcaaaggccctgaggccaccgtgagggaagaggcccatgtggctggaggacatgaaggagagttgcaggaaacggagtaggcaggcatcgatgaggctggtagggcgagggtaagaattttcgttactctaagttcaatgggaagccattattgggctttaaagcaagggagaggtggttttcaattggtgtttagaccagtgtttccaaaacgatcacagaagaccagttgttttatttctaatatattgcagaccagaatttttgtaaaatatagtaaaaatgaattaccagaaaagtgatcacgtgcttagatgtcacagcatgtcaaattgctataagtggttctaaacaggtattctttttttttttttttgagacagagtctcactctgttggcaggctggagtgcagtggcgtgatctctgctcactgcgacctctgcctcccggattcaagcaattctcctgcctcaggctcccaagtagctgggactacaggtgcgtgccaccacgccctgctaatttttgtatttttagtagagacggggtttcaccatgttggccaggatggtctcgatctcttgacctcgtgatccgcccacctcagcctcccaaagtgctgggattacaggcgtgagccactgcgcccagccctaaacagttattcttaatttatgtcatctcctcttagaccagtaacagtccctgaaccatcatcagctcatggactgtgctttgagtagcatctttttagaaggaattctccagttgctgtttaaagaataaatgtgctgtaggtggatgtgttggttctcccttttagttgcaaataacagcctcccctattctctgattaactcaagaggggttactctgtgatatggatagattgccagaattgttgggaggactgaagaagcagactctgggcttggcctataggaagttgcttctcacaactctgctctccatgatcaggctgctggccctgccgctgacaacgctctgcagaataaagctgctgcagctaccaggcctggaatcatgcctcttctgccaggatcaggaggcagccgtgatccatgccgtcagaatagatgccttccctcctctcatctgcccccatacctgggccagaagcatctttcccaagtgttcccatttaggcagagcctaaktcacatctggaacactcagctgcaaggcagcatgaagaatgtcatttggacgttcaggcctggcatgctagatgggggtttgggataggacctgagcaagccaatctgcgggtgtgccatgaaggcaagagtggtgtgggagcctggggaagggatggcgaaggccctttgcccrccactgtctctggatgaatgtctctgaattctttggcgtgagttagtaattggggtgaatagagcatggctacccgccagcgatcctagtttgtgtatttgggcgcgtgtgcttatggctctgggctcatgccatctgcagtaggaaagcctgtcttggaatttatgaaggaaaaaccgtaaaggaggtttagtttccctcatactctgactatagaggcagctactcttttacaaaattgtatctgattctgctcttttttttttttttttaactgtttcaagttaaattcatagggccaggtgcagtggctcacgtgtgtagtcccaacactttgggaggccaaggcgggaggattatttgagcacaggagtttgagactagcctaagactctgtctgtacaaaaaaacaattttttttttttgagacggagtctcgctctgttgcccaggctggagtgcagtggcgatctcagctcactgcaagctccgcctcccgggttcacgccattctcctgcctcagcctcccgagtagctgggactacagacacccgccaccactaaattagcctggctaatttttttttgtatttttagtagagacggggtttcaccgtgttagccaggatggtctcaatctcctgacctcgtgatccgcctgcctcagcctcccaaagtgctgggattacaggtgtaagccaccgtgcccagcccaaaaaattaaaaaaaaaagcatccgggtgtggtggcacacgcctgtagacccaactactcaggaggctgaggtgggaggatggcttgagcccaggaggtcgaggctgcaatgagctgattgtaccactgcactccagcctgggcaacagagtgagaccctgtctcaaaaaaaaaaaataataataactcatttgccttaatgaatggctagttcgtagttctctccaccctcgctggaggggcgtgtgctggggatgccgtcattctgcaggctacagtggcagctgtattccttcagttagtgctgagtcacagtgaatgccttggtttatcactgtgttcacttaagtttttaaaattattagtatcatatatgacattccttcttaatgagaatatttggtaaaaattaacttgtaaaaattaccttggtcaggatagctagagcagatgagggaaatgcttttggggcctgctggaattcactaaggggcatataagaaacttctgagtaactcgttaattgtactctattttacttgtttcaaactgtttgaaaacaagaatctgatgggaaccagatagtcttgggcccggaaagtttgttctggagaagcttatggagagtggctaggcagtgctttcctttgcaagggtgtggtctccagcacttcagactactgggcccacactgttgctctgatacctcatgccagcagtaacacccccaactactggcccgggaccaggacggctccctacccctagggctgtgaatagggagtttccaggaggagacccagggaggcaaggaagggtgggcacctgaagaggactcttacctgggactgaaggcatctgagaagcacagattcctggcccgcatgcccgtttgtggctccattaggtctaggttcaggccttgaaatctgctttttttttaaattttattttattgttttttgagacagagtctcactgtgtcacccaggctggagtacagtggcacgatctcagctcactgcaagctccgcctcccaggttcacaccattctcctgcctcagcctcccaagtagctgggattgaaggcgcctgccgccacgcctggctaattttttgtatttttatagagacggggcttcaccgtgttagccaggatggtctcgatctccggacctcgtgatccgcctgcctcagcctcccaaagtgctgggattacaggctttttaatcagctttttaaaagacttctaggtgattatgaagattggatagattagacttttcctaaaagattccacgtttcccaagttcaagttcagatgactctaatgacaattttatgatacgagtaagatttaaatgtgtggacatggctgggaagggcgttcctggaatggaacatcatgaatataggtactaagcaggcgagctttgggagcaaccagagaagagtccatgagggaattcacctgagcattcgataaacaagaagggggtggtggggcatggttctcgaagcgaggacccaagactagtagctgcacctggggctctagttaggcgactgtggggccccattgcagaccttctgaatcagacatgtgggtggagatggggagggacagtatgtgtcttagcaacccactcgtgggagtctgagaacccttttggtggagaggaattggttgaagggggtcttgagtgccggggtaagtcgggggcagtgagactgggtttgatcacaggacccaggagcacctgatgagatgaaattccagcagcttcattctgctgcgtgtgtgaaggcaaatggaaagttgctttctttttatctgttatagatattaatttaataagattccagaattatcagcttgggaaagctgataaaggtcttacttttgattcttttgattttaattctggaaaattgatgataaatcatgtgaaacaataaaaagatgatagtatgacacaaaaaagttaattgcggccaggcgcagtggctcaagcctgtaatcccagcacttcgggaggccgaggcgggcggatctcgaggtcaggagttcaagaccagcctggtcaacatagtgaaaccccgtctctactgaaaatacaaaaaaattatcagggtgtagtggtggcgggtgcctgtaattccaactactcgagaggctgaggcaggagaattgcttgaacctgggaggtggaggttgcagtgggcggagatcgtaccaatgcattccagcctgggcgacagtgctacacttcgtcccaaaaaaaaaaagaaaaagctaattgcacctagacattttacaatttaaattactttctattatttatatattcttgttaagtagagaaaaagaataattttaatttttcaaaagaaattgtaaacttaggaccaaaagtgtcaaatggtatatgtgctcatggagggaggaagtggatttccaaactgttaggtgaacatggtcattgtgcagatttaaaacttaataacttaaaacacacactttgaaaattaaaatcaagtaaaattgacatcttctggaacaggggtaaactgtgatgctgggcatgtggtatgacgtcttcaagcacggtagaaagctgcgggcaccaaggcacagccagcccaggtgctgagtacagggcagctgcaggggactgtgccagccacgctaaacggcctctcctgtgaaagaagacatgtggactgwgactgaaagcagttgaactgcttcttgaactgtgatctgtccccctttaaagtggacatctccacataaacaggaaagcctagtggaacactgggttgacgagtgactcctaacattttcataatcagtgtaggctgaaggacagcgtcctggaaggcctccgaggccggctgaggctgtcagaccatgctasttgtgtgacgattgctcagtgctgttcccactgaaaccatagcacatgcgctctgaatgttcacagagctgacgcaygtgctaattgccccgatttcatccttacacattgtatgtatggatcaaaataacactctctgggtcccattagtaggtacaattactacatttccactaaaaaggaaaaaaattatcaacaattctgtcattcttcagtaacgtttattgtttattaattttttaattggcagtttcccaaacctgcttcacctgtttcaaaactcagaaaaaccacgtgtgctagagcagcagcagagtcactatgcagctgatagagctgactcgcccggggcttccaaaacaggcccttgcggtgtctccaccatgtttatagattttgttaaatttgcaaaaataagatatttcaaccacaaagttaagactgccatctcttctattttaacctctcctatgtcatatttcccctcttagcgtaaccgtgaaatagccgtggacatgtctggaatcttgttaagggttggctgggatacatttatatgctttgcagtctcttccatatattaatagttacattattgctggccatctcatttgggatgtcttctaggaatactctgaatatggtcaattcaaagattaaagagcattcactccatagaaaacttgaaatatgaaatcttatagctcagatatgaaggaaacttagcagtttccccagatttgacaattctaaaaattacatggtgctactaatacatagttgaggatgtaaaagaagcctctataaactgccaaaaagaaaaataaaaagggattttccattaaaaatgtatgtgctatgtaattttaaatgagatcatgccattatatagattttttttttttggacggagttttgctcctgttgcccaggctggagtgtaatggtgccatctcggcttgctgcaacctccacctcctgggttcaagcgattctccagcctcagcctcccaagtagctgagattacaggcacccgccaccacacccggcaaatttttgtatttttagtagatatggggtttcaccattttggccaggctggtctcaaactcctgatccacccacctcagcctcccaaagtgctgggattacaggtgtgagccaccgcccctggccagtatatggaattttaaatggtatgttttgtaggcacactacatatttcctaagactacttcagattattttttacaggggaacttagattttcacacatygttaaataaaaatagattatttttatttcaaaaaagaggatatgtaccatcagtaaccgtatttgcctatttccttgattgtacagggagaagatacccattatcagaaaaaaaaattatgcactatatgtaccagttatgtaagtccctggatcatattcacaggtatgctctcggagatttgacagctctgaaattaataaaatgtgttaacattcagattcaagaatttgaataaatgaagtgtaattytatttttcctttatactgaatgcagaaatggaatatttcacagagatgtaaaaccagaaaatatactaataaaggtaagagcttttacatgaaagctgggtatcagaataaaagytgaatagaaaatctttcccgaaaggttttctcctcctaccagaggaactttcagtccatgcggctagacagcctgtttgttacagtaatttttttccctctcaggttgtaaaaaatggtttatttaataaatgccatcaacataactgactgcacctggaagaaaataattgaamgcaccattttcacaccgcagacaaaaatgaaccctattcagacggcsgttcaaaccttctagagggaaatgtggcagaggcaggatttgagctcaggtccgtctcactcccaagccactaaactacctgtgtttaaaccgtacaatttgctgtttcccagcacctgtcactggctgtcagcagagtcctctgaggctgtgtggctaaaagagcccttgctgggcaagctggcagcatgaccggacagacgactagtgtgtgttgttcatttgtagaagcgccaaygggttaaccagtttccaaacctgtaggcattttggaaatatatgtgaaacagccagaatatttgtaaacctgttccactgaatagacatcacttcctcatctgctggaggcactttgaggtgctcagaaagccagtaatttgtattttacagactactttagatgctagtaattttcctgctggtgcataaatatttggagtggtttgtattatgatagccacataatgggatgttacttgtccttgcttctttccccttccagcaggatgtcctgaaattaggggactttggctcctgccggagtgtctattccaagcagccgtacacggaatacatctccacccgctggtaccgggccccggagtgtctcctcactgatgggttctacacgtacaagatggacctgtggagcgccggctgtgtgttctacgagatcgccaggtagcaccaggccaggctcctgcctggttcctgcggcggagcggtgcagcasccaggctcgtgctccttcctttacaatccagatgtcatggtcattctggtttttctttctgttttactgtttttaatttaacagaaaattgactaggctttcattttacttgttgtacatatttggccttgcctgcccttcccagagaagagcaccagccctcagttgttctccctcctgcacaccctggtggtgtgggcagctgcctccttggggttgctgtgaggtgcttgatggggctgctgtggggaggggtgagccaaacctcccctgagaggtgcagtcatattaggtagggtgccctggccacaggtgtgaggatgaggcaccttctggcacagttggactctagaaagccccaatcccacccctccctgctccatcctccaaaccccccactcccccccagcctttggcaaggagcagtggcccagggacgaggagatgggggccggtcccactccgaggtgaatggtgttgagttgaagacgcgcacaggggtggagagctgcacctcttgctcccagtgggcctccaggcaggtggcagtgaggttaaggtctgggggtgcatctgaggggtcaaagtctggtcccgcctgctcaacagactgctacagaaatgcacttcaggacatactctcctttgatccagatggttcatactggtaacttttcattttggaaagctgaatggcaatttcactgcagccagaagtgtcaaccaagagtcccttcccatgagcccaggtcctgtgagttcatctggagggggcagatgtcaggagcacaaggccacctgtatctcaccagcgcacaagacggcccacggtgcaccagccaccaaactgggctgaggcactcatctccccacttggagctgtttcctgctcacccgcatttcctcctctctcctttagtcacaagagcctgccattttctggaatagaagctaggcctactaccagagctgtatttttaaatattatttgtggcatgtaatatgaattgaatttatttatacaggtttaaaatctgtatttatttttttgagatggagttttgctcttgttgcctaggctggagtgcaatggtgcgatcttggctcaccgcagcctccgcctcccgggttctagcgattctcctgcctcagccccccaagtagctgggattacaggcatgcaccaccacgcccggctaattttgtatttttagtagagacggggtttctccatgttggtcaggctggtcttgaactcctgacttcaggtaatccgcctgcctcagcctcccaaagtgctgggattacaggcatgagccaccgcgcccagcacaggtttaaaatcttgttcccacaattccaaaatctataaaagctctggaaaccaaaaggtttcttgggactcatttgttgacaaaacctgacctgtctcaccctgaayttgtcagcaaaactccccttggccgatgggaggctcactgtggggttatttatcacggttactgtgaattagtcacatttcaccacagacatcatgctgaacagatgacggaatgtggatctgtcttttgcctcttagaaaacacatgtcggacctattggtaaagtggaaacaaaaggtcaagcacaagggagagtggagcctcccagcagctaaggtcgctgcacacgccaggctgagttcctcgtgttccgtgtggtgagggtcgctgcacacgccaggctgagttcctcgcgttccgtgtgagcgagtctgcctggtcgaggggactaggcagaatggagagacccatggccatgtcctgactgtagggtcagctgagagaaaggaaaaatagacccaaagtcaggcaagcaagtcagacagtcagaggaagcagccccaagcttatagaatgagggatttatattggggaggggaatttgagggagttctttggtatggccgcatcctggggttggttttttttttttttttttttgagacggagtcttgctctgtcgcccagactggagtgcagtggcgcgatctgggctcactgcaagctccgcctcccaggttcacaccattctcctgcctcagactcccgagtagctgggactacaggcacccgccagcacgcccggctaattttttgtatttttagtagagacagggtttcattgtgttagccaggatggtcttgatctcctgacctcgtgatccgcccgcctcagcctcccaaagtgctgggatcacaggcgtgagccactgccccggccatcccagggttgtttgctggttaattttgccacatatcaccttgtgatgtttgtggtagcaactagatgaagagcaggaacttacagaagggtgtagggaaagtttgtttatgcttcccacgacctcctgctgtgagttctggatggtttgtaattggggtttgcttatcacagcaaggtctgacaggtgaagtctgctggctttaccgtggcgcctagataaaggcttagaaatgtaaagaggcttgagggaagggtgaaccgcacggagaagggttgcagagcattagggggaggggtgggcagcaccaagaagcttttttggggcagtttgtctctaacattccagccctttaataggtaatagaagaggggcgccgttggcgtctggccacttcttgctgggaaggggtgatggttatgggggaaggctggacagtagggactgccgttcttggagctgttggtattcttggagcagcatcatatcttgtattgtattgaaggctccgatacggtcctgtaaaaactgagtgagaaggcgtaggagacaagggctgaatgctagaaaaagaagaatggttatggctgggcctaagaggggcattagccatggaaaccaggtactaaaggaccaggagggccacgctggccatcgggggacattttctttaattttttgtgctcggtcctttagtgtttttacaaaatctcgtactaagccagattggttacgataaaagcaacactgttcatctagaaagaggcagagtcctccctttttggctgtgagtcggtctacgcctctgtgattttgaagaagcgctgctgctaaagaatctatttgtgattggagagttgtgatggatttggctatctcttccaagctatctgtgaggtctttggagagggattggtaataggaaacagaggtggttaatcccgcagtctcagttccacctcctgtagttattctggggactgctaatagaggtatgagttgcatagcacggcagtgtcggatgcgggtattaactgggattggtaggggttggtctcctggagcaacattgatttttggagtgaggaaaaccagggtgcaggtaggtgcctgtccagttagaggggaggcaaatataagttgaggtactgcataggaaaagtatgccttggcttggtagacagaactggttgtgtatgctaaaaagatgtactgttttgttgtcctcatgcatccatactcctagggccccggctagagctgctgctctgagtggttgtaaagggtgtttgctttaggctgggggctttgggttcttttttcccagcgtaagaggaagcattttgtgtccactaagatccatgtgggagtgttgctgaatgttgggataaggacacagtcgcaggtggcgggtgcagggatggtgcatggagaggggagccaagggaagagggataaatgggggtgtcggccgttgcagtactctgagtttttgttaaggaggtgggaggtgtcaagggctggggggctagataaacgaagcctgtctttattgttggtggctttgagagtagtctgttcggtggagggtttgagttgtgcggtgtaagttgcacagtttggaatttaggtggctgaggggaatgcttgagggtggatgtcgctggcgcacagtggtgctggataggataagattgtgtgggttgttacggttcctactaataggcattcatcacagctgtggtagggccaggttgcgtaagtaggcatgtaaggttgtaacacctggaccgaactcgctagctaactgggggagatttttgttaatgcctgtatgtcgagtttgaggggcagttaatgaggatttcaggatggtagcttacttgggtggaagtccagttataggctgagcaggggttgcattgtatgttgtggagaggagggatacgcagagccagcagtctcttgccagagaggaattggagttttttagtaaggagtgtgtgagattaagtgttctgtataggtgttcaggggttgtaggtattggttggactgaacgaagggttggggtattgattatgagaagggttagaaaggcagatagtgagcagaaaaataaatagttcggttccacccagagtaaagccacagagagagccttggaagaaaaggtcgattatccacttgaaaaaggcctccagggtgtcgttccgtgggtggaaccaggaaatatcttgtgagagggcgtgaaggaagagagtgaagcggcaggatagacaaaagcagggcatctagggaggatgtgggaatgtttgatagtgattgtgattcctgctgtaagggtaacgattaggcagacggctaaagtgagggagacttttggctggtattccaattggaaggagttacactatataatcccactgcaaacaatagggtaagtattataatgcctgcagttagggtgtaatagagtgtttccattaaaggaggctagttgtaatagtactttaaacctgtttgagatggatggatttactgatgtgaagtttcttctgggatggatgtgaggcggagtcaggttggcccaaggagtgtgctggaataccagttagaagttggtgaggtgctggttggaggatcggaggtgggagctctctttaacctggaaaggtgatactagggggtatgtcctgagagtttggctgcagtaggggttgtaagtgtcacacacgtccatgtgaaaagaccaccaaacaggctttgtgtgagcaacaaggctatttatttcacctgggtgcaggcgggctgagtccgaaaagagaatcatcgaagggagataggggtggggccgttgtagaggatttgggtaggtagtggaaaattacagtcaaagggggttgttctccggtgggcaggggcaggcggagggggtcacaaggtgctcagttggggagcttctgagaaaaggaatttcacaaggaaatatcagttaaggcagggaccggccattttcacttcttttgtgattcttcacttgcttcaggccatctggatgtatatgtgcaggcttgggcttagaggcctgacattcctgtcttcttatattaataagaaaaataacataaaatagtattgaagtgttggggcagtgaaaatttttgggggggtggtatgaagagataatgggcgatgtttctcagggctgcttcgagtgggattaggggtggcgtgggaacctggagtgggagagattcagctgaaggaagattttggggtaatgggtggtattgtggggttcttagaaggagcatttgtcatatagaatgattggtgatggcctggatgtgtttttttatgaattgagagctaaacggaagacacaaggtccaaataagagaaggagaaaaacaggtattaaaggactaagaattgggaggacccaggacttccaattagggagtgcccaagggggttcagcgtaattacttgcttggttggtgagtttttgggctctatccttgacagagccctcctttttaagttggaggctgagtttggtgaggtgtgtttttaaaagaccattagtctgttccattctacctttcctgaagattgaggatggtaagsggtatgaaggttccactgaataccaagagcctgagaaactgcttgggtgatttgactaataaaggccagtccgttattggaccgtatagaggtgggaaggccaaaccgaggaattatgtctgacagaagggaagaaatgaccacggtggcctttttttgaccttgtgggaaaggcctctacccatccagtgaaagtgtctatctagaccgagacgtattttagtttcctgactcagggcatgtgagtaaagtcaatttgccagtcctgggcaggggcaaatccccgagcttgatgtgtagggaagggagggggcctgaacaatccctgaggagtagtagaatagcagatggaacactgagaagtgatttccttgaggatagatttccatgatggaaaggaaatgagaggttctaagaggcagactagcagcttgtaatctacgtggaagaggttatgaaatgacgacagaatagaatgggcctgtgaggctggaaggagatatgttccttagtccaagaactatttgccttgtgtgggaagagattgataggtggaagtttcagtggtggagtaggtgggagtgaccgatgagaaggagaaaaactgccatgagggatagaagttggaatgctagctgcttctttagctaccttatcagcataagcgttgccccgagcagtggggtctgatgccttttgatggcccttgcagtgaatgactccagcttcctttggaagtaaagcgaccttgagaagtatttttattaaagaggcattaatgatggaggacccttgtgtagtgaggaaacctctttcagcccatataacagcatggtggggcaggatatggaaggcatgtttagagtcagtataaatattgatgcgtagttcctttgcaagagtgagggcttgagttaaagcaatgagtttggcttgctgagaggtagtggagggggcagagcagtagcctcaatgatagatgtggaagatactatagcatagcctgcctttgctggtaagcggtgattaggcctggtggaactgccatggataaaccaagtgtgatcagggtgaggaacaggaaagaaggaaatatggggaaatggagtgaatgtcaggtggatcagagagatacagtcatgggggtcaggtgtggtatctggaataatgtgggaggccggattgaagtctgggccaggaacactggtaattgtgggagactcaacaaagagtgagtacagctgaaggagccagggagcagaaagtatatgcatcaggtgtgaggaagaaaatagattttggaagttatgagggctgtagagagtgagttgagcatagtttgtgattttgagggcctctaaaagtgttagggtgacggcagctgccacacagagacatgatggccagcctaaaacagtaagatcaagttgtttggacaaaaaggatacagggcacggtcccggctcttgtgtaagaatttcaactgcacagccctgcactttggctctgtgtaatgaaaaagggttgggatgagttagggagagctagtgtgggagcagcttccagggctgtttttaaggaacggaaagaggaatggggaaaggatttaggatctatgtggtcagctaggttttcttttgtgtttatgtaatggttttgttaggatggcaaaaccaggtatttaaaggtgaaagtatttaaccatgcccaggaaggaaaggagttgttttgtagaaggggttggggtttgggagattagccagacatgattagcagggagggcatgtgtgttttgatgaagaattatgccaagataggtaacagatgaggaagaaatttgggtttgactgaagtaatgggggctgtccatgaagccttgcagcagtacagcccaggtaatttgctgagcctgatgggtgtcagggtcagtccaagtgaaagcaaagagtggctgggatgaagcgtgcaaaggaatagtaaagaaagcatgtttgagacccagaacagaataatgggttgtggaggggttgtggagggaggtattgaggataggagagtatatgggtttagcactacagggtggataggcaaaacaatttggttgataagatgcagatcctgaactaacttgtaagacttgtccggtttttggacagggaaaatgggggaattgtaaggagagtttataggctttaaaaggccatgctgtaacaggtgagtgataacaggctttaatccttttaaagtgtactgtgggatgggatattggcgttgagtgggttaagggtgattaggttttaatgggatagtaaggggtgtgtgatcagttgccagggagagagtagaggtgtcccatacttgtggattaaggtggggagatacaaggggaagatgtgaaggaggctttgaactgaggaaaagggcagcaatgaggtgtggctatagtctaggaatagtcagggaagcagataatttagttaaaatgtctccacctaataagggagctgggcaggtgaggataactaaaaaggagtgcacagaagaatgttgtccaagttggcaccagagttggggagttttaaaaggtttagaagcctggccgtcaatacccacaattgtggaggcaagggaaaagaaggtaatgtggagtgggtaagctccgtattgattaagaaggggatggacttaccctccactgtaagagttacccaaagcgtctgtgatggtccaggaggcttccgaggcaatcaggtagcattagtcttcagccgctaaagccaagaagatctgggaaggagtcagtcagagagccttgggccagagttccagggactctgggagtggctgctgggcgagttggacagtccgatttccagtggggtcctgcacagatgggacatggcttaggaggaattctgggctgtgggcatttcttggcccagtggccagatttccggcgctagaagtaagatccttggggaggcagttctggaggaacgcctggccactgcggttcagacgtttggaagttcttgtgtcctggagatgtggctggggtttgtctcacagtggaggcaggaattgcaattcagaaattcattgctacttggctgcctctactctattattgtacaccttgaaggtgaggttaattaagtcctgttgtggggtttgagggccggaatctaatttttggagctttttctaatgtcaggagcagattgggtaataaaatgcctattgagaataagatggccttctggcccctctgggtctagggcggtaaagcatctaagggttgttgccaaacgggccatgaactgggttgagtttttatatttgatgaaaaagagcctaaacactgatttgggagaggtcagataaagaaaaaggagcattaaccttggctaagccttcggctccagccacctccttaagaggaaattgttgagcaggtgcgggagggctagtctccccacgtgaaactgtaagctggaccctgtgtgaggatgggaggtgattaaaggattatagggtgggggagtggaggctgaggaagaattgagacctggctcagcctggcgaggattagcctggggaggaagggaggggtcagatgggtctgtagaaaaggattcaaaggactcagagcttggagtggagactgaaggaatagacaggagagaaagaagaaagatttgggatgagttgcattgggagcagagactagggagggaccgatgtgtaaaagaatgcctggacgtcaggcacctcagaccatttgcccatttttcgacaaaaatcatccaggtcttgtaaaatggagaaatcaaaagtgccattttctggctgtttagaaccattatcgagtttgtattggggccaagtggtgttggcgaagacacttaggttttaggtcaggcaagagttgaagaggttttaagtttttgagaatacagcctaaggaagaagaagggggaatggagggtggaaggttgcccatagtgaagcaggcaagcccagagaaaagagagggtagagacacagataaggagggtggtgagcagccctgggctgcaatgtgggtgagcagccaaagcaggcatccccgcagttgacttgccaccaagggaatgtgggtgaatgaccaaggcaggcatcctcgcggtgatcagacaccaatggagtgtgggtgaataatcaggcaggcgtccccgcagtgattaaacaccaagagaagactgtattcctgagtctgtgactggtgctggagttttgagtccacggatagaatgtgtctccttcgtctctactagagaggaaaaagaactggaattggaagaacagggagactgaagggtagcaagagaggctggagaagagagtgaaaagaccgcttacctgatttgaaattggtgagatgttccttgggctggttggtctgaggacccgaggttgtaggtagatctcctcacggagtgagggcaaggacaggggactggtctcccgaaggagtcctcctgtcccgggtttcggcaccaaatgtcacgcgcgtccctgtgaagagaccaccaaacgggctttgtgtgagcaacaaggctgtttatttcacctgggtgcaggcgggctgagtccgaaaacagagtcagcaaagggagataggggtgggtcgttttataggatttgggtaggtagtggaaaattacagtcaaagggggttgttctctggcgggcaggggctaggggatcacaaggtgctcagtgtggaagcttctgagccaggagaaggaatttcacaaggtaatgtcatcagttaaggcagggctggccattttcacttcttttgtgattcttcacttgcttcgggccatctggatgtatactgcaggcttgggctcagaggcctgacagtaaggatgacctggaaagggccttcccattttggtttaaggctggttgggttaagggtttttttttgtttgatttttgttttttgttttgagacagagtcctgccctgtcgccaggctggagtgcagggcacaatctcagctcactgcaacctttgcctcccaggttcaagtgattctcctgcctcagcctcccgagtagctgggactacaggtgcctgccaccatgcccggctaatttttgtatttttagtagagaaggggtttcaccatgttggccaggatggtctcaatctcttgaccttgtgattcaccaggcttggcctcccactgtactgggattacaggcgtgagccactgtgcccagccgggttaagggtttttagaaaaacatgttctcctggtaggagggtctggtcagtgaggcctttatgtggtattgggagggcctggtgtgcctgtttgcagaggagatggcggatgagggagagtgctgggaggtactctcctaattgagaatcagaaggaggcctgtttygtaagaggaaagggtctcagaaggaggcctgttttgtaagaggaaagggcatccatacattaattcaaatgggctgaggaaggagggtgcctttgggctggctctgacgctggctagagctatgggtaggagggaagtccagggcctctggacttctagagtgagtttgatcaactgagtgttaaggtttccatttgccctttcgacttttcctgatgattggggtcgatatgggatatggaggtgccactggatgctgagggactgggagagctgttgggtgatttgggaaatgaagccagggccattgtctgattgattggagcgagggagaccaaagctagggatgatttctcttgtggggatctgggagactactgcagctttttctgaagaggtaggaaatgcctccacccacccagagaagatgtctataagagtgagaagtagtcttgtgtttttgacgggaggcatgtgggtgaagtctatttgccagtcttcccctgggagtgttcctcttagctggtgtgtaggaatagatggggaatggagggctccttgagaggaggtgacagagcatatatgacattttgaagttatactttttagtgaggtaaataggtgaggggagaagaaatatgggcggaggaggagatataggggacatgcaccaatatggaaggattggtggagagatgtcaggattttgtcggtttggccctggggaaggtctagcttctggtccttatctatccagtccccctggaggaaggctccttgttatagtaatgaggctttttcagtggggggtactgaggttggactgcaggggtaatgaggaggagggaggcaggagcggaagaaagggaggcttcttttgctgccccattggtctttctgttgcctcttgagattttatctgttcctgtgtgatgtccccaacagtgtataactcctgcctcagttgggagatgtgcggcttgaaggagttggtaaataagggggyggttagtgatagggtcactttggcagtaaggaatctcctctcttgccagatggtggcgtgggaatgaagaatgtgatatacatctttggagtctgtgtaagtgttgactcgtttgcctttggaaagggttagggctctggtgagagctatgaattctgctttttgagaggaggttcctggaggtaggggcttagcttcaattactcggtcaagggaaacaactgcatacccagcaattttgggggagccagtgggcccagaaggggggccatctataaatagctggtcatcggggttggtgagaggctcggaggaaatgttaggaaagtgtggctgcaggtgatctaggacgtcagtgcaagaatgagtaggaagggaagaagatacagggagtaaggatgctgggttgaagggagcacttttggcaagaccgaattcaggatttttgatagagggcatggagtaattgaatccggaaaggagggagcctcatgctcgggaggagaggagatcctgtagattatgaggactgtaggtggtggtattttgactcaatgttagtttcctgcttacagctaaagtggccgctgctgctagcattctaagacaggttgrccatcctctgactgtgttgtctaactgtttagagaggtaggctacaggggcaaaggaaggagggtctcctttctgttgccctaagacaccgagggctattcctcatcttttggcagtatagagtgtgagaggttgggagataccaggtaaggacagagctggtgcagtgacaagagcggtttgaagtttgcagaagttggggagtatgttacgtgagggatttagaggctcactgagagggcctttggctgcttcatagagtgggtgagctaggagggcaaagttgggaatccatattctaaaaaagcctgctagttctaggaaggaaagaacttcgcttttggaggagggcgagggcagattatctattagtgctgctagggcaggggtcatagcccgggtcccaggggaaagttgaactcctaggtaagttactatggaggtggaaagttgagcttcggagggggagactctataccctttgatggagagaaagttttaagagagtaactgtgtgagtttgagagtcttctagagaggggctgcaaaggagaagattgtccacgtattgaaggagacggctagggaaaaggtttaaggaagtgagatcttgagctaaagcttgtccaaagaagtgagggttatctctgaagccttgagggaggacagtccaggttagytgttgtgactggagggtgtcaaggtcggtccaggtgaaagcaaagaggttttgggaatcagggtgcaggggaatagtaaaaaaagtcatcttttaggtcaatagcagtgtagcaggtggtgttggagggaatgagacagagaagtgtagaggggttagggactatgggatgaataggaaagacagcctgactgatggctcggaggtcttgcaggagtcggtatgagccgtctgattttttaaccaggaggatggtggtgttatatgaagaacgtgttggcctaagaagacggcgtgaacagagcttgtttgtgatgggctgtaagcctttttggtgggttagggagatagggtttttggggatgctgggaaatttagagaggtcttttaactggattttgatggggtcgtggtgagyagctagggaaggggtggtggtgtcccaccctrttgggtttacaaaagaggtgggaagtgggtactggggagaggggtcaggggctggactcgcatagaggagtaggagggactccggttgagggagggagaaaaaggtgatagaagctttgaatttggccaaaatttgaatttgaatttggctttgaatttggcctaggatgggggtagggcaacgaggcatgataaggaaagagtgtgggaaaacagtatcaaacagagagcaagtaaggggtctggtggcgcgtggacgcaagatgagtccatcagcccccacaactgagacctgagagggatgagtgggtcctgaaaattcaggcaaagctgagtaggtggccccgctatcaatttaaaaagagatcggcttacctgctactcgcagagttaccctgggctccaatgcagtgatggcagatggggccgggggccctgggcccggtcagtcctcagcggctaggctgaggagctgcgggaatgcaagcggttcttcactttttgtcttgttaaaggggtggtggctctgaggagcaggcttgtctgtctgttgagaggacagtcggacttccagtggcctgtctgctggcacactggacaaggactctttggcactcaagggttaggatacacccatgcccagtggccttctttgccacacttaaaacaaggcccggagggttgctgctatcgggtcttttgtgcccttgggtgatacggctgggttgatggacagycgctgctagaagctggtatttagcacgatctctttgggctttatctaatttattttgctcatccctgttattaaagactttgaaagccaagttaaggaggtctcgttgtggggtctgaggggcatcttcagcctttttaagtttgcgccagatgtcgggggcagattgggaaataaaatggatgtaaagaacaatagttccttcccgggaggcgggatcgacacgcgtgtatttttggagagtctctgtaaggcgagaaaggaattgggcagggttttcattggccttttgggagattcctttgagtttttcgaaatttacagccttatgggcagttttgttaaggcctgcagtgaggcaagtaatcatatgattacaggaggtctggcaggggcctgtgggttgatacgcccaggtacgctcttctcagggaactgcagcggcccctactggcctagtaggatcttgccgatggaggtcatcggcatgggcctgggctgcaagccacactctttccttttcttccggaaggagggtagaagacaaaataatatagagatcatgccaagtaagttcataagactgggtgagatatttaaattatttgatgtaagtgtcgggatcggagaagaacctggacgtttctcaatttgggaaacattagagagggaaaatgggacgtggacacggaccatcccttcggcccatgccacttcccggagaagaagcaagggagcaggctgctgggcgtgttgggctcgagaacgagtaaggggtggagatggggaggactcagagtcggaggtggggtggttggagagaaggggagagagaggtagagccggagcggaggcatacggtggggggtcatgctgttccggtggaggattaggatgttgtcgaggaggggagaaatcggtgggatcaaagaaggagaagtcgtccgctggggctattgggatgaggggagcaggaggtgagtcgggtttggagcaggcgaggagaatttgaaaagtacagcaggactggcagagggagggacgactacagagagtaaagaaagcctgaacatgaggaatctcagaccacttcccactgcggtggcaaaagttgtctaagtctctgagcatgtcggaatcgaaagtgccattttcaggccattgggagccatggtctgatttgtattgaggccatgtggtgttacagtaaaagataagccttttagggcagatttctgaacggaggccaagagtatacagattgtgtaggaggcacccaaggsgggtagttttaggaggaatagactgagaggctcccatagtgaatggaagggaggggggtagaggaagaagagactgccggtgacgtcccctttcccgcggaacttgtcaggaatagaggaggtaaccaccgtgtcaggcgtccctgaaacggaggaaccagaggcctggaggctggaggaagcccttggcccagcgctgggtctttcggaaatgggagatggacggtcaagagttcagggaatggcaacagtctctttttactcaccctggcggaggctttgatggtggatgaagtcaccagcaatgggagagtctaggagattgtctgggtctttggcaggttcggggaaggggagattggccaggagaggggtgataggggagggagggagagagagagaaaaagagagagagagagagattgatagtgagcgagtcctggccagagtctatcccccttcccgggtttcggcaccagaatgttaggtcatccgagagaaaggaaaaattgacctaaagtcaggcaagcaagtttttattaacctgccaccggccgcttaacagtcagaggaagcagccccaagcttacagattgaggggtttatattggggaagggagtttgagggagttcttcggtatggtcacatcccggggttgtttgctggttaattttgccacatatcaccttgtgatgtttacggtagcagctagatgaacagcaggaacttacagaagggtgtaggtaaagtttgtttatgcttcccacgatctccccttgtgcggtccagatggtttgtaattggtgaggtctgttggctctgccctaacactgaccacagtgccccttstgcccttccagtctgcagccsctctttcctggagtaaatgaactggaccaaatctcaaaaatccacgatgtcatcggcacacccgctcagaagatcctcaccaagttcaaacagtaagtattgtgttctgagagtggatgtggacccactcccctgctaggacctgcagcagggcaagcccctccctgtgcctccctcaaacccctctcaggagctcctttggctgactacaggggttcaagttcacttgagggccagtgagtggctgctcagacagagcccatcactttaagtggtctcaaaggtgagctcttccttgagcatcacagaaagatttgtcacaggctttctgagggctggggagtcaggctgtgttccctgagtaatttaaacaggacttagaagcctttgggtggaaacgttccccaagcacagagcataggtggtgagggctttctgcagccctccacagccctgctggcgggaccgacgcctggaagaggtgttcccggactcttagggtcattctggtgaagctgaggctgggagttgggacttcccagggagggcctgtgggctgaggggcaagtagcacccagcggcccccacatcccagggagggagaaggtggcaaccattttggactcttctttttttgttaaattttatttcattcttctcatgtgggaaggtgatattaatcttttataggaaaggtagttttcttacatttttagcataacagatccccccctttataatagactatttttaaatagatttttttaagagcagttttaggtttccatagagccctgtccccatgtgcacacagcctcccctgtcgtcagcacctgcctcgagtggtgtgtttattatggtcgatgaaccgtggatatctcattactacacagagcccatcatttacatcaggggtccctcttggtggtgcacgttctgtgggctgggacaggtgtagactctgcagtcataaaccattccccaccacacagggcccttagttgtgacagyggaccaccggtgcgctcagtgacagcatgaccatttattatcattgggtttttaatacaggtcgagagctatgaattttgattttccttttaaaaagggatcaggaatacctctactaacaaccaatttgtccccacaatgcctctccctcctgcacgcaatggtggcctatgatcccgatgagagaatcgccgcccaccaggccctgcagcacccctacttccaagaacagaggtaggcactctcgtgggttcggtrgggcagatgcaggacctggcaaatgagacccatgggcacatggtggggcaaggtactgccccctggagggtccctggttcttgggaatcgcgctctctatcctgaagagtggtcagggcctcttggggcccacaccgtgctgccttctggtgtatcctccccaaaatgaggatgttagcagctccacggcaggagaaagaggggctggctgtccactttgcggttgatgccaaggctacaggtagtaakccttctagaagagcctggtgtgcggcccttgtaaatggtgtgaacaggatgcattctgagatggtagagcactgtggatgtcacctggcgctggaagtacctgctgaatgtgaatctaagacctgtctgccctgaggtcacctaattccggacctctggacactcctgtttgcctaactgtggaggtgacagtttgatcygaaactgcgagtccctgggtaggcagcgcttctgattcatggagccagctctgttcctggcccagagactgtcaggctgagacagaaaagaaaaaaaaaggctcctgattacagctcaggcagaaaagaagagctagtgacaactcacacagtagacaaattggagacaaagaagccagtaggccgtgtgctctgcgggctctcagtggagctgctccattctcttctccttccccgtaggaaaacagagaagcgggctctgggcagycacagaaaagctggctttccggagcaccctgtggcaccggaaccactcagtaacagctgccagatttccaaggagggcagaaagcaggtactaagcraaatcggagccggagactgcctagctcagccgggactggatgccctcgggtggcctgtgtctctctcaggaggacgccacctgtggaggctgtggcagaccacattgtcagtcgaggcctgaacagcatgcgagttgatggctccatgtgttgggacatcagggaccccagttctatttgctcaagccctttctgccccagtagctaagaattgatgacgaatatcccatgtgagcaggcccagagaggggatgtttgcatgaacttttgtgtctgtcctgatgaccatatgcaggtgccaggttctatgccaaagcaccgtgcagacatcgcccctcagaacggccctggagggaggcgccaagaagatgcaatgctggcccaagtcacccacccagccagtgacaggtctcaagtcactgtctctgcctggctccagatgagcacttcgtcccatcagcagaggttgtgcacattttcggttgagaaatgccagctttgcccctcagtgccttcaccttcccacctaccgtgtggcatcctagcctggtgcagccctgtgtcacctgctggcagggtcacaccagtctcccagttctgggctggcaccccaacagtgtgacagtgtgcccttccatcattcgtctgttcggtcgtccgtacgtcactcgctcctcccagcctttaccgagtgctccctgaccgcttgggagctgggaacccagagctgcagtcaggctgctctccagaaagccaggctcctgtgtcccattggtccctgatttgacagctccacttgaatgtccgaaagacagacttgctgaaaccccttctcctgatctttccccaaacgtgctttttccctgtggcttcccatggccttccctccgagggaggcaactccgtcaactgcccaggccccccgtggacccttccttcatcccacaggggcttcgccttcttgcctcctacatcctcctcaccttgcctaagtcaccacagatggcctcctcactactgtccctgctctgcctccgctccctcctggacagagggtctgcttcaaacccttgatgtcactcctggccggcattcacccaagtccccaccctcagtcacatccgaggtcggcatatttttctctaagggtctgataggaaatattttaggccccgkggccgtggggtgttcgttacactccctgctttgctgcagtgtgaaaggagctggaggcaacacatgaaccacataggggctgcgttccagtagaactggggacactaaaatttgaatttcacataattttcacatgccatgaaacatttttttttcagtcattaaaaataaaaaccaggtgggtgcggtggctcacacctgtaaacccagtgcttagggaggccagggtaggatcacttgaggccaggagtttgagaccagcctgggcaacgtaggcaagaccactgccccaccaccccatctgttttaaaaattagctgggtgtggtgcgtgcctttggtcccagctacttgggaggctgaggcaggaggatcgcctgagcctaggaagctgaggctacagtgagccaagattgcaccactgcactccagtctgtgctacagagcaacaaacaccgtgtctcaaaacaaacaaacaaacaaaaaaccccaaatgtaaaaccatccttagctcacaagccacccaaaaccaggcgacaggcagatcagggtgtgagaccttggagctagagcaggaggcaggaggcgtgggcaccacagcccgcgagccctttgccgcccgcactgctcagcttgcagtcggcattcttcaggttccccctgaaggtttggcctcccccgtgggactctagtgggcagccactcccttggggtgtctgggacctggtggatgtgtcccagtcacatcttatsgtcaagaaattgtattaggcaaaagcagtacaaaagagcytctttcgtttttcctaatttccataaagcagaaagcgttttatgtccaactggcctctgttctgtttcaagaaacagtccctaaagcaagaggaggaccgtcccaagagacgaggaccggcctatgtcatggaactgcccaaactaaagctttcgggagtggtcagactgtcgtcttactccagccccacgctgcagtccgtgcttggatctggaacaaatggaagagtgccggtgctgagacccttgaagtgcatccctgcgagcaagaaggtagcgcggaaccagcttctctgacggcgctgctcttcgacccagcccaggccgccactgaattttgtgtctgtaatttttctttgacagacagatccgcrgaaggaccttaagcctgccccgcagcagtgtcgcctgcccaccatagtgcggaaaggcggaagataactgagcagcaccgtcgtctcgacttcggaggcaacaccaagcccgaccgggccaggcctgggygatctgctgctgagacgccacggagggctggggatgcgcctgcgtccgtttcgcgctggccggggctctgrgtgctgccctgcgccctgccgcacccgcggcccgcgcagctgcctaggatgttctgggctaatatacttgtaaaaccaccgcattytagggttttctttcattttcgttaagaatttggggcaggaaatactttgtaactttgtatatgaatcaaaacaaacgagcaggcatttctgtgatgtgttgggcgtggttggaaggtgggttctgcgtgtcccttcccagcgctgctggtcagtcgtggagcgccatcatgtcttaccagtgacgctgctgacacccctgacttttattaaagaataagctgtcgttrcagtattgcattttaatgttttccgagtccaacatgtgtccttaccagccattcctttattttagcttttgtgggcacacgaggggaattgattttgttgggaagactttggtgtggcttaatttttttttttttttttttttgagacggagtttcgttcattgcccaggttggagtgcaatggcgcaatcttggctcactgcaacctccacctcccgggttcaagggattctcccgcctcagcctctaagtagctgggattacgtgcatgcaccaccacgcccggctgatttttttgtatttttagtagagacggggtttctccatgttggtcaggctggtctcaaaactcccgacttcaggtgatcctcccgcctcggcctcccaaagtgctgggattacaggcatgagccaccgcgcctggcctggtgtggcttaattttcatttgaagaaccattcagaaaggaacacacacaggcgtgtcctcggagccctgtgtgctcctcagtgaccagcctggcgaggtggtgcggggcacagggcaggcctgaagggtctcttctgagcataggcttcaaggtgaccacgttgtcattttagctcctggtgctcagctgtctctggggagtatggagccctgcccctggcctgtcagtgggtgctttgagctgtttgctgagtgccaacaataagttgggcaccttgtgtcctagaaagagaaacctgtttccccatggggatgggaatgggaacattgcaaagaaaccgtggcactggccgggctgctgggcacaagaaaagtcctagtaagtcctcttgtttatctgggaaagtaacttagtaattgggtcttctttcttttttgtcatcttcccaaacttaaagagatatttttgaaaaaggctaaatttcccaggctagtagtgtttaagcctccttgctcccctgttgagacaaatctgtgacacccttccttcacgtgctctccagtggtcctggccccagccccaggccacctgacacgacagcggggccgcaggagatggaccgcgggccacgcrgagggagggcaggctggaggaggaggcaagggcggggagcgtggggcagcgagtccgtgggcacaggtgcccactctgcaccacatgggggcaaaggaacccaagaagaagggcagattccagtccggaagtgaggcttgccgtaatgttcagaccggaagtgaggcttgccgtaattttcagaccggaagggaggcttgccataatgttccagagcagggtgcagtgcaggcctttccccgggctccttttaaacccatttgagaccctggtgcagccttgagggctgcccttgctgtaggggaggtgtctgagcaggggggtggtgccgttctgcctctacagagggcctgggagtcccaggggagtcggacgtcaaggccgtgggcagagcccagcagcagggagggctgggggacagaaggctggggagatggctgtagggggggcggcgcgcaggtcacaagagagggacctgtgggtaggggagtggtggctaggagggccatgccctgtcccccggcctggcttcagggtcaggcatgttaacggattgagtgtgtacttgggaaacgtgttactctctttatgtctataaaatatgaagggaaagtctttacagttcttctgcaggcttttttgagaaagcaaatgtggtctgcagatgccggtgcccaggacaccagctgccctgtcctgactgtcacactcctcgtggtgggggcagcggggctgggggccctctggaggcaagaaacagtccctaaagcaagaggaggaccatcccaaggtccaccacttgaggccctcctggtttagttagactcgggcgtaaacgctctgaagcagtgtcgagcccggcacgccagggcccagggcagctgggcctccaggctggaggtgagcaggggaccagagcccagctccacaggccccctccatggaggagcggcggggtttgtggcgcacagcagggttcccacatcagcttcccaagtccaagggtggagattccgagggtgatgatttcctacagatttggagaaaagggaaatcctgccagccacccttggacttcccgccctgcacttggcccttgcacctgcctrctcttggcaggaggcgtcagggtccccaggccgcttcagctgcgtgtggttccctgtgtccgtctgggccctgtgatgggggccagggctgagggcagaggggccaggctggctcagcccataggaggccaccttgccctgctgccggggccccggcggggcctctgccaccccaaactggaaagctcgtgaaccctggctggccggattatttccattcttctgtgcaatgcaattgaagcgcttgaattatccccacagaacccagaacggaagcgaggatgaggcctcagccgtcctcctccccattcaaacacgttcatccctcaaccctctgctgagcacctgcrtgctgcccggccgcagtgtcacccttcttgtgtgagcctaccctcatccacccacctcaccctcctgaccttaaagaagacaccgggcagaagcacaggggagcccagtcacaccccacactggcgggggcaggccttgcagggagaagcagtaagcagccatctccatcagccatttccatctggcactcagacgtgcacgtcttcgtgtgacaggcggcagcagtgcgaccgtgacctcccatctgctctgctgtccccacacctgcggtgcagccagcctgccacaaggcagctagagtccagctagacccacccctggcacggccgacctcttcctggcttcttctgggcctaatccccgtgcattctccaacgccagaagtgtaagaaagtgcaaggcaacaagtgagaagagcaaacccaaatcgtaccagggaagctagtctttccagggcacctgagtgagggcatgaccagccttgacgctgcctcgctaccatctgcccagggcctgctgaatgcttgagtccatggtgacagtggtgggaacagttacgaggcagttagattttggaagtcatgttggcccacttggctacagagcagtcttaggaacagcaccataaaaataaagacttattcctgacacacatgcatctagagtaaactggggcgtatctgacagcgttagtacagtgatggccaaatgcaaactgcattccagaaccagcgaagggtgacagactgggctgaggcagagctaggactaaccatctcgagtgatgccatctcggggccarcaaaagttttggacacggctggatcatctgaccaaactgctcaaatctttacacaattattgtcctggtattaaactttcacctgccacttccaacaaacaggagacagaataaggagatgaccaggaagatggctggattaagaattctagacttggccgggtgcggtggctcacacctgtaatcctagcatcttgggaggctgaggcaggaggatcgcttgagcccaggagtttgagaccagcctaggcaacataaggagaccccatctctacaaaatatcaaaaaattacccaggtatggtggcacacacgtgtgattccagctactcgggaggctgagrygggagratsrcktgaacccrggaggytggrgctwcartgagctatgatcgcaccacttcattccagcctggatgacaggtaagactctgycttaaacagaaaataattctagatttattttcaaaagtagttccttctgccttccaaatacacccgcagttcactgtagctgttttgggccctcctgggtttggcttcctgtataactgacagcacctagcaatcaacactttaagatgacagaaataccaaagtacctaaaacatgctaatatcttattttaatacagaggtcactctgcatgtgtctaattcatccattctgattctttcatttagaacagcaagtcttagtgtcttttattatttctctttctagaagactcactccatagttcatggccccgtgatccagagtccctgctggcgccttcgagtggggcaggctgagaactcaagctgtaactaatgtctcctccgaagaaaactaaaccgagggctgagctgatgtgaagttttccgtggctgcattcatacaaatggtgaaaatgtagcatacctcccctcaaaagcctgaaagtaaagacatgcccccaatttaatgtgatgaattagagaaataggtttcagacacttcatggtttaaagtctcacaaaataaagctttcgaaggatccagttgtatatgattttttaaaaaaataaataaacattcttctgcttggtagctgcacattctgttgggattccagtaactcgctgagcaggtgtgggatgccctaaactcagatgctcacgagctggtttcaaccaagtaagaaaaatctcaggtaaggccgggcgcagtggctcacgcctgtaatcccagcactttgggaggccaaggcaggcggatcacraggtcaggagatcgagaccatcctggctaacatggtgaaaccccatctctactaaaaatacaaaaattagccgggcrtggtggcgggcgcctgtagtcccagctactcgggaggctgaggcgggagaatggygtgaacccgggaggcggagcttgcagtgagcygagattgcgccactgcactccagcctggacaacagagggagactccatctcaaaaaaaaaaaaaaaaaaaaaatctcaggtaaacagtgtgattagctagttcatgtcccatgttcatactcactgtagaaactgtgttatgtgtggtcacaggctttcaatgacgaaaggaggactcggagttgtatggaaacgtgatcctgaagccctgtgcagacgtgcagctgcccacagtggccacagacagctgaggctgtgaggcgaccacagagcccacgccctcctgagccatattcttgaacagcccatctcaagtgtgactggtgagggggcttcaagtaacatggggtgaaaaagacaaaacaattccataccaaccagttcaacccaaatgtacaggacaaactaagccaatttaacagaagataaacaagcrgtatattcaagatagttttaatattaacttttgtgaattagaaatatcactcttaaatgatgaaaattactagtgaagtaactattttccccaattgcagaattacaatatttatacatataatacagagttgattgcattggaaacaacagtttattttacgtaaaataaacgtcaacgggtaaaaagggcatcttcacgccgcacctcagagggccatgagtccttacacccatctgcaaagtaactttccaccagcattcaactatttttaagtgcaaacaattttttaaaatctgtgattgcagcgtctgtcttcctgaattacattacgtcagaaagtaacagttttctctatgagtgcattcaaggttgtcttctgaccacctaaggtatagaaaaatcagtgcaaaaacagtgaagcactataacagctgaatttcaggggatttcttgtccaagaaacattttattttacactatgtatatatgtatatattatatatatatgaaatttaattacattgaattttagagtaaaaagcaagaaaactccatttcttattttttactgcagccccaaaagaccggtttaaaatggaaacaacttctttgggtgagcagcgggagcacggcgccgcagagtgagccggtcaccgtccacacggctatcgccgacgtccaccgcctgaggtccgccggctggcacggctcaggcgcagctcggagctcctcctcgtcactccctcgagtccaagtcccgggagactgtgcgcgcagcagtgaggtcgctacactacagttccacctggagaactggcctggcttggggatgacaatgagccctgcaaacaaagcagtctacattaatccagcaaaacaccggacgggcaacagccaccatgcgcgccctccgccagcagctccacgtggtcaaaactggtgctgttgatgtggaagccagtgtgggagcaaaccctccacttcatctatttaattcctatccagatcactgcgttccattcctagagaattggaaccctgctgggtgcaatactgtggcctcaataccgtccaagagaagggcgggcagggctggccttgcccttgggggagacagtggtttctcagcacctgagaacaggttctttggagctttgctgacccaaaggtgcaggtgcctcgtgggaggtgttcagcgccttcagccagggttgagcccagggcaccgcagttctggaccgcacacccagtccctcggagccaggggttgtctccaaggatagagttcagtggcacctttgaaagggcattctctgctggggggttcttgctttgttgggtggtgtgaccgtggcaccccctggctgtagctgtccacatgtgtaggccccacaggtagagacagcagggcccaggccgaggtcgggggagccccagaacaaagtagtcttgccgtgaggctgcagctgggtgtggagaagggatgtgggggccaacccaccagggccagcaggaagaatggtggggggcatctggctctttagggcggctcctgctgagaggctcactgtcgggggcgggggcggggaatctcacccagattttacaatactggtgtgaccttgggtaaacctaagagggtttaacctcctacacagcaaagagtacttccatttctttgcatttactattgagcagcaattacattacatcaaagtgtggcgttcatttatgaagaacattaagatggcgacagtgcagccccaaaggtgcacattttcagctctgggaatacaacttagctgtcatggaagaaggcttcagctgatgagtactgtttacaaatgacaagcctttaactcaagctgacattgctaccttctcacatattggacttgtgtggacacaaatgaaggtgacaatcggaaactgcccttcagcctcgcccacgccctgctgccggaagcctggaagcaagctgtcccgctcaagtcatttcatcccgtttcttaccttccacctgaaatctgttcacctagacaagctcaggaagcaaacggaatgtggcagctgcccctgctcagagtctataggagtgcttttcctctgggacccctgaaaagggacagaaccctgtttgtacttgtggaggaccccgcaaacgccccatacttctggctcaaacacatcaagcctgtggaggaaagctgggcagcaggttcctgaccccacttctgccgcagacagtctggaggaaggaagcctctcacacaggacactctgccttcatcaccacgcgcaccctaagaaagtgctttccacaagctatgtggtgtccaggaagtgacaaatctccagaaccaggaggcacctcccttccccccggcaacagaaaagtcatctactcctggcagagggagaaagtggtggtgacccagcctggggacagacggagaggggccaccctcatctggcagccacagagtctccctcccctttcacggagtgccaggtggaggtgagtgctgctccaggtaggaggcagccccacccacaggaaggtggtgtctctaccagtcctgtgttaagtttagcttcccgggagcacgtttaacaacttaaaaacaagtgacagccagccctgtgggaggctgaggtggggagattacttgagcccaggagtctgagaccagcctggccaacatggtgaaactccatctctactaatacaaaattagccgggtgtggtggcgcacggctgtcatcccagctactcaggaggctgtgtggcaggaggatggcttgagcccaggagatgcagggtgcaatgagccgcgatccactgcactccagcctgggggatagagcaagaccctgtctcaaaaaatgaaaagatagataataaaaacaagtgacattaattttaatattttctttttttttttttttttgagacggagtctcactttgttgtccaggctggagtgcagtggcacgatcttggctcactgcaagctccacctcctgggttcaagtgattctcctgcctcagcctcccaagtaccttggactacaggcgcctgccaccacgcccagctaactttttgtagttttagtagagatggggtttcactgttaggatggtcttgaagacctcctgacctcgtgatccacctgccttggcctcccaaagtgctgggattacaggcgtgagccaccgcacctggccaattttaatattttaactgaagatgtttcatataatattcagcaatataaaaattactaatgacttttttggtaagaagcctttgaggtgtgctgtgtggttgacacgttatggcacttttcaggttggactggccccaatttacatacttagtggctgcaggtggcttctgacggccatgagggacagcacccttccttagacttcctctcactgagtgtgaggccccagaggactcggctgctttccatcactcccaggggagggcggctgctgagacgcagaggtggcgcagccaccaggctgccagagcctgatgttgagggacacgctgcttccgccagctggtccctacaaagccgcacccctagaaagcgacccaacgcgagggctgcaggcttcctattctcccattagcacaaaacaaatgcacactcattctccagtttctgctggctaacgccttgatgccaattgtggtggcagctaggagccaactagaaccaccttcatgccctccactgtcccactctccactgggcccagcttccagagagatcttgaatcaaccgccctcaaacctgtcctcctctcgtcttctgtagtccatactggcataacggaactgggggttcccgttagcaggcttcgcccttttgatggcagccctggttaacagttcttttagaatgcatcgccatgcagagaatgtgcccatgatcaaaactcagggtccccatgctgcagcactcaggaagcacgttggccaccggtgaaaaacccaagaggaccccagggtgcttgaccagggactccctggagcccgcccgtcagagcaaaggggaaaacggtggtctctaagaggagttaaccggaaggcgaagcgaaggcccaaagggcccggcctccagttctccagcagtgaccccagcaagccccaggagacagtcctgcaggcacaagccctggagtgtgctgggcctgctgtggccctgcgttggcatcagtgccaggcatgcccagaagcagggggtgcgacacagcactccgggtggcagggaaggggcctcggcgccctgcatgccgctgaggacttgtgcgagtcactggacccttcatcttggcacctgtcacttgctggagatggactcactttgccgtggtgaacactggaggcaacaggaggaaaaagcgccattcaaaagagaatcaaatgaaaaaagtcaccttgtttctatctgcctgtgattcagtctaaagattatcaggtggtagaagaggaagacgagaaacagacacctaggcccccatggaaggatcccggctgcagcttccctcgagagcacagcgtgggggatccactgcccaaatggtcatccgtgtcaaactcccggtgacagggaccctgctgccccaatccgcctgctcttcagggagggagtggggttttaccctgtccttctgcttccttttcatgggagaaaaggggcaaggcccggcccggccgacggaggacctggcaaggggagcccgcccacgcttcacctgtgctcagcagcgtgcgggagctgctgggctgtgcaccagaagcaggacagctggcaattccaggctttaccagttgccatcaggcaaaggagctccccaggcagaatctgcacggcgtcccatcagcccccacaccgtgagaggaacggggcaagccttggctctaatattagtcagctgcttggctccccgcagagtcactgttttattcccgctagagacttcagttcaaaattaagtgataaaaaaatactccagctcttggtttgggtttgattctaatttataatactaagttaagagaattacaccttgttgcaccagaatatatatgaaaaatattttggttcaaaacaatttacaataaagcagcaaggccatgttcctgcccctgcaggtgctgctcggactggagattctgacagccagataggactgtgagggccacaggccacgtcagagaaaggacatgtcctgaagctctgtcaggcctggacggtctcctagctctgggttctgggagggcttccccttctgacccccacgacccctggcctgtgagtgtcagagaagacagaacctcaaggagacagctgtgggatgtggatgagagtgtgggctgggcgccagctcatccctcatccacctgggactgttcaataccctctctggtcattcaacccccaaggtcaccctttccaacccaaacaaaagtaagacgcacacaggccctgggacccgtttcatggcaggcacgcgggcgggcagactagcgcttctctcctgagatcgtggacaaagtaccacaagacagaatctggttctacacagcca

SEQ ID NO: 8764 - DNA, 99110 bp, Homo sapiens
gaggctgaggcaggagaatcacttgaacccgggagaaggaggttgcagtgagccaagatcgcaccactgcactacagcctgggtgacagagcaagactccgtctcaaaaaaaaaaaaaaaatccaaatgtctgcagtttagttactagtattgtaccagtattatttttttagtttaacaaacataccatgatcatcatggtcaacatttaggaagctgggtgaaacaggaactccatactatctttgcaacttttcggtaaatctgaaatttttctaaaatgaaaatttattttaaaaagttaatgtgggccaggcgtgatagctcacacctataatccctgcactttgggaggctgaggtgggcagatcatctgaggccaggaattcaagaccagcctgggcaacatggtggaaccccatctccactgttatacaaatataaaaattagttgggcatggtggtgcacgcctgtagtcccagctactcgggaggctgaggcacaagcaatcgcttgaacccagaagacaggggttgtagtcagccgagattgtgctactgcattccaccctgggtggcagaccgagaccccatctcaaaaaaaacacaaacccaaaaagttaacgtgaaaaaaatccatgatccttatttttcctgatgcatttgggtgtttgtgtgtttatatatatctatcttttagagtataatttctttgaggccaaaggtataatgtgtatctctttggtataattcttaaaatattagtaaaattttcagaatttaaacattgaacaatcaagttcggtttttctgaagagccctaagtagaacagcttttcaattaaggtctctggctgctgtggaactggagggtaattggtgagagtctcctctctggggcctgtcaacccaagagtaatgacttctggccacttcagacctgaggtaatttcaaaccagcacaagtttccatttgttctctttatctagtctgctctctaagttcagttattcatgtggttcaattaccccgagatctcaagggagagaggcagggatttaagaaggaaaagaacagacacagctccatattttatgtggcatacaatatgtaggatgtatgatacttctgcacacaatggtggttcatatcagtgggatgtggtggctcacacctgtaatcctagcaccttaggaggccgaggtgggtggatcgcttgagcccaggaattcgagaccaacctgggcaacatggtgaaaccctgtctctaaaaaaaaaaaagaaagaaaggagactttataacaattaaaaaaaattccccccaaaatcatctgttcatcagtgaggatctgcagatgtctctgctttgtcccatgcatatttgtcatttttctaaaaggttgattttgcccgggcacggtggcttatgcctgtaatcccagcactttgggaggccgaggtgggcggatcatgaggtcaagagattgaaaccatcctggacaatatggtgaaaccccgtctctactaaaaatacaaaaattagctgggcgtggtggcgcatgcctgtagtcccagctactcgggaggctgaggcaggagaatcacttgaacccgggaggcggaggttgcagtgagctgagatcgcgccactgcactccagcctggcgacagagcaagactccgtctcaaaaaaaaaaaaaaaaaaaaggttgattttttctaaaatgggttaaaatttcttaaccaaaaccttagaaattagagttcttggcacatgactttgtataaagtcctatttttcattaagtggcatctgttgtcttatttgtgggttgactcatacttaaagcgactgctttccacagatttgttcatcagcaaaaaagcatacaaatgcaggaataattaccattttagaaacagtgaggatggctctatccatctataaaaactggtggggttggtgtaagacaaaattggctaataagagaaatagagctagagaaatagatagaaggaaacaaaacacccagccagaaccagttagttctctggtcatttagacaaggttttactggtacttgtgtgggtttggtagttaactgcagaaccatatgtggctcatgtgtttaataactgcaaatgtttactcttaaattcacttgcggtatctaaattatgaataattaattccacagcatgggattggggaacctcaggaaatatttttaattatctttattaaatcctaaattaaaagcatcacttcaggtgttaagaacccaggatcccatcaacttgtttacgtatttttttgaacagatgatagtggctgtgtaacaaattacccctaatttaggagctttagaaccacgaacacttatctcccagcttctgaggctgaggaatctgggagtagcttagttatagtcagatggtaggtcaggggctgcagtgatcttaaagcttgcctggggctgaattccttccaagctcactcacatagtctttggcagctccttggtgtttgttggctgctgacctgttctattggacctctccatagttttcctgagtgttctcatgacatgaaagctggcttcccccagagtgtgtgattcaagaggaaacaagcaagcaagagagcacctgagatggaggacagagtttcttgtgtcctaacctcagaagtgacatcacttcggctgcatgctagtggtcacagaccaactatggcccagtgtagaagaggaagcaggcatcattgggggccatcttggaggctgggctaccactgtggctgtcaaatctttgaggtatttatactctattggaaaactttaaaataatgacctaacagctttaattttaaatgtcagtatttatgctgaaagtttcataatttgctactactacgctaatgatgaaaaactttaaagatacacctagggggtatatagttgtttttttttttgagatggagtctccctctgtcgcccaggctggagtgcagtggcgctatctcggctcattgcaacccccacctccagggttcaagtgattctcctgcctcagcctcccaagtagcttggactacaggcacgtgccactgcgctggctaattttttgtatttttagtagagacggggtttcaccgtgttagccaggatggtcttgatctcctgacctcgtgatccgcctgcctcggcctcccaaagtgctgggattacaggtgtgagccaccacgtctggccagggggtatatagttttaaaaaattattttggtgctgagtgcagtggctcatacctgtaatcccagcactctgggaggccaggagtttgagatcagcctgaggaacatagcgagactccacttctataaaaaaaatgtaaagattagccaggtgtggtggtgcatgcctgtggtcccagctactgaggagggtgaggctggaggattgcttgagcccaggaggtcgagactgcagtgagctgtgattgtgtcacggtactccatccttggctgcagagccagaccgtctcaaaagataaaagagccgggcgcggtggctcatgcctgtaatcccagcactttggaggccaaggcgggcagatcacgaggtcaggagatccagaccagtctggccaacatggtgaaaccctgtctctactgaaaatacaaaaattagctgggcatggtggcgcacaactgtagtcccacctacttgggaggctgaggcaggagaatcccttgaacctgggaggcagaagctgcagtgagccaagatcatgccactgcactccagcctggcaacagagcaagactccgtctcaaaaaaaaaaaaaaaaaaaaaaaaagataaactaattaatctatccagtgcccctcttaccatattcctttggctctttatctcccccacgtggtgctcttttatcttaaaagtatgcacaattgataaatgaaagatgaactgcaaattggaataatttgggtcctgatttgtgaattgaaaagattacttgaaatttggaatgtccctggaaatctaggacttctggttattcaggccaggcgcggtggctcacgcttataatcctggcactttgggaggccgaggcgggtggatcacctaaggtcaggagtttgagaccagcctggccaacgtggtgaaatgccatctctactaaaaatacaaaaattagctgggcgtggtggcgggcgcctgtaatcccagttacttgggaggctgagacaggagaatcgcttaaacctaggaggtgttcagtcggttgtagtgggccaagatcacgccattgcactccagcctgggcaataagagcgaaactctttcccccaccacccccccccaaaaaaaagaaaagaaaatggatcgggattttttttttaaacggcatttactaaacagctaagtaccttctatgagcaaggcactgtacaagagctgttggggataccaaaataatacaatctacgatctactaaagttacaagccggacagtatggtgactggatgttcagaaaagaaaccagatgacattattatggtacaccaaaaaagccccccaaaaaccgtactcaactgtcacattcttatggaatacaatttttacagattgtatacaatttgcatgtgaaattctgcttactttttgactaggtatgccactaatgggtatgtttaataaagatattttatacttcagatgtacagaccaggtccggttaattttagccaacaatgtattgttgaaaaagacgctgatattttactgcggcaaaccaccattaacataaattttaaccacagtttgagtattttattaggaataagccttgaaacttgaataggactagtattcctaacaatttaccgtttcataataaaggctgtctcactcttaagtggaaaacgtattatgtcctacttttataaactttggttgaactaaataaaacagcaacatgtacccaacgtttttagactgttttattcagtaccataaacattcactaaactatacagagctaaaatcatgcaaaagattgcaaaacaaactgccttgggaaatttccagtctaagctaaatggaccaagtataggattgaattttaagaagttggtgggaagattccagctcttgtactcacaggtaaggtcctaggattctatttgttgaagtgtctgcagaccctctccctacagcaggggcgtggagcaaatgtgcattcaggaagtgcttattagtccccccaaaacctttttcgtgacgacagacggatggaggcctcagacgactccggcagtaggaccctgaaccaaatgcctgagctgcgctcgaaaggctcgtctcgcaggagctggcgagtggcacgggcttcggtggccgggctcggggctcggggctcggggcccggggccggggggggcggggggtccgtgcccagggcactctgtggctcgattcatgtccccgccctcccacctgagcacactgggcagagagcctgcggcatcgggccagtcgcgcctcctcgtccgccctgggcaggtcgctgggccccaggccgctttctacagctcctttaataaaatggacagcaggggtcctaaccagacgtgggcatcaagacaaaggaggcggccagacgcgcttgagggcctgctcgctagctcccgcccccccattccgcggtcacccggggacagaggccaggccggactgggtggagttgggactcatacgtctgcgtccaggaaggcgccgggcgagccccagctagacgtgacgggcggggccgaacacggcagcggaccagaggcccgcggcgcaccggcgtggggcggggcaagcggagcctcccgggatgccgcgcggcagccggcttccggctgtgggtggtgcgggggacagcggcggccggaagctggctgagccggcctttggtaacgccacctgcacttccgggggcgtcgagcctggmggtagaatcttcccagtaggcggcgcgggagggaaaagaggattgaggggctaggccgggcggatcccgtcctcccccgatgtgagcagttttcckaaaccccgtcaggcgaaggctgcccagagaggtggagtcggtagcggggccgggaacatgaggcagtctctcctattcctgaccagcgtggttcctttcgtgctggcgccgcgacctccggatgacccgggcttcggcccccaccagagactcggtaaagacccaggggagttggcttaggccggcgcctggagcgctcgtttgagggaagagcaggggagctgggtctatcaggtgtttgggggcggggtattggcgatggtggcgcgtccctaagttttcagtgtagaagggggtgtggctctcggagtttggggaaagaataaaggagatgggcctgtctctgagtgggaaagggctactggacgggctccatgtagtgactgagcgcctgagaggggtttgctccctagctttgtgttcggggagggtgttgggaaagcggtaaggagtagggtggctggatcttgtttggagagggagatgtggtcagggttcttgccttagtagggaacaaatctagtgttgtgtgttcctaccagagccagaaaggaagggcccaaagctccagaattcttcctggtcctcgaaggagggaactagaatttctgctgtaggaggtacttatgcagtaatctcgttgggaggcggagactggagttggagtcttaagagttgtgtttttgcgaacatcctaagcacgttcttggttatttcaattgtagcttattggaggtgcttgggagatggggggaggcggaaacctggtaagccaactcgtgatgctgccactatgaatgctttccttgcacttttaaacaaagaaattatcaagagtgacgagtttgatgaatttagaggctagaaagtagagggttcctatttcattagattttccagagagattggattttaaggatggagatgcattaagggatctgaactttggtggaagtaagtttgcgtgaacttttagtgtattttaaaatccttttatctttcaaaaattgacgtgtaagatactttaattagtaataaagtgtgaaataatgttttcccagtgtgtgaaattgtaggcttgcatggttgtactggttcccaaatttcaccatgataccatgtgtagtattttttttctttatatttagtggacagaaattgtaatggattggtatggatactaaaggtgttgagagtgttatcacttgaacagctgtcttatgattctttccgattgaaatggattacaagtgactaatgaaaggcaagggatcttgttaggaagtgctgagaagtggtaagtcagtacaaattgaaggacattttgaggtaggattgtggttaggatggagggatagggtaagggtcttcattttaaggataaatgttagtaaaaagaataaatatgtattttgagatattaaaattatatttgcaccaccctgacacaactgtttcacttatgttattaatctgttgttcgtaggtaaaaataagcatgagtcccaaggaagcatacagtttaaagagaaacattactttctagatcaattcataacatttgcagatcgtaaggttttttagaccattttttttttccaagacagagtcttgctctgttgcccaggctggagtgcagtggcgcgatctcagctcactgcaacctccgcctcccggggttcaagcagttcacctgccttagcctcctgagtagctgggattacaggcatgtgccaccacgcccagctaatttttgtattcctagtagagacggggtttcaccatgttggccaggctggtctagaactcttgacctcgtgatccgcccacctgggcctccctaagtgctgggattacaggcatgaaccaccgctcctggcccatgtgtttgttttttatttgcaaaatgcagaccayctgtgccagaagaatgcatagacttttcttttttcttttcttttctttttctttctttttttttttttttgaggcagtgttttgctcttgttgcccaggctggagtgcaatggcgtcatctcagctcaccacaacctcygcctcccgggttcaagcaattctcctgcctcagcctcccaagtagctgggattacaggcatgtgccaccacgtccggctaattttttgtatttttagtagagatggggtttctccatgttattcaggctggtctcgaactcctgacctcaggtgatcagcacacctcggcctcccaaagtgctgggattaaaggcttgagccaccaggcccggcctctttttttttttttaaacgaaatatttgaaggacacacaagtattatacgtggcattggaaatacaaagatcagacgatatccatcttcaaatggttatagcatagggaaatagacattcatttaggacacttctaaaacagcatagaggagagtgctagagtacgttatagcaagtgttatcaccaaatgaatcttagagatcaagtctagttttcaaataaaggaggaggaaaatgagtctcaggaagatgctgtcagttgtcaatgatgaacataggccttgtgggtatttttcttttgaagaatgactttttttttcagtttgtttgacagcttacaatataatttgttacttaaccttaccattagattgagttggtcaagactrgcaaatagtttcatagttgaaaaacatgctttattatttattttttatgtttattgtcctacaaatactactatattgcagtactcaatatcgattaggcatatgacaacatttttctgaaaggcaaaaaatacctaataaaatgaagcctggtttttagagtcctctatgggtcaccaaaaatgatttcaattgaactgttatgaattgcataatttaggaaagttatgagtcatatgagcttagtcatgatgatatcttgttgaagttgcagctggggtgtataagtctcactttgatttcaaaatcgttttccctttgtgttacttttaataaaagaggatgtagtgggtgggaggaaaaaatataggtcacagatgagggatgagaaagtttgtatctgaaacatgtattttcaaatttaccttgaggttattggcatggggattctccatattgcagtgctgatttcattattgacagcaccattttactcagtattttgacatctggctttctcttttgatgttaattttgcttactggctgcattcctttgaaacctaaatgcttaactgccctaactgctccaagggagatttaatgtaactctgctttatattagtctaagagataaaccatatttcaagagtagaatggagaggaattaagcagataattgtgatggggaaactggagagatccttttgactttcacaggatttcctagaacattaaatataggtttcctccaaggccaattgtggttgatttttggatccttcaccattttctatttgtgagataataagtgtatacagctggaagtgtaatgtgaagaaagtctgaaaaagattgataggaaaggaggacaggaatgggcttcattgaggtaacggaagtgaaatgaaaggcttttcatatatgggttgagcatccctaatctgaaatgctccaaaatttgaaactttttgaatgctggcatgacagcacacattacccctaacacacgattttttcactgttagtggtatattttttactgtgtagtacttatgtgtgaataggtataacaaaacgattacttattgtagcatgtaaaatcagtcaggaatgatggtgatgccagacaaccacagattatttatgtgggtggccgagacagtgacacctttgctttcgaatgcttcgttgtacacaaactttttttcatgcaaaaaaagttacttaaaaatattgtttaggccaggcgcggtggctcatgcctgtaatcccagcactttgggaggccgagctgggtggatcacgaggtcaggagatcgagaccatcctggctaacatggtgaaaccctgtctgtactaaaaatacaaaaaattagccaggtgtggtagcaggcgcctgtagtcccagctactcgggaggctgaggcaggagaatggtgtgaacctgggaggtggagcttgcagtgagccgagatcgcgccactgcactccagcctgggcgacagagcaagactccatctcaaagtaagtgaataaatgaaacataaatgaattttatatttagacttgggtcccatccccaagatacctcattatgtatatgcaaatatttcaaaatttaaaaaattctgatgaatgaaacacttctggtctcaagcattttggataagggatgctcaatctgtatctctttatttactcctaaaatcagccaaggaaatgggcatctctccgttcccccccttccttttttttttttcttkgttgttacatgagttgtactggtttcacttcatttgacagtgttctgctaatgactagacgtgtatctctgacctggactkgttctctggagttcatattcagctgcccattkggcacttcaaatataacatgtccaaaattagttaccttttttttttttttgagacagagtctcactgtcacccaggctggagcgcagtggcgcaatcttggcttactgcaacctccacttcccaggttcaagtgattctcgtgcctcagcctcacgaatagctgggattacaggtgtcccccaccacgcctggctaatttttttttttttttttttttgtatttttagtagagatggggtttcatcatattggacaggcctgtgttgaactcctgacctctggtgatccacctgcctcagcctcccaaagtgctgggattacagacgtgaaccactgccccagccagttacctattcttttgattacaagaatgagtagctggacacagtggcttacacctatagtcccagcactttgggaggctgaggccggcggatgacttgaggccaggagttcaagaccagcttgaccaacatggtgaaacctgtctctactaaaaatacaaaaattagccaggcgtggtggtgcgtgcctgtaatcccagctactggggagactgaggcaggagaattgcttgaacccgggaggcagaggttgcagtgtgccaaggttgagccactgcagtgcagcctgggcagcagagtgagactccatctcaaaaaaaaaaaaaaaaaaaaaaaagaatgagtatcggatacaggtttagcctaggactaggcagggctgctggtaattgtggaagtagtctcattgcctaacctgaaacttgcatcctggttactggtcttgctggagagtcttggctcaggttacgtcccaggtctgttgaggagctcttgatagggaattagttgaagcagctcatactctatcctcctttactggtataaatccataaaattgtttagttcccaggctctggggtccctggcctagcagagagcactgctccctttttctcattccttagtcccaacaacccgcacctgacacttactacacgtggcctgcttccctgtcctgtgtgttttggggrgtgctgaagaggaaggctcctgtgtcttcagcacaaacacaataaacacttcacagcagtactggctttatgttttccatttctgatatcagaagtaggagcatgacattgatagtgtcattttgggggaacttttcgtacttcatgcagcagagcagtgaagagtgagctgagtgccttggggttctgcagtacactctcaagtagtattttaggaaaatgcaatttgctgaaaaaataaaagaaattaatgtaaaaaatccacaagctgggcgcggtggctcacgactgtcatctcagcattttggaaagctaagggggaaggatcacttgagcccaggagtttgagaccaggctgggcaacatggcaagaccttgtctctacaaaaaaatagaaacaaaaattagccaggtgcggtggcatgtgcctgtggtcccagccacccggaggattgctcatgcccaggaggttgaggctgcagtgagtggtgattgtgccctgcactctagcctgagcaacagagcgagaccctgtctcaaaaacaaaacaaaacaaaaacccacacgtttccagaaccttctcatataacactttatttacattgttcttaaatacgtgtgggacggttatatacataccactatacttatgtgtatatatgttgatatacacacaaaattatatacataatttttgtttgtttgtttttgagatggagtctcactctatcacctaggctggagtgcagtggcgtgatctcagctcactcactgcaacctctgccacccgggttcaagcgattctcctgcctcaggcttctgagtagctgggattacaggtgcctgccaccgcgcctggctaatttttgtatttttagtagagactgggttttaccatgttggccaggctggtcttgaactcccacccttgtgatccacccacctcggcctcccaaagtgctgggattacaggtgtgagccactgtgacctgccatatacataattttttaaagtttcacgattagttttagcttaaaaatgtcagctctgggcttaatgaagaaaatatggatatactttatgtcaatgcattaaagtgaatggccataaaagcttatcccagagacaaaacaattcagatataagagaagtgggagagtggaaggtttatctaatcttctgtaggcaactccacagctacaaccagaaggccattttgttacaggcctgaaagccccgttttctttttattcttctttgaaacctttagaaggaacaaagtattggctactttttaccgctgatgtcagtgttaagaatcttgtgataacatagatttactctccctgctgaaaatcactatgtggctcatcagtaacacaactagacatgatgacttaatgcaaaggaagtcctatgtaaatgagcaatgaaattgcaactgtgtataaggaacaaaatagaatatgaaactccagaatcttttgttttcatttctgtttctcccaaggctctatcattcaaaactccagaatctttcagcatgcaattgtctcctgatatcagcccctctcttgttttgttttcttttttttttttttaatcacagtgagccacaacctaggagtcttttagtggtttctacttggtttgctctgcagcctaccagcagatttcctacattccggtcttgttcccctctagcccattctccacactgcagtcataatgaaatttctttcttttttgggggggatggagtctcactctgtcacccaggttggagtgcagtggcatgatctcggctcactgccacctttgcctcctgggttcaagcgattctcatgcctcagcctcccaagtagctgagattatacgcacctgctaccacgcccagctaatcttgtatttttagcagagacagggttttgccacgttggccaggctggtctctaactcctgacctcaagtgatcgcccaccttggctttctctctctttttttttttttggattttgagacaggatctggcctcgttgcctaggctggagtgcagtggcacgatatcarctcactgcaacctctgcctcctgagctcaagccatcctcccacctcagcctcctgagcagctgggactgcaggtgtacaccaccacgcctggctaatttttgtattttattttatttatttttttggtagagacggggttttgctgtgttgcccaagcttgtcttgaactcctggggctcaagcgatctacccatcttggcctcccaaggtgctgggatgacaggcatgagccaccacagctggcctataatgaaatttccaacttacagctattgccattatccaaagcccagaatccctgatttccttccatagcccttcatggcctgaccagtgcctgactctccagcctcacacttcatattctctctgtactgctctgcactgtagcctcattgagttgctttcacgtctttaagtgttgtgttctattttttgtggaattcagcatatgttatgcccttgacctaaggcctctcctttcttttccttctctggggtgctgcctcatccttctggtcttcaaaaccgtttccctgggaaaacatctttgactcagcaggcagggatcatgcccctgctgtgtctgtgcataactttctgtggctacttctgtcttggtctgtgatgtactttataataattttggtctttcctccagtgtcacaatactggaagtctgtttctttttctctgtgttgtatccttagtgcctgaaaggtaggaggttctcaataaatatttgttaaataatcaagtaaatggagtctggtggaaaagagaaaaaataagtgtagaatgtgtgtgcaagaaaggaggggtagggggatgaaaaagataacaaaagcacataacaaaacaacaaaaagcaaaaacaacaaaaaatgcagatgacaaaaaagataacaaaatgatgactgctgtggcaacttgtagaaagtaaggaaggtgctctcattctagagagaagtaggcagccattgtagttttttaaagagagaatatgggctgggctctgtggcccacgcctgtaatcccagcactttgggaggccgaagtgggtggatcacgaggtcaagagatcaagaccatcctggccaacacagtgaaaccccttctctactaaaaatacaaaaattagctggataggtggtgtgcacctgtagtcccagctacttgggaggctgagacaggagaatcgcttgaacccaggaggcggaggttgcagtgagctgagatcacgccactgcattccagcctggcgacagagtgagactccatttcaaaaaaaaaaaaagaatatggccagacactgagctgagatagacagtgcggcagtgtctggtattaactgtaataaactctactgtcagaagcaggtggtttatacttaagtttattgagagaattggatatggataagagataaactcttgggaaatggggagaaatataaattctgttgtaaagcctgtaaaaaattgagattactagtggttagaattttggaagtgaagtgcagtgaaatattgagtacctgagaggttacttgttagtgaaaacacaatagcagtagtacgtagctacagtttggctccaaaggargaactgtttttactatagtttgtaatggcttcagaatcttcaatttgagatatccagttattaaaagagaatcaattgcagttgaaatgcattagtyaagtattttaaagtgctttagcaagctacatttaaaaagtgcttattatagaaaatatacccaaaataaccaatgatgttactgtcttgtgcttattttttctagacctatttttatacatagttaagattatacaatatgaatatttctgaaatctatatttaacattataacatatgtatttttccatgttctttctttttttttttttttgagactgggtctcatcctgtcacccaggctggagtgcagtggtgctatcttggcttactgcagccttgacctcctgggctcaagtgatcctcccgcctgaaccttctgagtagctgagactacaagcacatgccaccatgcctggctaattttatttttactttttggagagatgagggtctcactattttgcccaggctggtctcgaactccttgggtcaagcaattctctcaccttgacctcccaaagtgctgggattacaggagcgagccaccgccctcagccccatgttcttaaaaaccttttgtraacgacatttaaaatagttgcagattttttcccctgtctttggaagtgttacaacatccaaccatttcacagttactaatttaccatcattctggtttttgtccttgaaaataaggcaaggctgaataatgaacatctttgtggctaaagtttttttctttactttgagttgttaccttcctttagcttagttcagtggttttttctttttcttttttgagatggagtcttgccttgttgcccaggctggagagtagtggkgtgatctcggctcactgcaacctccgcctcccaggttcaagcagttctcttgcctcagcctaccgagtagctgggattataggcgtctgctgccatgcccagctaattttttgtatttttagtagagacagggttttgccrtgttggccaggctggtcttgaactcctgacctcaggtgatccacccgcctctgcctctccaagtgctgggattacaagtgtgagccaccatgcccagccagttcagtgattttcatatttgagtgtgtcagccttgcctggaagccttgttaaacacagactattggatcccactgggcggatttctgtttgagcaggtctgaggggagacctgagcatttgcatttttaacaaattcccagttgatgatgatgctgctggtttgggaactacactttgagaactactgggctatattattgacaatgaaactataatgttgaggttaagttcctaagtcagtaggagtgattatgatcttgaatgaaactgagttcatgtaccaacctgtatcagggaaattgaagaactaaaggaccatattgcatttcagcactgagaattcgtgcagtttgtgaacatgtgagtgctgatatgtgcaaggtttttgctgagtattgtgaggcaaggatgttgtaatgaataaaaaatagccctttttggctttttttttcttcttttgagatggagtcttgctctgtcgccaggctggagtgcagtgatgtgatctcagctcactgcaacttccgcctcccaggttcaagcgattcttctgcctcagcctcatgagtagctgggactacaggtgcccgccaccacgcctggctaattttttgtattttggtagagactgggtttcaccatgtttgccaggatggtctccatctcctgaccttgtgatccccctgccttggcctcccaaagtgctgggattacaggcgtgagccaccgtgcccagcccggccttttttcccccgcctagagatggagtcttgctctgtcgcccaggctagagtgtagtggtgcaatctcagctccctgcaacatctgcctcctgggttcaagcgattctcctgcctcaaactagctgggattacaggcatgcaccaccatgcccggctaattttgtatttttagtagagacagggtttcaccatgttaatcaggctggtctggaactcctggcttcaggtgatccttggcctcccaaagtgctgggattacaggtgtgagccaccatgcatggcctcatttgggaaacttttgatatcagaatcttaggtttttcattagagattgtcagatttccatattcctctggaaggtaaaggcctaattgctagcattctggaagccagttagggtaggagggtaggagggtagggtattgggtagaggataaagaaggggtttgggaaaggtggggggtgtctcttggcagttgtatggttaaattgartttttgttttatttagtgatatgtgttttttgggtacatgtgatattttgatacctgtgtataatatgtagtgatcaaatcagggtgattgggatacccatcatttgaaacatcttttctgtgttaggaatattacaagtcttctagctgttttgaagtatacaataaattgttaactataatttctgtactgtactatcaaatattagaacttactaatcaaactgtatttttgtaacactaaccactttctgttcatctccaccactcccacttcccttctcagcctctggtaaccaccattctgctgtctacctccacgagatccacttttttagcttccacacatgagtaagagtctttcttttaaaactggttttgtgagcatatttaacatcagtagcaataaacttgtattttaagctcctgttgctgtattttgaggaccttctaagtccattggaaggattttgaataccatagtgtctgcagtgatagttgttgaaagaaagggaaggcatcagtgcaaatatttttagacagtttttaaagagactcaagtcacccaatttgtcttctaaaaatcctgattttggaagaggcagtggagtttctgttgataaaaaatgatttatagtttgtgcttggcacttcctaatggattacatcaggaaagatttattgtctggcactctcattttaacgatactacaattgattattaggtttagatgctaataccttttttacctttatttcagagaagcttgattctttgctctcagactacgatattctctctttatctaatatccagcagcattcggtaagaaaaagagatctacagacttcaacacatgtagaaacactactaactttttcagctttgaaaaggtaatttgaattattcatggaataatgttggggcactgggggcttggtttggcaaaaacaaaaaagtaagggtatctactgaaatcttgggaaattacattttaaagatttgtaattaatttccagtataatgcttattctaaaattcatactggggctgggtgcagtggctcacgcctataatccgagcactttggggggccaagacatgtggattgcttgagctcaggagtttgcccaagctcagcctgggcaacatggcaaaaccccgtctctactaaaagtacaaaaattaggcatggtgacacgtgcctgtaatcccagctacttgggaggctgaggcaggagaatcacttgaaccagggaggtggaggctgcactagccgagatggtgccactgcactccagactgggcaacagagtgagactctgtctcaaaaaataaataaataaaataaataaagttcatactgatgagtatttttaaaaaagtaaatagatattgcagaggtgttaatgatggtaacgatgtttagaaaattctaacataatttaaattaattgaatgcttataaaaccttttgtttttggtgctactttataaccatcaatcatgtgctaaatattatctttatatatgaagagataaagattttgttcaggaccccacagcctggtggtgagctgggtctagattttactgttctatttatttatttagctaactagttacttagtttccaggattctttaacctgcttcatatttatttatttttaaaaacagggtcttgccatgttgccaaggctgatcttgaacttctgggctcaggtggtctttccatcttggcctcccaaagtgctgggattacaggtgtgagccaccatgcctggcccaaatttaatattctttctacattgagttcctcttacttcttagcataaattgatggatatgttctatttcagtagtaattttaataccacgtattgttttgcacattgaaatgttaaataattgcaggcctctttttaaagtctttaggargctttattcagtatcaaaaaacagacacatggagaattgactgaattattctttatttatttatttttttgagagtcttgctctgtcgtccaggctggagtgcagttgtgtgatcttggctcactgcaacctctgcctcctgggttcaagcgattcttgtgcctcagcctctcaagtagctgggactacaggtgcacagcaccacgcctgggtgatttttgttatttttagtagagacagagtttcaccatgttggccaggctggtcttgaactcctcacctcaagtgatccacsatctcggcctcccaaagtgctgggattacagacaggggccactgcatctggccatctttattctttatataggacaagccttctcaactatgttaaaaaataaaaggaatatgtgcgtctggtttaaaaaacaagccatggakgatatgcaaagtttttacttctaactcagttagacttctcagacccagagaggtttcctttgtaaacttccaattttttgttttgttttgttttttgttttttgagacagagtttttgctcttgtcgcccagactggagtgcaatggcacgatcttagctcactgaagcctccacctctcgggttcaagcagttctcctgcctcagcttcccgagtagctgggattacaggagcccactgccatgctcagctaatttttgtatttttagtagagatgaggtttcaccatgttggccaggatggtcttgaactcctgacctcaggtgatccacctgcctcaggctcccaatgtgatgggattacaggtgtgagccaccgtgcccgacccaaaatattttaatgcatgttttttgcctataggtctctgtgtgtgtataggtgatatagatagcatatttacctcattttaaacagctgcataaatattcctattgcatagaattgtaacaacatactgactaatacactacagatggatattgtttaaccaaagtgatttttttaatacaacaaacagtgctctagtgagtatctttgtaaatgtgtaccttgatgaggtgtttttataggatatattcctggaaggagaattactgggtcaaggatatgtatactatgtttattgatattgctctttcctcccaaagagatttgacaaatttattcttccagcagcaatatatgagtttacctgtttcctgttatctttgccaatagtaggtttatcagcctttaactgtcacccctctaaagggcatggcattttatagttgttttgattttcattttgtgtgacattgagcatctttttatatatttgtaagtaatttgttttatatttctgtaaactgcctttttatctcttttgactatttttctattgaatttgtctttctaactactgaattgtagcagtgcttagtatattaaggagattggttcattgtcatgtggttattttaggcaaatttttaatgcaaattaatttttcctagctattgcaattatccttaggttattttttaatgacttctttttattcgattttatgtcagaatattatagtattggttattagctttcaacttacaccaaatttgagcagattggtaatattaatagctacagttaatcaggtacttattttctgtaatttactggcattttacataagttatctctaaaagtgattccttttttgaaggaacaaaaaaaaaaaaattaaggcttagacagcttagtaacttgcccaagattactcagctagtaaatgacagatacaagatttgaacaaaggttggactccaaaacttgtgttatttctgctatactggtggagagtttggtgaagaagtggatatagtagcaagaaataagtaggagcgaaggaagagtgaggaaactataaaatgaaaagaactcaaagtttagctttttgggtttctttggatttgaagtggcctgtagaatccgtattctagaggcaaaaacttccatagccttacatatttctctttcaagtttcgtagatgacattgattccctaagaaaatattaaatcgtagccacttgttatcttttctctgtgtaagaaagcagggaagtatgtaatttattttacaaagtttccatactaaatatttaatgggaaatttatctaacagtctatggaattttataccaggtgttttaaaataggttatttcctttaatccccaaaaccrttcagttattaggtgatattatttccatttgtagataaatacttaggattcaaagattgaggccaaggtcggacagtgagtaaatgaaagtaggacttaagccaagtttgtcagactccaaagcccataccctttcttttctatcatattgcgtcattaaagtttaaaacaagaacaaaaacaaagatagctgaagtaatcagtttgtatcagggctgaattaactctatgaaacccctcattacttgatrgtaaatgagaagattccgtttttcgatagcagtggaaggcaaagtaatttaaaccaagatcattgcattaaatttggatgtaactattagaggttgaaaaagcatagaaacactgagaggttgtatgaagagttgaagtaacttaagaaaaaaagaaacttgtttaaaatttgccttacaagtttcatttcctttttgttataaatcaagaaattatcagctaggcgtggtgactcacacatgtaatcccagcactttgggaggccgagctggatggatcatgaggtcatgaggtcaggagatcgagaccatcctggctaacacggtgaaaccccgtctctactaaaaatacaaaaaattagccaggcgtggtagcaggcgcctgtagtcccagctatttgggagkctgaggcaggggaatggcgtgaacccaggaggtggagcttgcagttagccgagattgcgccactgcactccagcctgggcgacagagtgagactccgtctcaaaaaaaaaaaaaaatcaagaaattatcttatttttaaataacgaaaaagctgcggagtatatactgttttgatacttttttgatgttgcctgaatttttttggaaaaagttaaatgtttctcctaaaagtgaaatatatcagattacttgagaaggtctagaactgataaagaaatgaaagtgatatacctgactaaatggaccattaaaaatggttagggtaataatgttaattcaaactggttagctggtctttagttactgtaaattcttaagtcaaaagtcagaaagataaaacgttaaagaaatctgtaagaaaatgacttcacataattttgggaggataaagtaaaagaaattttgacattctgttggacgttttataactcaaaagctaatattggaaaatcaaaaaacatgaattttataatcgcttggtctttatctttagaaaagattcttaatgtagcaaatgaaaaatgcaattccactgatttctttctgaaaagaacattaagtaatgttgcaactcttagctttaaaacaaaataataagacatttataataagtatgcttttgaaagttctcagcataactggagggaaaaatcataactgagaatgtgtgggaagatatgttttaggatagcagaagaaaatgttccaaggatttacgaaataatgttctattgtcttttccctttgaccattaaaaaaccacaagcaaactaaaattaccttgttatgctcaaaaagttaaaaatatttgttgccatggagatagtcccagtctagatttctttccggtagtttaaagacttttgcaatcccatggggaagtaatatattttcagtacaacagctgacaaaatttgtttctgtgggtgagatgaataatatacctttctttgtctttggtgttcatggacacattgaaagactataaataatacttgagaaagtcttgctcaccactcctagttttcatgtaaggatggaaagtcatagaaaacaaaaagaatagtaagccaattaaagaactggactgaaactcaacaaaaagaatagtaagcccactaaagaactgaagtgtataccccctcccctctcctcccctcccttcccctcccctcccttcccctcccttccccttcccttcccctctcttccccctccccttcccctctcctccccctctcctcccctctcctccccctctcctcccctcccctcccctcccctcccctcttttcctgtcttctggtgccaatggagtctatattctaatgtctgtcttagataccttgtatttattttcctaactgtaattgtgggttacttttttgcaagatatgttgttttgaggaggaaaaaaagcacgagtactttttttttttcttattttgagcgggagtctcgcgctgtcaaccaggctggcgatctcggctcacagcaggctccgcctcccgggttcactccattctcctgcctcagcctcccaagtagctgggactataggcacccgccaccatgcctggctaatttttgtatttttagtagagatggggtttcgctgtgttagccaggatggtctcgatctcctgacctcgtgatccgcccagctcaacctcccaaagtgctgggattacaggcgtgagccactacgcacggccgcatgagtacttttaaatatagaaagcagcatttattaattttgcacagcaataagaattttctcatagtccacccagcttgatagagacagcatagtacagggttttgaaataaaccaggtttatttcccagtttcaccatttactagctgtgtaactttgagtaggttgattagcttccaagcctcaatttgtacttgtgtgaagtggggataatagatgcatagtacctaacaccaagtaggtgttcaataaatggtatataataggattagtttttgataataatttttttagataatcaggattccaacttaactacgcagtcatgtgtgtttccttattcttcagtgttttccaggagagatgaatgtataagttctttgaatatctttaccctagtgtgagtttattgtgatctgctgtttttatagctaaataaattagttcatttgtcgttacaggagatatattgctctaagtacctaataagactttagttgtaacttgcatagtgttttattaatgtcamtgcttctggctttttaagaaagtttaattatgtgaaaatgagacttaaaatttgtgtgcttagagtaaaatatgaatgcatttttcttcaggcattttaaattatacctgacatcaagtactgaacgtttttcacaaaatttcaaggtcgtggtggtggatggtaaaaacgaaagcgagtacactgtaaaatggcaggacttcttcactggacacgtggttggttagtatggagcttgttggtttgcccctgtgtctggtgtattaggtctccaaatctaacttgattgcatattcttttctggtgcaggatagtggggacggggtgtcatagaagtgctattctttgacttttctttgaggtatataagtttagaggcaggaacattctaatagaaggaaatgagtattatctaaatgtcatactagctggctggtttaatgattaaaattaaattcttcttaagtgataggaatttaacctttcttttcctcagtgactgtaagctttctttatgatattttaaacagggaagcttggagataaaatacttggtgatcctattacgtatgtatttgagaaaatttatcaaacaagcaattgcagtttactttttgacctttttctgcaatgagraaaaaaaatgtcattgaaatccacaaatagtatagttcctaggcctgtacattctaaatcatgctttctgtctctcttagttcttcctttacctagaagtagataaaattattccagaagaaaatcttagcagttttgtttgttttgggaaagggataggtttcaagtgactaaacttgaggctaccccttaggagttgagattatctagcttctttctggagcctttgtttcttgttttgcagagctctcacagtactaggcaaattccaccctgaaggatttaatttttattgagagtaatgcatagtttcttatttgatgtaagtatttttaaataataattttttttttctcttaaggtgagcctgactctagggttctagcccacataagagatgatgatgttataatcagaatcaacacagatggggccgaatataacatagaggtaaatttatatgtgaattttttttcagtagcttatatctctgattttcaaaaagctgctcagttctgcaaaggtgaaaagtaattatacttatttctttcctcttcgtatttgaagttttttactaggaaagtagactttttaaaaaaggataatctctaagaagctgtgttatgatacaccctgtatttctaagtaccataattgagagagttacatgtgggatggataataggaagagaaaactttctttccctcctgactcattttttaattctttctcaaataataaatgtaaacatcctcagaaatgaaaagtgaagtattatttttcaatttctctgtttttctgctagacacactggaaatgctagatcaatgaaaggtggtagttcatagtctgagaagttaaagaggaagctaggaaagtcaggctgtggtcacycttccattgaaagagtagcratagaaatcaagaccacagtggctgcattggttaagacacatatctatctgtcagatattagtctacaaaacaaaacgtttcctcataattgtgaattgaagttgattctgtgtttcctgaaaaatgagaagactctgggtggtggtggtgatatcactaaaatagatcacctgtgggaaaactgagtaagattggtcaaaatgaaatgttcaggtgtatttgagtgcttaataggggtaaaacagtctgctggagctatatatactatatgttttaattatatccaatctacatgactgttagtcctttgactgtccattattgtgaaaaagaaacctatggccttgcagtatgttatagtttgttaatgtttaagctatttaatgtcaatgttttgaggagtctggcctaccagaaagagtcagaaatttagtagaaagtaaaggaactaatattataaatgcattcattctagaataggcaaagcatcactggaatgtcttaaatttgcctgttctttcaaatcaatttattttttaagaatacctttattttaaaatatatgctcattgcaaaattcggaaaatagattatctgtacttggacagataactactattgacattttgacagacatccttccamatttttttttctatgtgtaaatacacaaataaatatagttatrcccactattttttcctgcaaaactaggaccatacaatatgtacagtttgtcttcacacatttttcgtttaacaatatgattatgaaccttttcgtgttaatatagatctaaattagggttttttttktttgtttgtttgttttttgagacggagtcttgctctgtcacccaggctagagtgcaatggcgtgatcttggctcactataacctctgcctccccggttcaggcgattctcctgccttagcctcccaagtagctgggactgcaggtgtgcgccatgatgtccggctaattttttttcttttttttgagatggagtatcactctgtcactcaggctagagtgcactggcgtggtctcggctcactgcaacctctggctcctgggttcaggcrgttctcccgccttagacccttgagtagctcagactacaggcacatgctacctcacctggctaatttttgtatttttagtagagacggggtttcaccatgttggccaggatggtctcgatctcctgacctcatgatctgccagcctcggcctctgaaaagtgctgggattataggcgtgagccactgtgcctggcctcaactgttttgtttctaacttttgaaataaaaggtattgtagtgaacagccttgggcacaccttttggtgcatgtgtttagttggaatagtctggatgataggtaatagtctgggaagttaaatgaagaaactgtaggaagctctgtctaggctgtgcgagggcttcagataaactcccatagctgagtagcttaacacaagcaaagttttttcttactctcctgtggcttgatgtgggttaggtggttctcctctactttgtggctttgacttttggacacatgtcctctgtagttctcacagaaagaaaacagagctagagaattatacaggatattaagggccaggcttggaaatggccttccgttcaatacattctagaacactttatctctgacctgctacaaaggagaatggaaaagatagtcgtaatttgagctcagaaagagaaaatagtgtggtaaatgcacagcattgtttttgctgcagtgcatatgtctgcttatttccttagaataatttattcttttttgtttttttgagactgagtctcactctgttaccaggctggagtgcagtggcgtgatctcrgctcactgcagactctgcctcctgggttcaagccattctcctgcctcagcctcccgagtagctgggattacaggtgcgcaccaccacacccagctaatttttgtatttttggtagagacagggtttcacaatgttggccaggatggtctcgatctcctgacctcatgatctgccagcctcggcctctgaaagtgctgagattaaaggcgtgagccactgtgcctggccagcttattaattcttaagccaaawtatgtgtctttaggatccaagttaaatttgctcagattacatttttttttttttaagatggcatctcgccctgtcacccagactggagtgcartggcgcgatctcggctcaccacatcctctgcctcccaggttaaagcgattctcctgcctcagtcccttgagtagctggaattacaggcgtgtgccaccatgccccgttaatttttgtagttttagtagagatggggtttcactgtgttggccaggctggtcttgaactcctgacctcgtgatctgcccatcttggcctcccaaagtgctgagattataggcatgagccaccacgcccagctagattactcatttttttcaaatacttccttttggaaaaataggaattctgtttccatccatacctttgtttcactaagtacaaaaatgagtataactaatatttcattgtaagatatttacttagccaggcacagtggctcacacttgtaatcagcactttgggaggctgaggcgggtggactgcttgagcccaggaatttgagaccagcccaggcaatatagggagaccttrtctctactcctccacaaaaaaaaaaaaaaaaaaaaaattagctgggcatggtggcacatgcctgtggtctcagctacttagaatgctgaagcagtaggatcagttgaattcggaaggcggagactgcagtgagctgagattgtactgctgcactccagcctgggtgacagagcgagaccctatctcacacatacacacacacaaagatgtttacttacaagtatactcatcagataccttgagggacttttgcatgaaattaataatgtttattgaaaaaatgatttactacttacaggggtgattttcatactctttataattcttttgatacttttatagttcataagtgtggtgattggctgttcacacacacatatgagatgtaccaccctagaaccttgttacaatgttagcacattaccagtctgacatgaaaaaaaataattctttacacttaccttgatgcaaaaacattgtctatctgcactaatatcttaggaatataagtgagcaggaaaaaatatatatcttatttttaacacatcatcattaaatattttgtttatgacagtcttacttggtcactcaggctgaagtgcagtggtgccatcatagctcactgcagccttgacctcctgggctcaaacaatccctcttttctgcctcctgagtagctgggactacaggtgcatgccaccatgcccaactaatttgttaaatttttgtagagtgtatcagatttttgatgaggtctcactgtgttgcccaggctgatctcaaatgtctgactgtaagcaatcctcttgcttggcctcccaaagtgctgggattacaggtgtgagccactgtgcgcagccrttaaatattttaaaccgtcactgactttaccatagcttactatttatataaataatcctgggttaaacttgcatagtgagataatatttcccccaacttttatttatttatttgagatggagtcttgctctgtygcccaggctggagtgcagtggcgcaatctcggctcactgcagtctccgcctcccaggttcaagcatttctcctgcctcagcctcccaagtagctgggattacaggcacacgccactgtgcccggctagtttttatatttttggtagagacagggttttgccacgttggccaggctggtcttgaactcctggtctcaggtgatccacccgcgtcggcctcccaaggtgctgggattacaggcatgagccactgcatccggcctaatttttgtatttttagtagagacggggtttcaccatgttagtgaggctggtcttgaacttctgaccttgtgatctgcccacctcggcctcccaaagtgctgggatgacagacgtgagccaccatgcttggcctcccccagcttctagttttaaaaatgttcagctggtgcagtggctcatgcctgtcatcccagcactttgggaagctgaggtgggtggatcacttcaggccaggagttcgaggccagcctggccaacatggtgaaacctcgtctctactaaaaatacaaaaattagccaggcttrgtggcttgcgcccgtaatcccaactgctygggaggcctaggtgggagaatcgcttgaacctgggagacagaggttgcagtgagctgagatcgctccactgtactccaatgtgggtgacagggtgaaactctgtctcagaaaaaaataaaaaagaaaatgtgcaaatctacagaaagattaaaaagtaccctgtagttacagaaagatttttttaaaaaataccctgtagcccttaaacaatttctaacataatgtcctgttagctttctctctttttttcgtgaatcatatgaaaatcatttgcaaacatcatgacccttcacccctaaatacttctgtatgcatccttaggaataaaggcactcttttctatagctgtaataaaagtaacatacctgagaaaatgacaagaattctacaatattatctaataatcatgccatagtcaaaatctctagtcatcctcaaaatctcctttgtagattttttttggttttccagtccaggatccaatccagttttctgccttttagtcaattactcatcaaattattttttccagcaacttactagtaataatggtaatagccttagcttttattaataacaaccacttttcttttgaaatgttaatataaaactagatttattacctacataatcttcataatcttcaagttaggtattatcactactttacctaatgagggaggttatgctcagggtacttgtccaaggcacatagtgaggtatggttgaggtttgaactcagatatatctgatcccaaagccagctgtctttttctgtgctggactgactatactaggaaacaatcaatgtgaacttagaaatgtttgacccaaaagaaaaaaaatttcactcctattcataggctaaatgaactttactaaatatggaagattcctgtagcccggaagttgggttagttaacttttgagatctctgccaaccctgaaattctgtaacccttgtttcttacatctgcctcatacatggattaccaaagatgtatatgcatataatatttaacagttttattgagataaaattcacatactatattattcacccacttaatgtatacaattttgtagttttgtgtgtgtgtgtgtgtgtgtgtatttttgagatggagtctcactctgtcacccaggctggagtgcagtggcacgatcactgcaacctctgcctcctgggttcaagtgattctgtggcctcagcctgttgagtagctgggattacaggygcccaccaccatgcccggctgatttttgtgtttcagtagagatggggtttcaccgtgttggtcaggctgttctcgaactcctggactcaagttatctgcccaccatggcctccccaaagtgctgagattacaggcgtgagccatcgcgcccggcagttttcgtatattgatggagttgtgcaaacaccacctcattcaattttagaacatttttatcacctgaaaaagaaacgctgtatcctttagccatacttcccccttcctccctaactcccccagctctaggcaaccagggatctactgtctatttagatttgtctgtttgggtcatctcatataaatggaattacataacatgtcttttgtgtgtggcttcaatttttttatttttttgagatggagtcttgctctgtcacccaggctggagtgcagtggcatgatctcagctcactgcaacttttgcctcctgggttcaactgattctcttgcctcagcctcccgggtagctgggattacaggctcctgccaccatgcctgactaatttttgtattttttactagagtcggggtttcactatgttggccaggctgttctcaaactcctgacctcaagtgatccacctgcctcrgcctcccgaagtgctgggattaaagacatgagccaccacgcycagcctgtgtgtggcttctttcacttagaataatgtttccaaggttcatctgtgttgtagcatgtatctgtatcttatttatttttattgctgaatagtattccattgtatggataaactgcattttgtttattcattgattagttgttgatggacatttgggttgtttccactttttagctatatttacattactgcttgtgttttcatttctcttggttatatactaggagcagaattgctgggtcatatggtacttctacttttaacctttgaggacctgccagactgttttctaaagtggttttaccattttacattctcatcagcatatgtgagggttctggatttctctacatcctcaccagtatttgtctttgatcatagtcatcctagtgggtatacaggggtgtctcattgtgggggtttttttccccattggggttttgatttgcatttccctgatggagataaatatattttttgtgtgtccccccacaaactgcctggttctgatgagaccagtgttcttacagagaataactttgctttgaaacaaaacaaacaaacagccttttgacttgggtaacctttggagtatgttaattgtgatttactctggccttgtaacattgtaagtggagattttgtttaaaaactgcgttcgctgaaacaagtaataaggttcagacctattgttacaagttctgagttttctttcatataaatatgtttgttcttttgtgtggataaaacctaacgtggcaaaaaggtgtcaaacacctaagtattaaggaaactaaaatgaaaatgctgcatgaacagaaaccttgtccaattttcattactatagcaccatcacctataacagtgccagtgtacagtagatattacataatatttttgaatgaatgagtggaaaatgatatgcatttttctcttctgcatcctctgaaagatttcacaacgtgcaaagtatgtaaggctttatttatatacagataaaataatcagagtttataatctatgtatttactttcctgcatagaaactccatatgattaaaaattgagattatttattttaataacatgactaatcagtttacttaacctagaaatgaatgttatctaagaacaagcaaagaatgttagaagaatttagtgtttaggaattattattgttttccatctcagtcgtatatattttctgttttagccactttggagatttgttaatgataccaaagacraaagaatgttagtttataaatctgaagatatcaagaatgtttcacgtttgcagtctccaaaagtgtgtggttatttaaaagtggataatgaagagttgctcccaaaagggttagtagacrgagaaccacctgaaggtaagacttaaagagtgtatttcaaataagaaacaaacatactacaattgacttcagtaggggtggttgttatttgttaaaaaataacatgattgtcaagtaactatagtatttggcatgaaaataagaggtttgttccagaaattttcatcttcttttgtttrtaatgtaagagttgaaaactctggaaaataatgggaacaacagagattagactttaaaaaagattagggaaaagggaaatggagtgatctgagggaaaatattcctgcagatatttagaaatgataaaataatatggtggaaagacaatctttagagtttataagaaattaattggtagtaggagggacctatatatatactgcttagaatacaagaaggttatatccatcttgggacaatccatttagggtcatttaaaaaacgtaaccatcttggaattttactgcccaaaacacctctggttaggttttttgttttgttttgttttgttttgttttgcagcgcgatctcggctcactgcaacctttgacttccaggttcaggtgattctcctgcctcagactcctgagtagctggattataggcatgtgccaccaggcctggctaatttttgtatttttagtggagatggggtttcaccatgttggtcaggctgttctcaaactcctggcctcaagtgatctgcccacctcagcctcccaaagtgttgggattacaggcgtgcaccaacatgcccggccaaagacggttatgttattaaaattatatattagcattttaatatataaataaagaaattcttaatttatttcacaagaaagttgtcctattaaactaattttcaatgtgaatatcttgacatttttactgttacattggttaattcataaacttcttgttgtagaatatgactgacagcttcatagcccagcattaggtgactgttttactctgttgagcactatttatttatttatttatttagagatgaagtctcacttttgtcgccctggcttgagtgcaatggcacaatcttggctcactgcaacctccgcaccctgggttgaagtgattctcctgcctcagccttacaagtagctgggattacaggcgggtgccaccatatctggctaatttttgtatttttaatagagatggggtttcatcatgttggccaggctggtctcgaactcccgtcctcaggtgattcacccaccttggcctcgcaaagtgctgggattacaggcctgagccaacatgcccggccttactctgttgagcactttttaaagtttctgtattggaaaaattaaagaggcacttgtccttggttttgaattctacagtgttttaactttatgttacttttcacttttctgtcttcctccaaattattttttgttgttgttcagaatcctttagtgatattaagctcacataatgtttgtttcaaaaatatgttagatttaaagtgttaccataaaactccttgttttggtgaattttgatttaatagtgcatacaaattcatattagagcttgttcatcgagtgaaaagaagagctgacccagatcccatgaagaacacgtgtaaattattggtggtagcagatcatcgcttctacagatacatgggcagaggggaagagagtacaactacaaattacttagtaagtatttgatattgcatcgagtaattgaaaaaaaaatttgggtgggtacattccatgaaacttaatgcaaccagatctgttccagatactctgttatttccctaaaatatttgagggatattctctgaggtttttatgttactgtatggaaattatagtttcaaatttgtgacaacccattttacccttgaactaatattttctgcatgttagaatttatgcatatagggtttgggagaggttataatgtagtccttcctccttgatataagtgagttctttaaaaacatcactgctatcatggtagtgaacctgtggtgtcacatgtgaatgtaaaaatatgtatttgcatgaacccatgtttttcttttgcttatatgtatatttcagagaggaaggcgagttttgtttgtcatgttaaagacctaatcattggacttcacttgaaataggtgggactttcatggtcataactagttctagggcacagaagtgaaggaaagatgtaagaagtgatgatactggatttttaagtatgaactattatgatttttgaagtctggggaatcatttttcattgacattttttgctagtgtgacttcattcgtcatgattacttggcactgaccaaaatgttgttactgagggaataatggagaatgcagctattcatgaagcaagaagaagctggtgcagtaaagatgtctttctcattgccttgcttttcccatgctgtccattttattcataccctcccaacttctttcccttccctttcatgtcaagtggatttttttttttttttttcaacacagagtctcactgtgtcgcccaggctggagtgcagtggcacaatctcagctcactgcaacccccacctcctgggttcaagcaattctcctgcctcagcatcacaagtagctggaattrcaggcgtgaaccacagcactcggccccatatcaagtgaatttattatgaggctagtaagagtcactgtgattcttgttcctaaataagagagatttttactttaaaaagcttctctcttaatctgggttttatattaaggggctcctcttattttacttctttgttcattgcactataaatatgaatataatgagagatctagtcttaaaaattgtatttttttacaacttcttaggcataacttgtttcacagttgctggaacaaacctcatcaacccagtttttgaacagtagaatattctctttgagaaaaagataggtaattagcattttgttctttctcatgtcattttccttggaaactatactgccttccttctccagttttcccaaatcagagaacaaaagaaggagggttgctgaaatgaaccttgttctttctggctgtcttcttacccattcctcagtgctgaactttttggggtgagagtgggggaatagggttggcagttgtctgccacggccccttacttgtttctggggaagacattcgaggtactcaccaagagatagagtgaagatggaattctttttagaagggaayacagttgacccaggaacagtgcgggggtgtggttagaagcactgaccttcttccctctgcagtcgaaaatcctcacgtgactttttttttttaaggctctgtcgcccaggccggagtgcagtggtgaaatcatagcttgctgcagcctctattgcccgggccaaagcaatcttcccacctcagcctcctctagctgggacaacaggtgttcacccttcctggctaagttttttgatttttagtagagatggagaatttcccaggatggtctcaaacttctaagcttaagcaatcctcctgcctcagcctcccaaggtgctgggattacaggcatgagccactatgcccggccactgtataactttgattctccaaaaatttaactactaatagtctactgttgaccagaagccttaccaataaaataagttgattaacacatttttaaaatatgtattattactgtgttcttacaatcaagtaagctagagaaaggaaaatgttatgatgaaaatcatwaaaaaaaaaaaaagcccggcatggtggtgtgtgcctgtagtcttctgttactcaggaggctgaggtgagaggattgcttgagtccagaaattcaggctgtagtgagctatgatcgtgccgctgtactgcacccctggtgacagagcaagaccttgtctcttgaaaaaaaaaaaagaaaatcataaggaagagaaaaatacatttactattcactaagtggaagtggatcatcataatggtcttcatgttgagtaggctgaggaggaagaggaagagttgatcatattgtctctggtgacagaggctcarggaaatccatatgtaagtggacacttgaagttcaaatctgttgttcaagggtcaactgtatttcaggtatactgattgacttttaaatttaatttttattattggctgaaacggtagttttaaaaaagcctgttacttgtcattttggttccatgtgcaattgagtacctgaaatttaggttaaactataccattgttttattctggtaacagcactttaagtttggggccaaaggttgggaatactctgatacagtaacatctcaatgctagtttttgcgaaagtagaaacttttgcaatggcctctaaactgagattttttctttccccatagattttatattgcattgccaggagwggtaaagagttacataatgtcttttttcttttttaaatacacacagatagagctaattgacagagttgatgacatctatcggaacacttcatgggataatgcaggttttaaaggctatggaatacagatagagcaggtatttatcaatagatatggcttatattacttaagttttgtaatgtaaatatttgtcacttgtattcaaaacctaaaaacttgtccttaacaataattgtaaataagttttctcagatgccaatgattttttatgatgaattgtgcagtatttttgatgttaattagttctagattgtgaagttttctgtccttagtctcgctttaggtagaaagccttttatgctgctgtgctttgttccttctttgaattcatggcctttatattctctgtagttttcttcccccctccgattatgcttaagtctttagttaaaactctggcatgcaccattgaatccttagtcagaaaatttactaaaaaatactgtgtacctttgcaaggctgtatttatatatacagaacctttaggttctttcctctcagatatctccttctgatttcttgtaatctgttaacagagtgtgtctagtaatgttatattaatgtcatcttaataatagctcatattaaaagttatttcaaattgctaggactaattaaaaaggcttctgacawagggtattgctttgggcagagagacattttgatatgtaaattatataaattgttatctctatttttttccaagctttttgtagtaaaccatatttttataagttatatagtatagaatttagaggttgaaaaaatttttaaaaatcattcaccatgtttataaatgttaaactttgatattacttgtataaaactaagagaattatttttcccttttcattctctttcactgttacgcattttctttttaagttattatttgaataggtaacatgtacacagtacaaaagccagtgaaaagtaagtctctgcagcctgtttattgtcaaaccagttcctttccccaaagacattcatgtcactagtttcatatgtatctttctagagatgtcgtatgcaggtatagtgtrtgtatatgtctgtatttgacacaacggtgctatgcagtacacttttacaccttgctttttcatttcacagtatgttggagagtacttcatgttcatgcatgtaaagctgcttcacttgttttattataaatagctgcatcatgtttgagtttcagggaacctgtaaattttctttttgctttaggcatttggaaccagtcgaagaaacaggaataatataggagattaaaacattaacttctttacatctgatgaaggatggattggagggtgtggtttagatgtgtatcatggtgggcttctaagtagttctatcccagatttgaccttgaccagccaccatcaaaactgcagagtccaccccagtaaacttaccacacagtggcagaggagaccagaatgggccttctctgcaggcaggcaggcaggcaggcaggcrgagagactcacagaaactctgagctgagcatggtttccttctttatctcacacttactaatgggagcctttgttacttttttttttcttctttgcaggtttaatatgaatttgtctgaaatgcctgtataaggagaagactctattcttagccttttattcctttgatgcacaaagagatgtatattttattattctttcctgagttgtcgactgtagtcgtaataaatattttaggctcctgtaacccaagttcttattttttcaaaataaacatggaggatatgaaaatttaagagtacatttataatattataaataattcattgacatatgttttccataccatatgcttctctgtttgtttcaaacattgaatattrgtactgaagaatttatgaattttggttttaaaatgttttttttctagaacgattctttttttgaacagataaaataatgcagtattcagagccttctgacttattttggaagtgttctaagtatatgatctctttaagtatagattcgcattctcaagtctccacaagaggtaaaacctggtgaaaagcactacaacatggcaaaaagttacccaaatgaagaaaaggatgcttgggatgtgaagatgttgctagaggtaggtcttagaatcctggatatggtgctaacaccactttgtcatttctgatatgtggattgtatgtgttttaatgaaggagcrtgttagaaaagatggacacccagaagcagtctcctccagctgatccagcagtaaccccatcccatgtagcagcatagacaacaaataacaaaaactctatgaaaaagaaaaacgctataaagcaatgcttcctttttttttttttttttttttttttgagacagagtttcactcttgttgccctggctggagggcaatggcgtgatcttggctcaccgcaacctccatctcccaggttcaagagattctcctgcctcagcctcccaagtagctaggattataggcatgcaccaccacggccggctaatttttgtatttttagtagagacagggtttctccatgttggtcaggctggtcttgaactcccgacctcagatgatccgtctgcctcggcctcccaaagtgctgggattacaagtgtgagccaccatgcccggccaaagcagtgcgtcttaaccttaatatctttgaggatctaatgagacaatcagtggatcttctctagaaaataacatggatacccaatatatagagtttttgcacactgtttcattagttctgcacacttagttcagctctctctgaagcttatcaatttatcttttagggcagtaattatcaaacaggttatgaacatgtattggagagtagaaatatagcttggagatctgaaagttctctacaggaatttaaaatttttgtgtttttattctggcgattaatctaaagatggctaacttaatcattttatgtcatttggagtcttgccgtataacagggtgctgccatgtgattccagtgtcttgagtttgtgtgtgctattactttggtgtagaatgactttatatgaagcgatagtttttatcttttaatgtgttggcaagtttattagtttcttgttgttgctttaattatcacaagtggagcagcttagaacaacacttatttatcccatagtttgcatgggctagtccaggtatggtgtggctcatctggattcttgtttagggtctcatgaggctgaaatcaagttttcaaagcttcaatagaattaaaggatattataactattcatccagatggagaagcataatgtgcagcacctgtgtggtactcattcataccttgtctaatttgatctgctgagcaccctgagaggttggttgagacagcatccttgtgaggaggctcagcaagtgttactgtttattccagctgacatgacaaagcagcataggctgggggacttaaacaacagaagtttgggttttcacagttctggaagctggaagtccaaaatcaaggggtcagcagggttgatttcttctgaggccaaggtacttgtggtgtagatgctgtcttctccctgtgttctcacatggtccttccctcagtgtgtgtgtatattctgatctccttatcaggacaccagccatattggattaaggcccacccatatgacctcagtgtaccttaattacctccttaagggccctgtttccagatagagtcacattctggggtactgttgagggttaggacttcaacatttgaattgtggggtggcacaattcagccagtagcaggaagattaaatgacttgtctgattagtcatacaactggtgatggcagaggttgwattgagcacagatctcctgactcctagaacagctgaaccactgcgcctgtctgcttttctgtgagcctccagacagcccatggcaggggaggaaccaaagagaaaaatgacttatgttgacagatggtcctctccagttttcttccctaagcctcctagaatattcttagaagcctcatccttttaccacggaactatcagaatccccatgtaaccacacttcattcctcatatagggctctctggcctctcatttaaagcattttaaacattgagggttttggctaggcatggtggttcatgcctgtaatcccagcactttgggaggctgaggatgaggcagtggattgtttgagcccaggagttcaaggctagcttgggcaacatgttgtacaaaaaatacaaaaattagccgggcatggtgaggcacgcctttggtaccagcttcttgggaggctgaggtgggaggttcacttgagcctgggaggtcgaggctgcagtgagctgtgattgcgtcactgcattccagcctaggtgacacagcgagaccctgtctcaagcaaaataaatcaaaccccccccccaaattaaggtttttttaaacttggagacgctggacggttatggtagaggtttttaaagtaatgtatgaagcccttttaaattaagaaaaaaaaaatcctctcaaacctgcagtgttgatttaaatggatgtaaaatctttattttagtaacataaaactgggtatgtatgcttttctataagtgtatatttatataaatgacaatatattatgaagctcaaaaaagtttaagattaaaatttctataaaaccaattgaatccttgaaatacttgagagggatctgttttggcctggagtgctgcaatccccttatcgaattggagcatctctagtcctgggctgtatgtcttcagaacagccctcggaggagcagtgagttagttctgaagagctggagcaagctcccgaactattcccttttgtgtcccttgtcagatgacagtgtgtgcctctcacctgtgcaggtggagaagcactttagggaaagagcaaagcactgcacgaggttgtgattgctggtgctgagctgcatgccatcatagttctgttctggaatgtttagttgatttagattacatcttttagtctgatgtaattgttaatctaagaatgcttttttttttttttttttttttggtctttcaaagcaatttagctttgatatagctgaggaagcatctaaagtttgcttggcacaccttttcacataccaagattttgatatgggaactcttggattagcttatgttggctctcccagagcaaacagccatggaggtgtttgtccaaagggtaagtttttccatttcttgtgtgaatatgctgctgggattattaagatgattggattatattataattctgtatttaataagcaatttatctctgtttccttttgactttagcttattatagcccagttgggaagaaaaatatctatttgaatagtggtttgacgagcacaaagaattatggtaaaaccatccttacaaaggtatgttcttttatttctaaaagaatagtgttagagtttattgtagtagaacctcagttatatatttatgtaggtattttttwaaaaaatgtaatatatactgttttttaaatttctgcctaaataaaatttatgtatttttgtgggatatatgaaaattaaagcataaagaagaaaataaaaatggcctgtcagccttcttytgaaacatgtgaggaccactgcttttctcraaccctctgtcctggacccctctgacctgcagcaactcttagagctccctgtctcctagtcctgcagtgcagctgtcattcaaggcatcccacaccctcttattttcagaaccccatggtctccctctttctcagtgccatcattttggtgtagtgtatcttgcaggagcttcctaagaaaacgtagatgacctgcatattgttgggatttcatatatctgaaaatgtctttattccactcttaagcctgattgataattttggctgagtatattcttagttctcatgttctctatggtcttctgtgcatgttgcttctaaagaatctgaagtcattttgagttcttatctttgtttgtcacctgtttttttctctggaatatcttaagatcttgtttttctccagctatgtctgttaaaatgtgtttgactacaaataacagaaaattaaataagcagtggtttaaataaggggtttatttgtctcagtcaacaagaagttcagggatagcattttctgggtggtacagcaactcagaggtaccctcagtggctcaagaacaagcaggaagtctttgtcctcatggatgtcacctcatggttttaagatggttctcttctgtgttggagaaaggaggagaaagagaacatggctagcctagtctggcccttctaaaaagcttctctggaggccccatcctggcttttgtttatatgttactggacagcactgggtcccgtggctgcccttagcctcaacggaatgtggaaagctggctattttagctgagtatattgctgtcctgggcaaaattagggctcattaagtaaggaagaaggggagagagatgttggtaggacatattagtatctgatatactgatttttaatttttatttaatttttattttttttgagacagagtcttgctctgtggcccagtctggagggcagtggcaccatcttggctcactgtaacctctgccttctgggttcaagcagttctcctgcttcarcctcctgagtagttgggattacaagcacctgtcaccacgcctggctaatttttgtatttttgttttagagacagggtttcaccatgttggccaggctggtctcatgaacccctgacctcaagtgatccactcaccttggcttcctaaagggctggttggtatactgattttttgactatgatgttatacttggtgtagggtatgggaaaacatttgcaaaagacacatctgagaaaagactgctatctgaaatatacaaagaggccgggcatggtggctcattcctataatcttcggcactttgggaggccgaggcaggagaatcacttgagcccaggagtttgaaactaacctgggcaagatggtcagaccctgtctctacaaaattaaaaataaataaataaataaaaatttccatatgtataaagaactgttaaaattcaacaataagaaaatgaacaacctaatttaaaaacagacaaaagagcagaacagatacctccaaagatatacagatagcagagaagcatatgaaaagatgctcagcgtcatatgtcattaggaaattgcaaattaacaatgaagctggttgtaggggtacatgcctgtagtcccagttgcttgggaggctgaggtgggaggattgctcgagcccaggagtttgagacccatcctgggcaacattagtgagatcctatttctataaaaaactttaagaaacccaacaacaatgtgctattactagtagcttattagaatggctaaaatcccaaacactggcaacacaattccaacaaggctatggagcaacaggaactctcattaattgctagtgggaatgcaaaaatggaacagccactttggaaggcagttggcagtttcttttctttttcttttttcttttttttttttttttggagacggagtttcactcttgtcacccaggctggagtgcaatggcgccatctcggctcactgcaacctctgcctcccaggtttaagcaattctgcctcagtctcctgagtagctgggattacaggtgcccgctgccactcccagctaatttttgtatttttagtagagatggggtttcaccatgttgtccaggctggtctcgaactcctgacctcaggtgatccgcctgcttcagcctcccaaagtgctgggattacgggtgtgagccactacgcccagccataagaatgtttatggcagcttaattcataattgataaaacttggaagcaaccaagatatcctttagttggtaaatggataaactggcacatccataaaatgagaaaaaaataaaaagctattaagccatgaaaagacatagaggaaccttaaaagcatactactaagtaaaataagccagtctgaaaggctacatactatatgattccaaatatatgacattctagaaaagacaaaaccatgcagactataaaatgatcagtgattgctagatgctgggggagggagggatgaataggtggagagcagggtaattactctgtatgatacttcaacagtcagtataagacattatgcatttgttgaaacacatagaatatacagcacaaagagtggaccctaacataaactgtggactttgggtgatttaaaaacaggtggtggcaggagcctatagtcccagctacgcgggaggatcacttgaggccaagagttagaggctgtagtgtgataaatgcaactgtgaatacccgctacattccagcctgagcaacttagcgagatcctccttttcttttttgagatggagtctcgctgtgtctcccatgctggagtgcaatggcatgatcttggctcactgcaagctctgtctcctgggttcatgccattctcttgcctcagcctcccaagtagctgggactacaggcacccccaccaccacgcccggctaattttttgtatttttagtagagacggggtttcactgtgttagccaggatggtctcaatctcctgaccttgtgatctgcccgccttggcctcccaaagtgttggaattacaggcgtgagccaccgtgcctggcctgagaccctgtctctttttatttatatatatatatatatatatatatatatatatatatatatatatatatatttatattttaaatttaagttctaggatacatgtgcacaacgtgcaggtttgttacatatgtatacatgtgccatgttggtgtgctgcacccattaactcgtcatttacattaggtatatctcctaatgctatcccttcccccttccccctccccccaccccacgacaggcaccggtgtgtgatgttccccttcctgtgtccaagtgttctcattgttcaattcccacctttgagtgagaacatgcggtgtttggcttttgtccttgcgatagtttgctgagaatgatggtttccagcttcatccatgtccctacgaaggacatgaactcatccttttttatggctgcatagtattccatggtgtatatgtgccacattttcttaatccagtctatcattgttggacaatgttgaacaataatgtagagtggtatgagaaaagaaaaagacactaattagcttttgggaatcttttaatttctttttttcttttcttttttttttttttgagatggagttttctcttgttgcccaggctggagtgcaatggtgtgatcttggctcactgcaacctccgcctcccggattcaagcaattctcctgcctctttctcctgagcagctgggattacaggcatgcgccatcacgaccagctaattttgtatttttagtagagatggggtttcttcatgttggtcaggctggctctcaggtgatccgtctgcctcggcctcccaaactgctggattacaggcgtgagccaccgtgcttggccttaatttctaaatttatttttttcttatggtactttgttttaggggaaaaaatctctcaaactgtgttttccctctattctcacatcacaaccatcatcatcaacacagaagacttgtgtgaccagaccaaacgtgtggggatttccccctacatatcaagcagtagacatcagctaggtgtcctccaattcaattcaaacactctccacccggaaatagtatcagatctcacagtttgagggcccagtcccacaagactgactgttccctcctccccaccagttacaagtctgagcctccagaacttctgaccaactggcttcaagttggggtttccacattctcctctttgggtctgattaatttgcttaagtggctcacagaactcagggaaaagcttaacttagtttatgggtttattacataggatattttaaaggatacaaagaagctgggtgcggtggctcacgcctgtaatcccagcactttgggaggccgaggtgggtagatacctgaggtcaggagtttgagaccagcctgaccaacatggtgaaacctcgtctctactaaaaatacaaaaattagccaggtgtggtggtgcatgcctataatctcagccactcgggaggctgaggcaggagaagtgcttgaacctgggaggcagagattgcagtgagctgagattgcgccactgtactggtcaacagagggagtctttgtctcaaaaaataaaaaaaaaagaaaggatacaaagaaatagccaaatgaagggatacatagggcgaggtctggaagggtcccgagtacaggagcttctgtccccatggagttgggatgtacctccctcctggcacacgaatgagttttgcaccttcctgtcaacctccatgtattcaaaatgctctctggaagctctctgaatcctgttttttgagattttatggaggcttcattacataagcacgaatgacaactgtgtagaaatgtgattggacaaaatgggtatgttctcatactaaccgactgagtggggaagcccaccaaggcctgtccagattctccttgacctctctgtgcagcattcctccctccacagtaaagggcaggaccctctctagaatgagaatgagaatgaggatctctggacccacaatcagattagagtcttgccttggatcaggtaaaaggaggacaggagaaggtcagagagagagattctgtttcctgaggattgctcctgagccctaaagcaccccaacattataacagaagaccgtaaccagggctacggagggttgtaagccaggagccatggacagaaacatacatgtgtgtacagtagctcacgcttttacttttttggagtcacaacttcttaatggcttgatttcatgacatattttctttggtcttccagaactttcctcttaaaaaaacacagcaaaaaaacaaaatttgatttgaaatttttgagatttttttttaagagtcattagcaaatccactaatgaattttccccaagcagttaggagatatttctcttcattacacctttgggatttgagtgcttttgctaaaaatttaagttttttttcccactacggttttaatatgaacatgtggaaagacttcttgtatagaaaaatgacttgcaaaatattattttttcaggttctatggagtgatttcccccccttaggaaaaaagaactcaggaattttaagtttatatgtatatatatttattttattttattttatttatttattttaagacagactctcactcttttgcccaggctgggggttcagtggcctatctcggctcacagcaacctccgcctcctgggttcaagcaattcttctggctcagcctcccaaatagctgcgattacaggcgcccaccacaatgcctggctaggttttatatttttagtagagacagggtttcaccatgttggccagtctggtctggaactcctgacctcaagtgatccagctgccttggcctcccaaagtgctggaattccaggcgtgagccactgtgcctggcctttaagtttgatattttattcagataaatatggaaaaaaaattttagctttattggcaaaatttattattcatatagaaatcatctgataatctgatagattaagtacagccctgcaactggattctaataaaccaagtcctctaggtcattaagattgttattggacatgaattcagtcattgagaaaataaaacattgttttgttgttcctcagttgtggtttttgttttttttttaagatagagtttcactcttgttgcctaggctggagtgcaatggcatgatctcagctcactgcaacctccgcctcctgggttcaagtgattttcctgtctcagcctcccgagtagccgggattacaggcgtgcgccaccacacccagctaattttttgtatttttagtagagatggggttttactatgttggccaggctggtctcgaactcctgacctcaggcgatcaacccaccttggcctcccaaagtgctgggattacaggtgtgagccactgcgcctatccgtactgttttttttaccccttgctttttttttcctttctgctgagatgctttaggttttaacagacatgtgattgggccgaggggcatgtgaggaggctggacaattaactacagttagcttattgcatttatcagcaccagattgtgtgtggttgaaatggccaaggtttgatgttttgttatgaatgttccagtatatcttataaattacattttcttaaattgatttgttactacttacaataatgtttgatagtattaaataaaatcctacttattctgttaaattcatataattggtagaagaatcatagtccggttattactcttttttgagacaaagtcttactctgtcacccaggctggagtgcagtggtgtgatcatagatcactgtagcctcagcctcctgggttcaggtgatactctcacctcagcctcccaagtagctgggaccacaggtgtgcaccaccatgcctggctaatttttttttttttttttttgagacgaagtctcrccctgtctcccaggctggagtgcaatggcgtgatctcagctcactgcaacctccgccccctgggttcaagcagttctcctgcctcagcctcccgagtagttgagattacaggcgcgtgcctccatgcccagctaatttttgtatttttagtagagacagggtttcaccatgttggccaggctggtctcgaactcctgacctcgtgatccacctgcctcagcctcccaaagtgctgggattacaggcgtgagccaccatgcctagcccacctggttaatattttttattatttttgtagagatagggtctccctgtgttacccaggctggcctcaaactcctagagtaaagtaatcctcccatctcagcctcctaaagtgctggtattataagcatgcagttcttattctcttgttgatctgattataaggctctatttaagacagcataggcccaactggcagaagtaggtgatggctggatattgagaaataatgttttctttgcatgatccttaaggaagctgacctggttacaactcatgaattgggacataattttggagcagaacatgatccggatggtctagcagaatgtgccccgaatgaggaccagggagggaaatatgtcatgtatcccatagctgtgagtggcgatcacgagaacaataaggtatgtgtgtgtcgagaattttttatgtggtttggaaagaggctgtgtataatgatcataatgagagctcagaaacgtattccattcctaggcgtttccctagggatggatgtgcaaattacaaagtaccttgaaacgtggytgtgtgttttggggtgaagcacggttcatctaaatctggttaaaactatcatttggactttgttgtcaagcttaatggtgtagatttgagctctaggaaaaattactaataataatggctttttttggagttctggatttcagggtctggtgggctcaggctttatgttaaaaatttgtcatttcatttacaagttgtcattcattttaactctacaatttacatgtacagtttacacgtttttattaacttttgcagttaaacacatagtttgcctgactacaagcctcatgggagaaaggcccttccttgtctgtcttattcatagctctatcttattcatagctctatctccagtgcctagtaggagtatctggcatgtaacaaatatttgttgaataattaatggaatcatttactattgggggtttctgatagagaatactagttgatttgtgatactgtaaaacactttcagagactttaagagtgccgtgactaactcttagagtctgaactaaaagttgtgttaataaatatctggttctttcattttatttgaagttaaacagcataaagcagtgtgaggaaaacaatagttgcactgctgagttaaagagggtcggtggggagagcttaaaggagtctgattctaatcacaaaagattgtgaagtatttgtcctgactcctattttgagcttggctgtgggctaatgtgcaagccttccctggacacagagggcaagattacttctgcttttccctggctctgacaccctgctttctgaaatttctgcctcctgttctttttgtgatctttgattgttgcatctcatttttttttggctttttatgtatattttctgcatctcattttctttggctgttatgtgtaaacagttcctctgttactttgcatgttatgttttatttttcctctgcttgacaacttgtgccagagaaacatttttctaccmctttttgtctactcttccaacctgtcaaactgttgaattttccttctcttttcatagtctctgcatttctaatcatgttcactatagttcagtgctgcccaatagaactttctgctgcggggcgggggatgttttgtgtctgctctgcccagtatagtagccactagcccagtggagcaattgaaatgtggctagaaactgaggaactgaattgtaaattctattttatttaaatttttaataatgtttgcctgtgatgggagacgggaatgggcattaactgtaaaaggacatgagtgasattactggaaggatggaaatgtcctaaaattgacttatagcaatggtttcaacacttggtaaagttattagaaatcactgagttatatacttgaaatggatcaattttgtgatatgtgaaatatgtcttaataaagttgttaataagccaacaaacaaaaacagcagtgtgggagcagaggaaaagtagcgcggatgtagaggagctgtgaagtcataagttgattattgttgaagctggtgaggggcacgggggcattcatgataccatcctgtctacttcatagatgcttgaatatttctgtaatagaaastgtaaaatatgtgactaggaacaaaatttaagtagccacatatggttggtggctaccatattgcatactgtttctctaagtaataggtcatatgcttcttggttatgaggatagtgtcagaacttgggagcaaaatgttttactttgcagactgcctgrgtggacatgcatgctgctgactcttcctgctgccagttctggggctcttcaaaacagccctgtaagaacttgccagtgaggcatggtggctcacacctgtaatcccagcactttgagaggccgaggtgggcagatcacttgagcctaggagttcaggatcagcctggacaacatgtgaaactccatctctacagaaaatacaaaaattagctgggcatagaagcacatgcttgtagtcccagctactcaggaggctaaggtaggaggaacccggggagttcaaggcggcagtgagccaaggttgtgctactacactccagcctggatgacagagtgagactttatctcaaaaaaaggaaaaagaaaaaaaagaacttgctaatgagaatggggcctgggaagaactttttttttctggagctgccagtctgtatcaatgaagaacaatttatttattttgtcctgagcacatcatatttagtctgtgtttttctagtttggttgcccaagtaggagtccccttgtaagaagataatgtgcatcttctatgttttatttatttattattatttattatgattttttgagtggagtctcactctgtcgcccaggctggagtgcagtggtgtgatctctgctcactgcaacctccacctcccaggttcaagcgattctcctgccttagcctcctgagtagctggggttacaggtgcatgccaccacacctggccaatttttgtagttttagtaggatggggtttcaccatgttggccaggttggtcaactgactggtcaacaaactcctgacctcaggtgatccacctgcctcgacctctcaaagtgctgggatkacaggcatgagctgctgtgcccagcctatgttttaaatgaattccttaataaaaatatttttaactgatgaaaagggcttacaggacaaaaataaagtagttccttgacctagaaagacagaacccatcaccctctactaggcaagcctatgaagagcagtttgccacaggtggacttctctgtggacagatgacattagtgaaaaggaatgtaggacctttgagattgtaacttcttaggaaggtttgctgaacggaagaggaagtcttakgacaaggatgcaaacagaagctgccagatcttcagggatgtgtaggcagaaagccagagttgcgggttggtccttttatcgttagtgctctccagctgctkgggagttgtaactctgacaaatcagtgaagaggtcttcttatctgttcactgtgaattttaactccattttaacctgataaaatggaacccagagatacatgatgttgatgaataaacccaccaaaatgacaactgcctgaggccccgattagaataaccagaccccttagacatctgtactgtaacgacagatttgggccgggcgcggtggctcacgcctgtaatcccagcactttggagaccgaggtgggcagatcatgaggtcaagagatcgagaccatcctggtcaacatggtgaaaccctgtttytacaaaaaatacaaaaattagctgggcgtggtggcatgcacctgtagtcctagctactcaggaggctgaggcagaagaatcacttgaacccgggaggcggaggttacaatragccaagattgtgcctctgtagtccagcctggtgacagagcaagactccatctaaaaaaaaaaaaaaaaaaaaaaaaaaacagatttgaagatgttttttaaaaagccagttagtatttctgtgtaagatgaggtctttgctatctttctgaaagtagctcctttggtgtctgatttggtrgttacaggcacctttggagggtctcatacacttggctctcaggggcttcatgattgttgtctggggtgaaagtgaagccattttggcatctgcagagcactttggagaccccgacctaagaagtaactatgctcagttttccctaagcctcttctttttttgataacttcaggaggtctggaaaatgaccgcagttttagagctcctgataaaaccctcagccttaaaagggagttatcctagtggttctgtactccagggtgggaaggtagtgtagagactttttgagacactggtcttgctggttgatgaaaatgtttaggtaacaattggggatttaatttatataaaatgtactattatgcctattactaagctcaaatatttaaacaactttaaacttggatcatccatataagtagccaaagaaggagaagaaaccccttctcctgcatttctgaattgttttgtctgggacaacattaacctacagaggttcttaattcttgtcactgcatgagtggcatgcctgaggtgaggagatttcaagtctgatggagctacgagctctctgttgtgctattctgcttgtccttaartgggctttgactgggatgtttggtctcagtatttgtatagcttgcttaccttcgtaagaagaattatagatccttaaccaagttcacatcagccatttagcattctatggagggaggttcccagttccatatcagtggcctttggaggagactgtggtggccttgccataactccagggtggctctgatggtggttttacattaagagtttgtctctagagaagacacaaacattgcatgggaatacatttttatgatattattttgggtccttattgccttttttctctcaagatgttttcaaactgcagtaaacaatcaatctataagaccattgaaagtaaggcccaggagtgttttcaagaacgcagcaataaagtttgtgggaactcgagggtggatgaaggagaagagtgtgatcctggcatcatgtatctgaacaacgacacctgctgcaacagcgactgcacgttgaaggaaggtgtccagtgcaggtgaggagtctctccacagggattttgggaagttggtrtaacaagatgtccaaaataagagaagactgaacttgcaggggctttagaatcaactgaaaggggtgtgagtgtgtttgtttacatctacctcttttgcccttcacagcaagaaattgctttctgggcctggcacggtggctcactcctgtcatcccagcactctgggaggctgaggtgggagaaatgcttgagaacagcctgggcaacatagtgagacactatctcttaaaaaacaaaaaacaaataagaaaagaagaagctttctggaaagcagtgtgacattatgtaacaaaatccttgaccttgcatgctccttggtttagcagtcctatagttaaaagaatcttttttttttttttttttcctgagacagagtcttgctctgtcgccaggctggagtgcagtggcgcgatcttggcttactgcaatctttgtctcccgggttcaagtgattcccctgccttagcctcctgagtagtgggactacaggcacgcaccaccatgcccggctaattttttgtattagtagagacgaggtttcactacggtggccaggatggtctccaactcctgaccttgtgatccatccaccttggcctcccaaagtgctgggattacaggtgtgaggcaccgtgcctggcaaaataatcttttttatttaatttaatttatttatttattttgagacggcgtctcgctctgttgccaggctggagtgcagtggcgcgatctcagcgcactgcaatctccgcctcccaggttcaagcgattcccctgcctcagcctccccaataactgggactacaggtacgcaccatcacgcctggctgattttttgtattttagtagagacggagttttagcatgttggccaggatggtctcgatctcctgacttcatgatctgcccaccttggcctcccaaagtgctgggattacagaggggagccacygtgcctggcctttattttctttttgagacagggtctcagtctgttgcccaagatggagtgcagtggcatgatcatggctcactgcagcctcaacctcccaggctcaatcagtccttccacctcagcctcccggatagacaggactacaggtgtgtgccacctggctaattttttttgtattttttatagagatggggttttgccatgttgcccaagcttgttgtaaagtcctgggctcaagtgatccacccttctaagcctcctaaagtgtggagattctaggtatgaggcaccatgcctggcccaaataatcttttatttctttttttttttttttgagacggagtcttgctctgtcgcccaggctggagtgcagtggcgtgatcttggctcactgcaacctccgcctcctgggttcaagccattcccctgcctcagcctccccagtagctgggattacagtgtgcaccaccacgcccagctaatttttgtgtttttagtagagatggggtttcaccatgttggccaggctggtctcgaactcctgacttcgtgatctgcctgcctcagcctcccaaagtgttgggattacaggcgtgagccactgctcctggcygcccaaagaatcttttgggcaacagagataagatttaacaagggtataagatttaacaaggtttttttatggctacatcctaatagcaaaattttggaaacaatcaaaatgacagtcttgggatatgaatgttatcatgattctatatactggaatagtgtggaggaagtaggttacaagttagaaagttacccaggttttcattttttatatacactgatagaccagtgcctggcttagaagtaaaagggttaaacttcagttttctggtgaataattgagatttaactggatacagtgcatattaacgctgtaaatactgatggggagtagagttctggctgccgagtgtcttagctatggattgccttgtggccccaccttgtcttttttttttttccttgtctttttttttttttttgagagagtctcgccctgttgaccaggctggagtgcagtggcgcgatcttggctcaccgcaacctctgccttccaggttcaagctattctcctgccttagcctcccgagtagctgggattacaggcatgtagcaccatgcccggctaattttttgtatctttagtagagacggagtttcaccatgttggccaggctggtctcaaacccctaacctcgtggtccacctgcctcatcttttttttttttttttttttttttgagacagaatttctctcttgttgcctaggctggagtgcagtggtgcgatctcggctcactgcaacctctgtctccggggtccaggcgattctcctgcctcagccttctaagtagctgggattacaggagcgcaccaccacgcccagctaatttttgtatttttagtagagatggggtttcaccatgttggccaggctcatctcgaactctcctgacctcaggtgatccacccacctcggcctcccaaagtgttgggttgggattataggtgtgagccayctcgcccagcccatcttgtcttttttaaattaatgcgttaaatgaatgaaaaccaagggcaccaagatgtttcacaggtgattgctgtgttcccattcttttctcctatagtgtggcatttatgtgacctcacgcacattaggaagggacaaagtgtgtgcaggtagctctagcagcggagatgtctgatgatgtaggagtgggtgacrgagccaggaggtcttccccggtgatcttcaggtcactgtaacrtaactgtagcgtttgatttgatatggggccataatttgaattgctctgttcctgtctgctgttcttctccagtgacaggaacagtccttgctgtaaaaactgtcagtttgagactgcccagaagaagtgccaggaggcgattaatgctacttgcaaaggcgtgtcctactgcacaggttcgtgttcttgttgcttccttggaatgctgtgggtcaagtgtgtgtgtgtctttgaaaaacaagattatgttttgttcagatgagagacaccttatttttaatctcatatgccgggttgagtttctggcactccttagtttgtgacacttggctttggtgggtttaagacctgtttctatttctctttcatttccatcactctcctctttctcctcacagacatccactctactgtggttaatatttgcctggatatgtgtatatccttgaaagatcatatagtgttattttgtgcatgtatgtgtttttaatgtgccaaaatgatattctaccttaaatttacttttaaaaaattcagtatcatgttttaaagaattacccatattgtgctacagataatataacaaggtttttaatggctacatcctaatagcaaaattttggaaacaatcaaaatgacaatcttgggataatgaatgttatcatgaatctatgcactggaatagtgtggaggaagcaggatacaagttagaagggtaaccagttyttctatatgtatctatatgtatttcactgttggggacacctacatattgtttagttatatgattggctgtgttttacttacaagtcaccaagtggtagctacttccattgccttcatccccttgatattccagataggacacagatcacatcctcctacgtcccttcaggaacctgtgtgtttctctgggtactgaggagtgtcattgtgtagtcacagaggcaggatgtgctggtctctagagcaccactgctaggttgcctgtgtctgaggactccttatcctgacgttctggccaacgcttggaattaccctgctgtcctattagcatgatgagtataaagtaatctcttgttcttacttttttttttaacagcccttgtcctaatgcacttacttacatttttcttgagcatctctttatatttttcagctattcagatttctcctgtgaatagccagttcatatatttggttcattttttaaaaattgggtttcatgttatttcactactgtgaatttggaggagttcttatgtaatcatccatttgggcatacgtctcctatctgttgccattctcagaacagaaatctttaacgtaatcaaatccatcattttgttgtgtgtgtgtattttttaaacacatggttcagaaaagccatggcggatggttaaaaagatattttccacagctgcttctattagcttcataagttgtccttttacattcaggacttgaatctttctggagctaacctttccaggtgtccagtatcttttgttcggtcaattgttgctttaaaaatttcaaagctatgttattactaggtatataaacggacatatctctacatctttatctgctgttccttaccagtatataatgttccttttttacccttgcgatgttttttgacttaaattgtcaaaaagcaatattcagtttgctattctagtttttttgttcctctgatatatctatctgtcccattcttatatttttcaaaatttgtctctcttggttggttggtttgattttgtaatagctttattgatacataattcacactcatgtagtttgcccatttaaagtgtacagtttaatgatttttagtatattcagatttatgcagtcatcacaattaattttagaacatttacattactccagaaagaaaccctgtatcctttagctatgatcctccaatccccccattccccacractcagagcaaccactaaccaccctattctttatggagttgtctgttttgaacatttcatataaatggaattatacaatatggtttcgtgaccacatattgtatgactggcttctttcactgaacatagcatttttaaggttcatgtatgttgtagcatgtatcagtacttcatgtacttttattgctgggtaaattccattgcatggatatgccacattttgtttattcattcattggttgatagacatttgggttgcttccacttttttgctataacaaataatgctgctgtgaacatttatctatgagtttttgtgtggacagttcctttggatattattcaggaatagaatttctgggtcatgtggtaactatgcttaatcttttgaggagctgtcagactgttttccaaaatggctacaccattttacagtctcagcagcattgtatgagggtcccagcttctccatatcctcaccaacacttgttatcttttttattgtaactatcctargttttgtgataaggatgcaaacagaaagctggaggtcttcagggacctagtgaatgaagttgtgtcctattttggcttgattttggttttccgtgtgcatagtatgacatgttgcccatgtttttatcttttgggatctgtcactatcacattactttgccaaatgttaggaacctgatggcccggcacagtggctcacacctgtaatcctagcactttgggaggccgaggtgggcagatcacgagatcaggagatcgagaccatcctggctaacacggtgaaaccctgtgtctactaaaagatacaaaaaattagctgggcgtggtggcgggcgcctgtagtcccagctacttgggaggctgaggcaggagaatggcgtgaacccgggaggcggagcttgcagtgagccgagatcacgccactgcactccagcctgggcaacagagcaagactccatctcaaaaaaaaaccaaaaaaacaaatgttaggaacctgaatatctaaatcaagctttaaagaagcatttgctagctatgctcaatgtttcatcttcactgtaataataaaatagattgagaaaaatgctttcttttaaataaacgtaagtaaaacaatttgaaaacgtttgttcttatcaaacagccttttgttcccttgatattttatacaaaatagtagatagcagagkataagttcctgataaggaatcagtattttctagcaggaaaagctagagaacaacaacctcaaaaaaaaaaaaaaaaaagaagaagaaagaaaaaaagcaattagcatttcacaaccagcagcagcarcatcacctgggagcttattagaaatggaaattgtcagtcccctccctggatctactgcatcaaaaaatgtgggaagggaggccagcagtctgtgctgtgtaaccttctgtcaggtgatttccatgcatgctaaactttggggaccatgctagatagatgataccattttcagaattattttcctacctgtctaatactctgactttagtcttttaagaacagatgctcaacagatatttattgagcattttttaatgtatcagggcagtatcatataccaaaaatacaataatgatccacaatataaaccttccctgagctcactggacatcatactttcagtaatagtttgttaaatgactgttgacatgatgaatgcccagtgctcatgaaaggttttatgagaaccagaggcaaagtgcctggttatctgttgggtacttaataaaccatcacttttgtttgaaactggccagattttctgtacattttgtgttactgctctgaaaccctctaagtcagaattcttttgattggcttcattcttcagctgaaaggccagtccagagctgtggatatatagtccattgctttcataaagtgttttttttctcctcctctatttgtgttgacttttagctacttgtgctattcattttccagaatgattcactcattccatcctgtctctcccagtttaactttctttggtgggttttctttggcattattggcctgggcacagtggctcatgcctatcattccagcacttggaaggccaaggtgggaggatcccttgagcccagcagttttacaccagcatggtcaacacagggagatctcgtctctcaaaaaaaaagaaagaaaattagccaggtatggtggcgtacgcctgaaatcctaggtacttgtgaggctgaggcaggaggattgccggaacctaggagtttgaggctgcagtaagctatgatcacacccctgccttccagcctgggtgacagactgagaccctgtctcaaaagaaaaataaaaagaataattgatttatttaagaaatatttgtagtatacctataatatgatagggattggagataacttaatagatttgatcattgctgtcatggggctttccagtctagtagagggaaaacagaaaataacattaaatatatatatataaattgcaaaacatatgcaatgaaggagagaaggagtgtgatagtgcataatggaagtgggaggccacatcaacttagcatcctcagggatatctcagaaaacctttgagacaaaacttaatccataagaaaagccagctaattgccccaaaagagtggaaacaccagcattccaggtagaaggaatagtatctgttaatattgaaggaactgaatggaggttgtcatagccaaagcagtgggctgtgggagagttgtgtgcgatgaagtcagggccagatagggaaggccgtggagttcttttaagccttcatacaaagtttgcaatttattctaagtaatagcacataggatattcttttatatatgactgtgagatgcagaagtggagaccatgcattctaactggggcttgggaggccagggactcatgcagcctagcctggcacatagccaggcactcccatttaaatgctgattgctggtgagatgcaggctcttgtcctagctctgtaggtcactttttgcttttgcaaggtaagatgctcacttgtatgagaaacagcgtattatgcacctgtagaactggtggacctgtgactcattctttytgttatgactggtgtttgcttccaggtaatagcagtgagtgcccgcctccaggaaatgctgaagatgacactgtttgcttggatcttggcaagtgtaaggatgggaaatgcatccctttctgcgagagggaacagcagctggagtcctgtgcatgtaatggtgagcagttttattcccagtccagcagcaggagaaaacatggcctttgtctgccaggctcccttcctccatttggaggttgtgcgaatgacagcagtggtgagatccaagccgaggatgaggggatggggaagggcagggtggtgtctggagacagscatctctgcatgcagatccaccatacctgggagacctatcctgttggtgtttcttcttgctgcagtttcaggccatatggcaggctttgaggtgggagaggagggaattttgttgggggtgagtgggtgggtaggtagaggtgtgtcctagccttcctctgctccatatcatacaaaccacaaaagcagcagtagctatctacattacattggcatggaactaggatactcctgcaacaactccaccagagagagctgattccaggacctaaccccactagatgaggatttttgcagttatcaagaaggctgggtctgctcccctctgatctcttagagcagcctggggcaggagcctctctcctgctggcctgtcagttttccttaggtttctgtgctattttggaacccctgggtttgagggcatcctcatggactggtcagggactggctggactctgcttcccaccccacttaaaccatgggagtcgatgagggagttctcttgctttcaaaatagacagagagccaggtgtggtgactcacacctgtaatcccatcactttgggaggccgaggtgggcagatcacttgaggtcaggagtttgagagcagcttggtcaacatggcaaaacgctgtctctactaaaaataaaaaaaattagccgggtgtggtagcgtacacctgtaatcccagctgctagggaggctgaggcaggagaattgcttgaacccagggggcggaggttgctgtgagctgagattgcgccgctacactctagcctgggcaacagagcgagactccatttcaaataaataaataaataagtaaaaaataaaataaataaaagacaaagaacccggtagttaaataaaatcactgggttggaagctcaccatccatacagtggagtgaggaactcttccaagttcaataatgtgtaggtaaagaagataggttgagggcagtgtctcacatctataatcccagcactttgggaggccaaggtgggtggatcacttgagctcaggagttgtttgagaccagcctgggcaacattgtgaaacctcacctcttaaaaaaaaaaaaaaaaaggtaacacgtagcagatgccaaataaatctgttgtgttgaatgccaagaggcttggggtgctctggaaggacagagcccgacacagtaaaagtccaagaaatattttataaattagtgaatgatgaaaaggttttctttttttttttttgagatggagtctcactctcgcccaggctggagtgcagtggcgcgatctcaggtcaccgcagcctccgcctcccgggttcaagtgattctcgtgcctcagcctcctgagtagctgggactacaggcaagcaccaccacatctggctaattttttttatttttagtagagatggggtcttgccatgttggccaggctgttctcgaactcctggcctcaagtgatctgtccgccttggcctcccaaagtgctgggattacaagcgagagccactgctcccggccttttctgaaaaggttttctttttgcttgtttttgtgttctagttgatttctttttctcctaagtatggtttaattttctggcatttctgccattcttatgtatgcccacatggctcacagatgcccggtgttttatcctgtgacctgtcagagctgttcttgggaggagttgtggagctttggctgcagggctcatgctcctggggtcactgagctccccacccaagggtggacagttgtgtcccagctgctctcgctttcagggagccagtgtgggccctgaggggcacactttagactgaaaaaccaaggattgaagtcagcagggtgacaagaaagttgggacaaagggaagcatttagaagagcattgtgaggggcttgaaggggagagaatagttagactttgaagagaggtcttgaatctagaatggatttttctctgcatttttttttaaaccttgtggcctctgtcactgaaggctgaggagtgtgacctcagaaactactccttggtgggggctatggatagtattagctatttaaataaaaaataaatgtgatttcttacctctttgggagcatggtcagggaggaaagaggaggcaggaggagaggyaggtctcagaacaatccagctgtcaatgcgtgttctctgttccagaaactgacaactcctgcaaggtgtgctgcagggacctttcyggccgctgtgtgccctatgtcgatgctgaacaaaagaacttatttttgaggaaaggaaagccctgtacagtaggattttgtgacatgaatgtgagtatttatgtacagctttttctgtaacagccagataggaagtttttattttgtaagtacwtgattttgcagatgaaaacaaatcaaaacacaagtggggctacatccttctggcccattgttatctacgggtattacttaggaggagaagacggagtgctttcaggtccctgcctgtagtttccttctgtggtgggaggctttgagcccagagactgagaaggactggggtggggactttatggtaaagttggttggtttcaggcagtgggtcctaattatgttttcctagattacttacagaactgactaagattgcaaaattattcagggtgtgattttgaaacaggtgctgaatgagtaggaaagacctagaaggctrcttgacttacttaagccagacccttttgttctctagagaagcataatttttctcatgcagaatgatgggagagggttttaagatttacgaggcttcacagggagtctggctgtgttgttcactgtccactgtgtatgtgtagagtccttactggaatgcctcatctttagcaaactggtttccttgatttttgtctcctggtaattctaaatcacttgtaaaaatggagtaattatgaaagtgttaatgacagatgttctactttcttgggtactcattaygcggaagttattgccttgtgtcaaagatgggaaaacgtttgattttaatgaagccctttacatgtcagttatttttataaagctacattgcttctgaatacattgtgtttgggaatgatgctgtatgtatgttttttcttcatagggcaaatgtgagaaacgagtacaggatgtaattgaacgattttgggatttcattgaccagctgagcatcaatacttttggtaggtgatttccccagattacttactgagagctgagtcaatttctgtgatgacattagaaaagtgtgctttcagagtgatgtgctttaattctgcagtagaaggtggaactattcacagctttagttakgaaacaactttgttggctagaataaaatgaactcatagatagtctgtccccgtggagcttggatgcacagattttctgacaagggaaataaagtcaaaatactggcttccttctttacccaaaaatatccatgtgattagcataagcatagtttaatgctatagactgaatcctgattgatgtaagagtgtttatttgactgaatgctatatactgaatcctgcttgatgtaaaagtgagcctcatattttgcagaagcagggtatatcatgttgtcacgagtccataatttaatcacaaaaataatatccaggtaacaaaaactttgtcttcttaagcatttactagtagtagcattccatattaatctgttgacacagctactccaggtaacatgttgaatattctgcaatctcttcctgtcagccagtatatgagggctatttctttaaaagcacttggtatggagagatggtgtggtgtaatacaggcagcacagacattctgctctcggtagtatgtctagccagcagctctggcatttgacacaatggtaatatcctaagagcatttcactttagatttgtgaagtacttggtcaagacattmactgtttggaattgttcacaggaaagtttttagcagacaacatcgttgggtctgtcctggttttctccttgatattttggattcctttcagcattcttgtycattgtgtggtaagtcatcaacttttaagtaattaaatgttttatttaaattttgatcaaytccaaccatgtaatctctggaaaaggtaaaacttgttcttagcaaagtttggcctgatatttccaatagctttttttgttgttattcctaggggaacatgtcttgtagaaagcttaactaatggtcttttaaaaaaaatactatttttgtgtgttggtgttttaatatataartttcttaggaattttatacttttaagcataggagactgtttaactggatttgtccaggtcctttgatgagtaaagcccttattkaagagcattttcaggctgacttcgttgcaatagagcaaatatcaaayatcggcatttcagatgttccccatatatcatgtagattattggcagcagatggctatgtcttcagccttctgcacaaataggatgtagggactggggcccagctgtcatatagagtatttacatcttccccaaaaaataagagtaagcagtcttttctgttctcattcagaatcagtaacagctacaagttgaattgggctttgactaaggaactcctggtcctttataaatttgaggccctttttcataaatgttcttacgaatccattcacttgcatctgtggggaatggggatttgtctgctgtagagatgagaaagtcacacccaggcttccagacttgttttcccaaactctttcatagtggccttcctatgagcatttaaaaattccagcacaactctgatgacaaaggagtttttcctactgcctccttcctttcctttcctgctggcttctcctgcctaggggccatctcacagagcagctcttcctcagggtggtgagcatgatgggtataggaagatctctagggagcacttgtgctgaagaaagctgaaggtgacgtgcttgaagctttgacagatgtctctggatgacagtgccatccatcacgattgcttctattggaggatggaacctattttgtttacagggaagttgcacatgtggacaaggcacgacccttgatttcagagcaaagcctccgataggagggagggccatggcttgtttttggtcatagaatgcattgatggcacccagacaggaagcctagtcctggattcttggtccttgccctctgtcacctattatgcttcagccacaggcagggatggggcagcagatggccatgtggttagccttctgcagaagtaggatgtagggattgaggcccagttcctccagcagagcatggtccacagaaactgtggagacagctaagagagtgaggccatgggccggggcagtgcgaagaatgctgcaggcccagccacctgggtcttcctaccagttgcccttccagtcagtgcggtcctggtgtacccagcatctgggacatttgtcatttcatgcacaggaagatgcctttattattcccctgcccacagagggataaatttctcagaaaacatagcacttaaaccttgcctctttctgtacttaacgccaaaatgtatttcctttgagtgcaaaggaaacacttctagactggtggcataactaaagcttgggtgagaaatggattgtcatctgttgagcctgctatcactttctacaactcaggttctaagttcttcagttagtgttaggaatagcctgtgatgaartagtactcactaactgaattgtatttgtagggaatgaccttcttgctgtttctttctaggataagaaattggataaacagtatgaatctctgtctctgtttcaccccagtgtaagtataccatatgaaagaaacataatcttcgcctggtctgaggccctgttaggcaaagaccttcacctgacccagcaagagctttcactggctgatggaaggtcatgttgcagcaggaagggtctaggttggaatgtttacccttctgacaacagtgatggtgaacttcgattagttgcatggatggacatttaaagagctgtgctgtccccttcccaagccataaggagtgatttagccattcaacacttagttaatattttgagttcaatttctctcttgggatcttaccttgagaggtttgaatcctcttttgggtcttcaaatggtaagtaagttttcaggatgcttgaaagctagtaattactgtttttgccattaaaagtaatggcattaattacttttgcaccaacctagtattttttagtcacttaggttgagtgagcctcacctagcacttttttcttagcatcacagtgccaacagaataagaggctgtttgatgggtaagggtggagctgtgaggacctccgattcatcttttattcctatcaatcaattgaacccatgtctttgcagaacgtcgaaatgctgagcagcatggattctgcatcggttcgcattatcaaaccctttcctgcgccccagactccaggccgcctgcagcctgcccctgtgatcccttyggcgccagcagctccaaaactggaccaccagagaatggacaccatccaggaagaccccagcacagactcacatatggacgaggatgggtttgagaaggaccccttcccaaatagcagcacagctgccaagtcatttgaggatctcacggaccatccggtcaccagaagtgaaaaggctgcctcctttaaactgcagcgtcagaatcgtgttgacagcaaagaaacagagtgctaatttagttctcagctcttctgacttaagtgtgcaaaatatttttatagatttgacctacaaatcaatcacagcttrtattttgtgaagactgggaagtgacttagcagatgctggtcatgtgtttgaacttcctgcaggtaaacagttcttgtgtggtttggcccttctccttttgaaaaggtaaggtgaaggtgaatctagcttattttgaggctttcaggttttagtttttaaaatatcttttgacctgtggtgcaaaagcagaaaatacagctggattgggttatgartatttacgtttttgtaaattaatcttttatattgataacagcactgactagggaaatgatcagtttttttttatacactgtaatgaaccgctgaatatgaggcatttggcatttatttgtgatgacaactggaatagttttttttttttttttttttttttgccttcaactaaaaacaaaggagataaatctagtatacattgtctctaaattgtgggtctatttctagttattacccaaagtttttatgtagcagggaaaatatatatctaaatttaaaaatcrtttgggttaatatggctcttcataattctaaaactaatgctctctaaaaacctaaccacctaccttacagtgagggctatacatggtagccagttgaatttatggaatctaccaactgtttagggccctgatttgctgggcagtttttctgtattttataagtatcttcatgtatccctgttactgatagggatacatgctcttagaaaattcactattggctgggagtggtggctcatgcctgtaatcccagcacttggagaggctgaggttgcgccactacactccagcctgggtgacagagtgagactctgcctcaaaaaaaaaaaaaaaaaaaaaaaattcactatctacaaacctagamtatttaaaatacaaagattgcctgttttcaaacactattgaataagagggtgagatatttcttaacaacaacaacaacaaaaaaaacaggttgttttgaatgtgatgagccagccaggagatagaatactacctgcccttagggttgggggctgtccccacaagacttgatacttcagaaaccctttttattgacccacaagcagatatttgaattacttcttactttattgctccaggattcyggatgggctgcatttactgtgtgaaggataaaaatcattagcctggattctgatttctataaattgccattaaaagctttttttcccctaagaactgaaatgtgctcaccagccaaaacattttaacttgtaaattttgagggcagttaaccaaacctgtgactaatcatatctcctcctaccccccatttccaaggacatttgttactcagatacttgttatactaatacttgaacttgtaccttatggtatttgctatcttttaactagtcatgatattcttatactttagttacacttytggaatttgatacaaggttgagtggggtgtgtgggtgtatgtatgagtgaaacagttctcaaaagaatgtaagaaaaaccatttttataaaattgtgactttttaaaaacatagtctttgtcatttatagaattaacaagctgctcagggtatattttatagctgtagcactgatatctgcattaataaatactgtcgaaacacaatggacctaagtataaaacttccctgaaaaatcatctaatacttttattattaatatcagtggcaaaggtttaagcctgaggaaaaaagcktacctctacgtattgacaactttgagttctgtagataacaagcagatttgggtctcctgtgattggctaatggtctccatctcccagcagacttaattcaggttttgcttctgctacatcccgccagtaaggaagcagcaaaggtagagaagagacctttttctctatcaaaggccagagatgcgagaacaaaaattcattcccctttggagacaaatgtagtccatctgataaataagatgagaagtcctagaagggagagaaatcggttaaaggtgggtaactggccacgtgtggtagctcacccctgtcattccaacactttggggccgaggattactggaagacaggagtttgagaccctgtctctacaaaaaattttaaaaatacaaaaattagctgggtgtggtggcaaacacctgtattcccacctacttgggaggcgaagatgggaggatcacttaagcccaggagttggaggctacagtgaggtatcattgcaccactgagttccagcctgggtgatagactgtctccccccacagcrcgcgcgcgcrcrcracrcrcacacacacacrcacacacacacacacacacacacacaaaaaggccggggagggagggtataacttttctaaatgccagtgtgtaccattctctcatttgtggccctgcgacagaaatatcaccagcccctttcattgtaggcatctgaccagaggtgtcttggactacagtagcactgatgtgctatttacgtaggtgtttgaacacacagagaaccctgactagtgctatagtgctgtctccatattatagaattgagtttcatgaaagtcactcaccattaagtgagctgggacctcattccaggtcttctgaatcatatgacatgattctcaggttatttgaaagaaccttaacaggtaaatatggcctattaacgtaatcagcaaaaatgaaaaatttggtattaggagtgttcaggggccccatgagtcaatattgtttttgactctaggcaggtttttaggyagaaagaacttctaccatctaacctagaacagtaattgctgggacacaggagtccagtctccctcccattgccctgaactcaagagtacatatttaaaaagatacacatatttttggagacagggtcttgctttgctgcccaggctggagtgcagtgacatgatcatggctcactgcagcctcaacctcctgggctcaagcgatctttctaacctcagccccctragcagctgggactacaggcacgtgccaccatacctggctacctggctaatttttgtgctttttgtagagatgggtctctcattatgttgcccaggctggttttgaactcctaggctcaagcaatactcccaccttggcctcacaaagtattgggatcacaggcatgagcagccataccaggccctgaactataagaattttacccatacagccatttctttcttggggaagaatctcactagccaagagctctgttagaatctgggtggccaactagcttatgtgacttttttttttttttttgagctagagtctcactcttgttgcccaggctagagaacgatggcacagtctcggcctaattcaacctctgcctcccgggttcaggtgattctcctgcctcagcctcccaagtagctgggattacaggtgactgccaccacgcctggctaatttttgtatttttaagtagagatggggtttcaacatgttggccaggctggtctcgaactcctgacctcaggtgatccacctgcctcagcctcccgaaatgttgggatgataggcatgagccaccgcgcccggccttatgtgacttttaatagaccagaaatttagatgctatcatataatagtagcacttcttcttcggccttggttttctcatctaggcagtttgagatgagatgatctctaaggacgaccctctcagttttgtattaaattgaaaaagacatgtgagcaaaactagcccaatagtttgcagtttcctttcctagacaacagaactctagatgtcgacccttttggcactcaagctgccaaggcccctcctaatctggaattctggaaggttccagtactccagggtttcagaggaagactagaggcctagggtccagatctgcttaggctctcagggcctccaaaggtgactggtgactcggcatccacgtggtagtatgactttcccactggtgaccattttccctattacagatggataataaatgtgtaggtcattggaacgattggtatggattaatatttaggggagaggaaaaagttggcacttgggttagtttcttggctgttttctatgttgctttgtccaagtagcctaaacctaacagctaggaatagaggaaaccggtgaggctgtgagtcttcccgtttgtccaaagagcttcccgcacactggatccttccttcccttgagtacttcaaatatcatcagtcccgtccaagctttctctctggatcccagcatagcaatgaartagcctttaatgtgccctactgaacaagctctttacaaaagagtagcacaaggtcacagaaaaattaaaaaagaccagtgcctgtctgcccctcttcaccagtatctgtgtggaacctgaatttagccatacctttccttgccctaacctctggccaccatggacctgttctgttactgcagtcttgcctttttttggggggtgggctggggagggtgagacagtctccctgtatcctccagaccggagtgcagtggtgtgacctctgcctcccgggttcaagcgattctcacacctcagcctcctgggtagctgggattacaggcgcgctccaccatgcccagctaatttttgtatttttagtagagacagggtttcgccatgttggccaggctggtcttgaactcctgaactcaggtgatccacctgccttggcctcccaaagtgatgggattacaggtgtgagccaccacacccagcccaagtcttgcctttttgagacaccaaaacagatggactcatgtagtaagtarccttcagagaccagcttccttccctcagtgaagcgcctcgagagtcacccacgttgctgcgcttgtcagttcctcctctttattgccgagtagtatcccattccacggacacaccagtttccctattcatcacagaaggacactggcgtgtttccagcaggtaggaataatgctgctgtcaacagttacacccaggttctgtgtgaacatagttttcatttctctagggcagataacccaggagtggactgccaggtcctccctaagtgtatgtgtgactgcgtcagaaaccagctgtctcctgagtcagtgcaccattccatgggacctgctttttaccttttatatttgtgctttcaggctttaaaacaaagtaacttaattagaactacatatctcaaacagttttattagccaatactgtatttaaattcattgttttacctattaacaagttttagctttctgccattctctgtatgaaagaagaacttggcctggacgttcataaatatgagccatgtgttgctcattgatgtcactgcgcactaactcctagccaaggagcctggctgaattaagctgctgggcttgtgagccatcctggaacctccattcctcccctcccccaagcctgtttgttttcattggctawagggatgactgtcttagctaagcagggcctttctagggaaagctgctgcacacacacctggtttacttctgtgtgatcctatttaccccgagaggaccgagcaagccaccgtacctggctgtcctgcatcagggtccacaggtcaagtacrtcagtcccacagtcttgggccacttgtaaacacgcattggcatattcaccaacaacagagttcaggcgatttagtttgcaacctattgamgagaagaaatagaggtggcagttggtaaacccaagtgctggcccttgtgtaagttctgctccactcatctagacagtttcaaaatgccattaaatattgaccccacttgggccagccccggggtttagggtatatgttgatgagccttgcaggttactggtgtgctgctctacccagcagaggacaaggtgcagtgggaagaaggagccttcagtggtaaccggaatcttctgaggcgccagggaggatgttctagaggacaccttgaacagaggcagagaggcaggaaaggcccaggagggctgggctgcttggagagtgccggctgcaggagctgggctgggggctggtaagggctgcactagtaggaaatgccaggccatggaagctgaacgctgcgctgacaccgctggcttcttacatgtaacagctggaccgcaacacagcaaaatcatttgtcggctttagacaaagagaccttcgttttgatgcctacaattttcactaaatagcggtgtgcctgaacagcttaaccgtcctgaagctttctgcattcttatgatgacagtgcctacctagttgcaggaatattggcaggattaagagactaaacaccagcaaagcagctagcacagaacgattgagtgtatctaacacaagtgcaggctgcctcatcctcccagggagctgcaccagggaaggctggagtgcagtatctggggattgtgctaggttggtttggaaggtggggctggggctaggggagaaggctcaggaggctgcaaacaggacagtgagggctggcgagaggcggactacagaatggtattaaagagaaagcatgaggatatgggcaactggatgcgggccacaggaggacctatgctggcccaggctctacatcacagcgaagaaactattcaccagctttgattcatacttgggatcaattgtttataawattcacctagattataactagctaccccatccctacaaaaaaatttaaaaaattagctgagcatggttgcacatgcctgtggttccagctacttgggaggctgaggcaagaagatcacctgagcccagaggtggaggctgcagtgagctatgagtaatccactgccctacacagcctgggtgacacagcaagaccatctcaaaaaataacctgctgaatttctaggggaccagttattgagatgtgacccctcctctacctgctttgcccatcactgaccttttaaaaagtctgcattgggctacattcaaggctagaaaggggaaatgaaattaaacattcagaatttcatatatattattttcctgggaaacagtagacaaaaagaagtctaaacagcttctgtggaccatgctatgtaacatttttccccttttgttaaagccaagatgacactgccccccaaagcagttagggctgcaggcccagaagcaagctggggctctgaagttgtctccaggggagctttgtgggccttaaacacctccccttccctgcagaacactctggtgtctcatgcacagcaatagggcccctctgccctgatgtgatgcccagaacctactgtcaccacgtcccgcaggctggggtttctccccgtttgtctgtgcctccggtgtgtggcaccccttggcatatgctgtttgtgacttgagaacgcattggatccttctctaaggatgacaggccctttkagagcaagggacatagctacaaccccactcaacagtaaactcatacaacagtaaggacttgagctgtgaagtcacacttgctggatttgattcctggttgtgttgctggctgtgtgatcttgggccggttacttagcctctctaagactccatttctccactggtaaagtagggacaataacagccttccatgaagttgtggtatgtgtgctgtggtgtgtgtaagaaacatctggagtgctgaaaatgggtccagaaatctacctaaaaatcccagttaactcagagtcagaccacactttgagaaatagctgttctgtgttgcaaagccagtcatttgtcctagaatgttgagttctgggcagcttagaaaacttccagtccaggaacggtggctcacgcctgtaatcccagcactttgggaggctgagtcgggcagattacctgaggtcaggagttcgagaccagcctggccaacatggtgaaacccgtctctactaaaaatgcaaaaattagccgggcgtggtggtgcacacccataatcccagctactcaggaggctgaggcagaattgcttgagcccaggaggcaaaggttgcagtgagccgagatcgtgccactgcactccagcctggctgacagagccagactctatctccaaaaaaaaaaaaaaaagagaacttccataatgcacattttcaacattaacatacagctgacccttgaacaacacaggtttgaaccgtgaaggtccacttatgtgcagaggtttttcagtcaaaggtggattgaaaacacagcacttgagggatgtgaaacccaagtatatggagtgctggcgactcctatctgatcattcctacccccagcttctgtggaccagtaaaaagccccaggtgtggacttccaagtcaaggcacatcagcatcagcccccgcaggccgagcaccacagctctacacagatctcagtggccttcatgtgcaccctggagtctggtaactgtaaaggtcagcagatgccaggcccgcggttccctcctgactatccaaagccagaatcccttttctaggtcaaaaaaggtctcaggtataacataatggaagctataatttaataattttggattgaaaacagactgaaatggacatacygagcccctaagaaacagaagccccaggcaggaaaccactgtcctatcagagttcctccctcagcattcctatccagatttgccgagattggctgtggtttgtttaccttgtatgatgcactgttcttcccaggctgtttcacaaagtggggtcggcgtgatgagaatgactcgattctcagggatgtccacggacttcaggtactgcaccatgctctttaggttcgcagcgtactcctccaggggaatgtgctgcttgggattctcatctgctcaagagaaacatgagtcctcaccagatgcatatttattataagtgacaattcaggtgaacacacttctgcaaatgcctgttattcatgatgtcactggggggattgtttaacaccaaggacacaaagagaaggttttctccttatgaattaaaatgtatagttcttcataaaacaagacttcaaaggctctaactaggggcaccgtaagtactcttgtcttttcgtcactagtatccagatggttattacatcaattaggttgaatttgtaaagaaattaaagagcccaccctgttgggtgagacggcctaggttcaaatcctggctttgtcactcctcgccacagaaccgcagataaatacttagactttctgtacctcattgggaaaatgaagataataaggtctccctcctaggactgaaaatcaaaacagctaagagtttacagcactgagagcagtgtgccttcacaaagcaagcactcagtctaaacaaatggcacccacgaatactactattattgcaaaggagtattttctagataggctctcactgaagtattacaagggtcattgtttaccatttgctaaccacatgtaagtacagtataaaggaaaaaagtcaccaatgttcctaccacccagaaaaccactgttggcatttggatgtrtatctttccggtcttttcatgaagatacatacacttttaaaaaaatgagtttgcactgaagattatattcacactgaagacttcatattttgcttttctctacaaattgttttagagacaggttctcgctccatcacctaggctggagtgtagtgtgatcacagctcactgtaaccttgaactcctggggccaagcgaccctcccacacctcagcttcctaagtactgggactacaggcacgcaacaccacactaggcaaactttgttgttattgagacagagtctcactctgttgcccaggctggtctcaaactcctggcctggcctccagtgttgggattacaggcatgagccaccacgcctggctcacataacatattatgagcttttctgtgtccataaatagtttgcaaaaaaatgaaatttagttgtagggtgaccacatgatgtttccgtactgtacagcttgtaatctactgttatatataaatagcaatacacggccaggtgcggttgctcatgcctgaaatcctagcactttgggaggccgaggcaggtggatcacctgaggtcaggagttcaagaccagcctgaccaacatggggaaaccctgtctctactaaaaatacaaaaattagccaggcgtggtggcgagcgcctataatcccagctactcgggaggctgaagcaggagaatcatttgaacctgggaggtggaggttacagtgagccgagaccgtatcacttcattccagcctaggcaagagtgtgaaactgtcaaaaaaaaaaaaaaaaaaaaagcaatacacagaaatctccgcacacacatctggctgcgtatctgaatatttccttaggttgaatttctacacgtgggccgtcccttggcgcatattgccacacagctttccagaggatcacaagctattctctcaccaggaatgtaasagttccaatcttatttcatgcgtgtcagctgtaagtattactgcttcatattgcttttctgagtcaaaaaatcaaaataccttgttttaattggcattttttgataagttttcacacattttcaaatatgtatttgctgttaaatttcgccttttatctattcctgtcctttgcctacatyttctattggagttggtatttttcttattgatttctacactaaagacattactctcttgtctgccacattttgcagatattttccttaacacatcattttcttcttcagttttttcgcagcctattttatttcataaacctgtttttcctctgtggcttcctccactgctcttatacttaggaagtgttttttccttatgctaaatttgataaaaatttatctttttaaaaaattctgttttgagttttcttatggtttttggtacaagatagaaagtgaagattaatttcttcccaaatataatggttagtgtgcagtctccaccgatacctgtcatctacgtaatctttctcctagagagcaagaattcctcttactgcagttggtgttcyttcatgtccagcctcaactcagaggtctcctacggtgtgcccgtgaatagcagaccacagcacttctgtgacacaagtagggtaacaaaagaaatctctggaaggtgactacctaacttcccaaaacaaaggctgatttttctcgtcgatagcacgcagaaggcttttttcaagagtagaaggggaagaaaggcctcttacatggctagctttcctctagtcacagcagcaattcttcagcagtcarggagagaccatctccttttccaaacccacgttcaccattgcccaggattcaagcctaactgaggtcagggtggctgctgccctgacatatccctccctaagacacgccaccagctgccatcagtgtgatgcaagccacaaggtatccttaagctttctgctgccaaatgcatcaactaaagagaacacattacaaacttagcatagcactaacagactctagaaaatatttaactgtttgcaagattaggactgccagcaaccaaggtatgtagaaactgagtcaagaataaaatccaccagtgttaaagccaggaatacatataaacaacataagtttggcaaaactgtatctattgggagaaagtaaacagttgaaaaaagtatattaaatgcaagtttgctgtaacataaaaatgattaaaagtgagctagaagaacatcaaaaatgcttttaccttttagtgcactgtcattggccccaaagaaaattgtaactgctactgggatgtccaaactgtttcctttcctgattaatcttggaaggataattttggcccacctggtattgtaacctgaaaatccacgattcagaacatcacattttctgaaacgaaaaattttaaaaagatgaattgtgggcaagaagtgtttatggtcgcagtaaccggcctttagtgagggtgtgctctctgggattctaaacccgtcacgtgtctctgagccacccccaggtttcactttgataggagcaagaacatagctgaagcatgctaatcttaagccattcaaagatacaggtaaatacaccatactcctccgtgagagaagtaattatatataaaggggctgtgatgaagtctacagactacctgacttcaagcatggtatagtgaggtgcttttaaaatggagttcacaacagatagataatctgagcaagtatctcaggtaaaaagtcactaatatcctggaacttaaatagtttagtttggtttatatttaaayagtctatagaatatttgagatttctggttttgattaaatagttttagtaaatacattcgttgtgtttcaacttaaaccggttaatactttttgtttccttcttaaaaacagttggattcacagtactgtaggtgtaatgggggaaaaaaaaaaaaaagccgggttgcctggatttgtttctcggctccctgtgtgactaggcgtgaccctgggcacgctgtgctccttcctcacatgtaaagtgaggagaatcccagttaaggattcgcatcaggcagtaggtttgaaacccctcagagaataycagtcacataagagggactctttttttcttagtcttggtaaaatgatatgatttgggatttgcttcagaataatccataggagggatggatgggctcatttcactctttgcttctgtagatatttaaagttgtccataaagttttcttaaaatgacgcctggggttcaacttatgattagtaaatcaatatggttcattttgctgtattcacattcccatacatgcataaccaagcagagaagctggggcacccgcggagaactgcaggccacagcgtcaggcagcrgctccaaagcagcacaaggggacactttctgacactgctcaaagttctcaggtggcatttataaactgcagaaccaccaccgaaactcagccttatttctaagagattgtttgtgtgtgtaatgattataaaatgcgactagccattttacagagtgaaatcacaatactttaatgaagtgctgggctgggtgtggtagcgagtgcctgttggtcccagctactcaggaggctgaggtgatgatgccttcagccccagaggtggaggctgcagtgagccctgatcacactgctgcactcaagcctgtgtgacagagttgtcaggcctctgagcccaagctaagccgtcataacctgttacctgcacgtatacatccaggtggcctggagcaactgaagaaccacaaaaggagtgaaacagccagttcctgccttaactgatgacattccaccattgtgatttgttcctgccccaccctaactaatcaatcgaccttgtggcattcctcccctggacaatgagtctcaggagctccccacagagcaccttgtgacccccttcccctgctaacaatagataaccacctttaactgtaattttccactacctacccaaatcctatagtactgccmtacccatctccctttgctcttttcagactcagcccacttgcacccaagtgaataaacagccttgttgctcacacaaagcctgtttggtggtctcttcacgtggacgcgcctaacaagagaccctgtcgcaaaacaaaaaccaccaaaaaccaaaacaaagtgcggtagaattgtgacaaggtgagtcttaagtcatggcagcacttcaaaaaaaggcaaagtagcttcctaccagtgtggtgtagcagtgaaactgcaagttctgcagtcatagcagctggacttggatctgtctgcccctgactagggaagaggccttggccatttccttgatttgtctgagtctacccagccatcagtgctcaaccctaaaatatctaattggtcagactgagtgaagagtaaatgttttctgttccttctcctatatactgattaggggaggcaagcaaaattaataaaggaggaatgttctgttcagaactatccttcatccataagacggatccctaagacattttccatccataagaactcaagtatcggaaaccattctcacctgaccascctgtcrgccagcgatgctccccatccaccctgctggaaggaaaactggaggaagaaaagcccattattactactaatgactgtaaccgggcatctcagygagggcagttctgattggcaacttcygttttctcggcgctcccttcttggctttgattgcttcactccaggaggtcattttggggattacaggtaagtacacctggcagcactttagcagagggggatttttctctatcaaaagctaaacagcctgtattcccagcactttgggaggccraggcgggcggatcacatgaggtctcgagttcgagaccagcctggtcaacatggcgaaaccccgtctctactaaaattacaaaaattagcccggtgtggtggcgcacgtctataatcccagctactcgggaggctgaggcaggagaaacgcttgaatccgggagrcggagcttgcagtgagccgagatcrcgctactgcactccagyctgggcgacagagcgagactccgtctcaaaaaaagaaaaaaagaaaaaaaaaaaaaagctaaacagaaatctaagttcaggaaataaagtcaaaggtcagtgaggaaatgaaggccacrccgcctcactgctttgctggttaccgagctgagggtgaacactttttcatacacattcccatggaattcggcagctctgactgccccatatgcctaaacataatgttaccagttactggcgtatacacaaaagcctggtgaagcaagtcctgtctgagaagaggacacacacaggaatggaatttctactccctccccgaagtaagaacctgcatttagaagaccgttcccttcatgggaggtgagatgatcttggatgaacggatggtccttttctacctaattcctgaaggcgttttacttccaaggtcaacccctaacggccccacctgtgcccgcagggaatggggcgagagagctcctggcgcctctgcccggagctgrccgcggggcctcctrggacacagcgcgcggtcgcccgcggccgctaacccggacccggaggggaaaggccgctgcccaggagggcgctgaggggaagaccgcgcatctcgacccgggtgggaggcggcgcggggcgggcagcgcggccgggtcccctcgcgtctgtgcctggagcccgggctctcgcggacgccgtcgtgacctccgggacgccgcgggcccggaaggcgcagccactgggggacccgccactcctccggtgtctccacgggcgtggccaggcctccggcccagccgtctcgggcgccgaagaggacggcgaggagcctcggcctgctcggcagcgaccccgcagggaggccggggcgggaggccgagcgtcggggcggccgtacctgggtgatggagtccccgaagagcaacaagcgaggccagagcagggcactcccgcagcccgcggcctcgcacagcgccatggagcagccgggcggggcggggcggggccgccagccacgagaggcgcctgcgcagtggccgcccgtgggttgcgggagccgggctcgtgggcacccacgcagtcactttggtgacgcgcgaaggtcgttgccccttggagtccgtttgcaagaagctcggcctccgcgcttgytcacccacagcaaggctgcccccagggagtccggagcccgcgtcccgctgcgtggttcccggaagaaaagcggttgggggcccttctaagcccaccccgcgctccgcgggcgcaggtgcgttcggcaaagggcaggagtgtgacctcaggacgcgcggcgggaagcacagctggctctcggtggggcggagggctgctccaggcccccctggaagaggtcgtgggatgcgcgcgcggcctcctgcgcccagcgtcactctggagggcctgtaacacccacgaggacgcaggcactgcggaaaccctggcagtacctcgtggttctgcgaatgacaagggaaagcagctgcaccttcagtgcgcgcgcagccggccgcttttctttttcccgccgtggggtggatgcgcagatgcagaaccccgcggacacggagcactgactaacttccaagggattcacctgttaaaacgtggttgtaatgcaacgttcttacctcaactgtgcaatgaagttcggcagccgagctaaaaacgaacgggtgggaaggatgccttgaaatcacggagctgtagatgagtaacagaagggccaggggcgccggcgcagaggccgaccccgctccctggggcggggcgatgggcgtagagcatgactttctttaggttgctcgtcccaagctcgcttggatcacctgggggagctttacaactaagatccaacctagggccctcattccagccggactaactcacctcctggtggcaggacttgggcacaggtgcacttgtgatgcaccccacgtgattcccacgggtagcccagattgagagcccctgctagagcaagcaaaggtgcctggacttcatctttatcacaaggacttcattaaggccttcaagcagcagaggcttgaggccaggtctgttccaggaatcagctataggggaggagatggaggtggttgcaggaattcagaggggagagtagacttggactcgaacagcagcagtggagatgaagacagaaaagattcaagtgcaacttagaatccttattattaactcaaattggttaccccagrggagagggtaaccagcagcggttgctatcggcagatcttgatggtttcaatgggagctgcacatacatgcctggaagaagaatccaaaattctaaaataatgggcagttgatytagtagttagttctagaataatggacaaattaattagcratttagcagtattcaggctgttgaaataaaggccatttgacattaaaagtaaacaggctcccccagagaaacgaatgcattttattttaggtaacaaaagtagagtcaagtattttttcaaagttcatatacaggcacagtctcagtgaactggcgtcagggcctcgtacagtctctgtgcagccagctccaccatttctcggagggattcatcgtcttcacttccctcttcacattctacagtctgaaagtgaggcacaaacaagactgttagaattaagtctataatgattatatagaagataaatgaatactctttaaaaaaaccatcatctcataaaaaattagccagctgtggtggcgtgtgcctgtggtcccagataagagkctgaggtgggaggatcactgagccgggaaggttgaggctgcagtgagctgtgactgcaccactgcactccagcctgggcggcactgcgagaccgggtctcaaactaaaaaaaagaacaatcatctgtgtgtgcagaggtcatggtgggactgattaccatgaaacagaacggccgccctacacacttgtgggcgtgcagtgcttyctgacagcagcacggtcctaattagtgatgacttgaggctggggtgaaagactggggaaagtctagtaaactacatttacatcaaagcccacagtttgatctagtaaatgatactccagggaagttcatctatgccacacaaattacttggcaaggaatggatgtggctatctactcaacatttggtactgaatttgactgaaactcactaataatcttctagttgcttctttttttttttttttttgagacagaatctcgctctgtcgcccaggctggagtgcagtgatgtgatctcagctcactgcaacctctgtctcttgggttaaggtgattcctgggttctcctgccttagcctcccaagtagctgggattacaggcacaccaccacgcctgggtaatttttgtatttttagtagagatggggtttcatcatgttggccaggctggtctcaaactcttgacctcagatgatccacccaccttgacctcccaaagtgttgggattacaggcgtgaaccaccacgcctggcctctagttctttttttttttttttttggagacagagtctcgctctatcatccaggctggagtgcagtaatgtgatcttggctcactgcaacctctgcctccctgtttcaagcaattctcctgcctcagcctcctgagtagctgggactacaggcagctgccgccattcccggctaattttttttgtattttttagtagagatggggtttaactgtgttgcccgggctggttttgaactgtttggaaaatccacttggatcttgctggtgcaaacagaagagcggcttctttaaaaaatggagagtcaactagatgccaaactagagaagggatgaggtgaactaagctgtattatggaagaggacagcaatggagtggcatacacgcgaaccttgtactatgcagtaacccggaaaaacacrgaaaacttcaaccataataatataaaaagaacaatgtgaaaaaaatgttggaaacactggaagcaaatgccaatatgcaacagtagactgttgagtgtgagagcacagattatttatgccttcactttatttcccaaatgtcttgaaacgtaggaaagagcagctacatacccgtgtctccaagttaaggttggcagttttcccgtccactgtgacgctaagaatagagtcatcctttacacttacacagtcttctccaaatatgtccctgaaaataagcagaaatgcaggattagtgaaaatgcccggctttatatatttgaggaaaaaataaaactgaagataggtcctagttctaaagcagaatactgkatttactttttttctttttttttttgagatggagtcttgctctgtkgcccaggctggagygcagtggcacaatcttggctcactacaacctccgcctcccggattcaagtgattctcctgcctcagcctccctagtagctgggattacargtgtgcaccaccacagccagctaatttttgtatttttagtagagtcagggtttcaccatgttggccargctggtcttgaactcctagcctcaagtgatccacctgccttggcctcccaaagtgttgggattacaggcaggagtcaccatgcccagcctgtatttacttttgagacaagcttcttatttgccttgatacagcttattaagtttataaaacagggaaaatacacagctttattcaagaatgatctattcagcaggcatcatgctaggtggtttatatacattatcttaacctataattttagtaaggatccccttttacatgtgaagaaaacaagacacagaagttaagtgatttgcttaaagcctcacagctagtaaacagctgagccggcattcaaatccaggtatctaggtttaaatggctcccaagcccactagctgtgcactcctactttaattaaacttggtatttattgagcatcttctgtgtggcagattccttctgtgctagtagctggggataaagaaggcactaagacattgcctctgtcatcgagagaaacagttttgatggttaatttcaacatcgtccccattggtacagaggtgttaggaaacagcagtccaccagcaggctgaatgcaggtaagaaaggcaggcagtgactctaaacaacccatggaccatggtcagcctaggacagttaagcactgacaacactgtattaagcgggggaagtggggagtgggaatcaactccttgcatcttcaggcagttactgctcatcatatgtgtgaataaacttaggtgggaccctagcacaaaggaaaagattatattttattttatttatttattttgagacggagtcttgcttgttgcccaggctggagtgcagtgtcccgatctcggcccactgcaacctctgcctcctggtttaagcaattctcctccctcagcctcctgagtagttgggattacaagcacccaccaccacacctggctcatttttgtatttttagtaggggtattttggatggggttttgccatgttggccaggctggtctcgaacccctaacctcaagtgatccacctgccttggcttcccaaagtgctgggattacaggtgtgggtcaccacacccagccaaaaaaattayattttaaacacagaaatgtattcaaaaggataggaaaaaaggttccattttcatgtgatccactgttggcttctctgaagaaaccaatacatctactcctatctaatcctaagtgtttaaacaactggggaaatagctgcatttttaagggtacgattggctttgaagtttaaggacatgggaacctcccattcctggccgaatggaagctgtctcatactcctgttcctcagagttgaatagttctggtgtgtttgtgggaggtgagggagagggaggggaggcgggaggagtggtgtcaggaggacagggaagaaggccagagtgaaagtccagtggaagggccgcagcctcccgcagactgccctccccacggctcctgaggaccagccacagcaatgtgaacttccattctgcaccccgactgcagcacgtgggagagcggggccagtccagggccacacgggttttctattcttgtagagccccagggaacagggccgccaacagaactattgtagtcaagtccctggtcagcaacacccaccttctacaatagggctgtttaaccgggggtcccaggayagcctgtggggagggggttgtctaacctccttgaaatcaaaggtaaaactgcatatatgtgtgtcccctgcccccgccccacagccttacctgactgccaaaggggtgaaggatctaaaaatgattaagatactcagacttcaacgctggcagacttgagccctctgcaaaatgagttaagagaaccagaggctccaggggtgggaaccagtaaaatctctggccttttcaacggccatggtaatcactgtgcctgcactgttggctggttttgtatgaggaatgctctttaaaatcaaaatgacaacacagagaatactgttttgaagatgtatgacaacttctataaacaaagtcatcatttaaagtctatcatttttttttaaagccactaaactgctgctttagtgggccgggcacgggggttcacacctctaatcccagcactttgggagaccaaggcaggtggctcatgaggtcaggagttcgtgaccagcctggccaatatggtgaaaccctgtccctactaaaaatacaaaaattagctgggtgtggtgggcatgcgcctatagtcccacttgctcgggaggttgaggcaggagaatcgcttgaacccgagaggtggaggttgcagtgagctgagattgtgccactgcactccagcctgggcgacagagtgagactccgtctcaaaaaaaaaaaaaaaaaaaaaaaaaggtcagtgtagaattttggggaaagaaaggaaggaacagaaatgttagcataaaagccttctaaactagcaggccaccttactttgttaaaccgtttcatggggcaagggctcacatctgtaattccagcattttgggaagccaaggcaggaggatcccttgagcccaggaatttgagaccagcctgggcaacataggaagtccctgtctctccagaaaaataaaattagctgggcatggtgttgcgagcctgtgatcccagctacttgggaggctgaggcggattgctcgagcctgggagtcaaggctgcaatgagccaagatcatgccactgtattccagtctgggcaatggagcaagactctatctcccaaaaatagaaataaaataaaataaaataaaaagaaatacttagtttaaagttaattcatcgcttacagactaagaagagtctagaagaacaccattttacaaagaattcacatttaacaagtaaatatataaaataattcttgaagatacagtaacattcagctaagatttttgaacttgtccttgatgagaatgttttaacgcttgctaactgtgccagccctgtgccagcatcctgaagcactgtattaaatgaaacacaaacggctgacctagcaggtcacaggtgagtgcagagctggcagggaacggttccagcccctctctttcctaacagagaagcaggcctccgagcatggcagtggcctggccagagccacgccccagtccttgaaggagtcagagccgaatccagggctccttccggccgctgtcactgtcttgttgagaaataatgggtgaaaaacttactggagcatgatctccaacctcttgctgtaaacgtgcatttctaattttttagaaaccttctgtactgcacctgggaaaaaaaaaagcgacagagagttcagtttctaaattcctattcagaataatttccaaatcaataatcagaatctggttactgataagttaaagtgaataactatggaatccttaaagtgacaagcagggatttgtattatttgcctgctaaaggaaatggatattttcatcatttaatttcatgttctttttatgtgtatttaaaaaaaattttctattacatcttttcaccctttctccaatatttcatgttcttattaaagaaccacaaaatgacacttaatattatttttagttttatttcccacatttcttaaactttacatttatgaccacgggcaattaactccaggaattctagggacatattcaagctcaaagatctgtgaagtcttttatctaaaatgtgatataaatttagctttctattagatataattattttaataaaaattaatatttaaaatgacttgcccattaaattactcagctttccttccaaaacaaatctgacagcttgggaaaatgggccccccttaatctggagtttcaggcatgctctgacccctcattcaacaactcagtgcatcaacagtagcaaaagagtgcagagctcacagtctggcacttcctcagaaagttaaacagtgagcatttgacctagtaattctactcctaggtacagatccaagagaaatgaaaacatatgtctgcagaaaaacttacatccaaatctccacggtagcactattcataaaacccataaaatagaaacaaccgaagtatccattaacagatgaatggataaacaaaatgtgttgtgtccatacaatgggaaattatttggccataaaaaggaaggaagtaccaatttatgtgacaacacggatgaaacttgaacacagcatagtgaaggaaaccagtcatcaaaggctatatattgtatgattccatttatctgaaacgctgagaacaggcaaatccagggaggcaggaagtagattagtggttgctttgagttggtgagaatatagagattggggcatcatacgtaagggatatggggttccttttcggaggtgtgcatttatttatttatttatttagagacagggtcttgcactgttgcccaggatggactgtagtggtatgatcacggctcactgtagccttcacctctgtgctctggtgatcctctcacctcagcctcccaggtagctgggactacatgcatgcatcaccatgcccagctaattttgtgtgtgtgcgcgtgtgtgcgcgtgtgcgtgtgtgcgcgtgcgtgtgtgtgcgagtgcgtgggtgtgtgcgtgtgtgtgtgcgcgcgcgcgcgtgtgtgcgtgcgtctgtgtgcgtgcgtcagtgtgcgtgtgcrtgcgtctgtgtgcgcacgtgtgtgtgcgtctttgtgtgcgtgtgtgcgcgtgcgtgcgcgcacgtgtgtgtgtgcgtgcgtgtgtgcgcgtgtgtgtgtgagcgcgtgtgtgtgtgcgtgtagagacagggttttagcatgttgcccaagttggtctcaaactcctgggttcaagcaatctgctcccctgtgcctcccaaagtgctgggattacaggtgtgagccaccatgtctggcctggtgtgatgtaaatgttttaaagttgattgtggtgatggttgtacaactctgaatatgctaaaaaatcattgaattctacactttatatggatgaattgtatggtatgtgaattatgtatcaataatgctgttacaaagagtagtgcagaattttaaaatccttcagacaacacacacacacacaccccatatatatggatattgtcatcatttcatttcatgttcataacagacttcactttacaaaagggctatcagaatataatgaagagaaggcaaccttggtggcatttgattgggattgaacagactaagataggaagtgaaggccagctgagctcttagaaggatggggggccttaagagttgaaagctgggctggcccaaatgtgaaaatctcaagtttggatgggaagaagtcagtttgataaataataaatatacataaccaatttcctcttttatatattttttatatataaacgcgcgcgtgtgtgtgtgtgtgtgtgtgtgtatgatatgggggaaaataccagaaataatcttatggcctcacctataaacaggaaaatataatataagactgtaatttctttcttctttttttcccttagaaacaatgtctcgctctgttgcccaggctggagtgcggtggtgcaatcatagctcactgtaaccttgaactcctgggctcaagtgatcctctcatctcagcctctcaagtagctaggcctgtacgtgtgtgctaccgtgcctggctaagactctgtcatttcaaagagacttcaaaaattatgatttcttcaatgcactttcaatttcccagcccaagtaattactttctcatgtaacactatgactttttaaaatattgtatcatgtaagtgtagctttattaactcacttctgcactcccacatacctatttcaatctactctacggaaaagactcaacttgtcatttctcctaaactattctagaattcaaaccatacttcatctaattctttttaattcgtgaatttcaattgtatatacaactaactactcgcctgtaatcccagcactttgggaggctgagaagggaagactgcttgagcccaggagttggagaccagccttggcaacatagcaagaccccatctccattaaaaaaaaatagtaagcccaggtgcagtggctcacacctggaatcctagcactctgggaggccaaggtgggcagatctcttgagctcaggcatttgagactagcctaggccacatggtgaaaccctgtctctataaaaatagaaaaattagccaggcgtggtgatgtgcgtctatagtcccagctacttgtgggggctgaggtgggaggaccacttgagcccaggaggtcgaggctgcagtgagctgagattgcaccactgtactcaagtctgcgacacagtgagaccctgtctcaaaaaataaaataaagtaaaataaaaataaaaatattaaaaaaacacaaaaacaaaaaactaaccaggtgctagccaagaaaactatataacagaattttatactttaattataatcattagtttcattaattactaaaataagcacttaattgacatgtaaaaacaatctcacaaaatatattacaaaataaatatctaggctatgaaactatcaaaagaaactttccaaagtttacgtgtgtatatatatgtatatatatatttgcaaattcctgcattaatatttagacaaactcatcagacacgagatcatattaaacacagaactatacaatcagacaggtatacctgtccttagtaggtctgtgtgtcaaaacaggacacacacatgctgaaaacaggtgccatgtaaaatagaagaatgttatggaatataaaaacaaaataatgtattttgaaaatatataagatttcccctttggttaagaatggggacacataaattgtggttggttagacacacacacacacacacacacatacaccacagatacaaatacaagttgtgtttccagaatctggactgaagtgtcaggaggctaagaaatgaaaagggagaaaaatgccatcaaggaagaatcggattgtttcacagaggtgccttgagaagagggcaactttttctgtaaatggccagatggcattctaggctttgtaaaccacagggtcgctgttgcaatgactcagttctgctgctgtagcaggaaagaggcatcagagatgatgaaccagtgcgcacggctgtgtttcggtaacactatacttaccaaagcaggcgggctaggtgtggcttgtgggccacagtcgctgactctgctctaaatgtgaaaatcccaagtttggataggaagaagtcagttcgataaataataaatatacagaatcaacttcctcatgagcagcataagtgtcacatgtaccagttcttgcaatacttgtcacctttgaaaggagcaagtgctacttattaaaacctgtcacttagccccacgagtgacaactgtccatgctgacatatcacatacataccctggatcattatcttaaagttcatcctgtctgttctctttctgtcaccacttacagctaatccaacaggaaatactgctggctttattagaacacctccagaatccagcactttgcgatatccccatgacttccaccctaatctgagccactgtctgccacctggatgactgaagaagctcccagctggagcctctgctttcttgcttgccctcctaacagtactttcagcaagcaccacggcagtcctttaaaaactccgtcagatcctgtctcagccccgctcaaagctctgcagcatagcctcattttactcacactgaaagtctgaggtccttacaatagccaacaagaccctatgggatctgcccaactccaaaccctatcaggaagccctgggacatgccagaatgtcagatccttggagggggcagatctgtttgctttgttcactgatgtttcctaagcactttgaggcatgcctgctggggagcaggtgctcagtaaacatctgtcaaatgaatgttaatgaaaatatgcaaacacttcatcatcccagaggaatataaaacctcattctccataaactacaaaatggggaagaactaagaaacacaaggcacccagccagctgaacaaatgctaaatacacggaacacacggaaacagcccagttctaacctgtctgcaatgaacctctgctgaaatggccacaggctaaccaaaggaaggaatgtttttattattagcataagagggattactaataatatagtgataattaatttaaattcaattactgcagatcagagtaaaggtacatttcattttggaccggagcattaagagaaataatcaagataaaggcaaaccaacctatgacaggtca

SEQ ID NO: 8765 - DNA, 28853 bp, Homo sapiens
tgtacagtacactttactggatgtctgggcatgctgtagggaagccaagcactcacagaatagggagcatactgaggatttggcatcatcattctggaattctcctcagacagtcctacctggaatttctcactggttgacctttcttctcctcaggtggccatctttcacttaccggccctcctccgttttctctggagttaccacaggacattctaaaattcccatccatttcatttcccccaaactcagctctctaatgcttcctatcaaggccatgcccaaaggcccatccagtttgtttctgatcacaaaagagctacagggcctctaaaaggaatgtgaaattgtatttcgcttttttaattagccttttcccccagttgcatatagttggggggataagaaaagactcccaagaaatagtgacttaggggcaggcagaatcacaaaggaagttccaacaggctaagtggggagggtctgtgcctggggaagcaatgggaacaaggccctgtgcctagaaaggggattgggtatggggactagtgaatggagcatcctgagggggagattccagcaatgggggtcttgtgctgcagcactgagggatgagccttcctcatcttgtggagctgcagaaagatttccagcaggaagaaaataaataaaagcacatttgaacctcagaaaaagcactgagtaaggatataccatttgtcaactatcagaatggcaaacttaaaacttaacgttgactggccgggtgcagtggctcatgcctgtaatccccatactttgagaggccaaggcgggaggatcgccagaggtcaggagttcgagaccagcctggccaacatgttgaaaccccgtctctactaaaaatacaaaaattagctgggcatggtggtgcacgcctgtaatcccagctactcaggaggctgaggcaggagaatcgtttgaacctgggaggcagaggttgcagtgagctgagatcgcaccactgcactcctgcctgggcgacagagttaagactctgtcaaatcaaaaacaaaaaacaaacaaaaaaagttgacaaagatgtgggggaaatacagcaccctaacacgctgctaagtgtataaacggaaccattatatttatttatttatttatttatttatttatttatttatttagagatggagtttcactcctgttgcccaggctggagtgcaatggcacaaactcggctcaccgcaacctccacctcccggatttaagcaatgctcctgcctcagcctcccgagtagctgggattacaggcatgtgccaccttgcccggctaatgttgtatttttagtagagacggggtttctccatgttggtcggactggtctcgaactcccaacctcaggtgatccgcccgcctctgcctcccaaagtgctgggattacaggtgtcagccaccgcgcccggccggaaccatcattttagagagacaactagcaatgttgagaaagagatgaagcgatagagaatcctagtgcctaaagctacctgtcccaaactttctaacwggaaaaaactgtcagttgttgggaaatctgaaaacatggggagataaagggcaagtgcacaggtacgggctcacgagagccaaaagccagttatcttcccagctcactgcttagtgacatcatgttagtagcttgaaacaggccatgacggaagtatttacaccacaaaaagcagcaaatgctaccaaacagaacaccctacctcaccccggccagtttgtcagcacactacagcctgagccaatcctcatccagcaacctcttgagttctctgaacaatcgctacccagagatcaagtaccagttttataagccaggtctttggccttacatcccaaaaggaaagcctaggcctgctgagcagcactggactttcaagagcctgccggactccttcaccaaagcaggcagacctatatggcctcctttctcctagatatcccagttcctgcttgattttctaaagaaatcaaggcctgggccaagtgtggtggctcacgcctataatcccagcactttgggaggccaaggcaggtggatcacgaggtcagcagctcgagaccagcctggccaacatggtgaaaccccgtctctactaaaaatacaaaaattagccagacgtggtggcaggcgcctgtaatcccagctacttgggaggctgagacaggagaattgcttgaacctgggaggcggagtttgcagtaagctgagaccatgctattgcactccagtctgggtgagagagcgagactccatctttaaaaaagaaagaaagaaagaaagaaatcaaggcctggagaagacagcttttttcagctgtgtggaagcaaaagaaaatgggaaaatgacagggacagagagtggaccgcctcccatgcagaagcagaaagcccctgtctcaactctcttgacagtcatacacaagccccttgcagtctctgcacctttaaccgctattatactgcctccctgtagaagacacaggacttagacgtaggtgtagagggagaaggaaggtttgaggataactctcaggttccaggcttaggagcctaggtagcccatgagagatgcagaacagagcttgaagagagggcctaaagggtgtatgggagttagttatatttggggcttggtgaatttgaagtgcctatgggacaacaaatagagatgtctgattgagaatctgaagtttgagagactgatgagatcttgcaagttaccagtgcgtagatagagttgaagccatgagatcactctggcaacagaaaaggctgagcagggacacctggaggcagcaagatttaagagaaagagcaaccacagaaggaaactgagtggggacatgataggaggtaggaggaaatcaggagaatgtgacattggaaggatgaagattatcaagtgttgcagaaaggttgaatacgaagaggattaagatgagtgacacagtgagacgattttggctggctgagagggaagaaagaaagcaggagataagattcaagtaggcaggggccaggtcaggcagagccagacatggcatcagaaggcgtttgagtggtattctaagtgggaaatctttggaggattttaagaggggagtgaagaaatctgatgtgcattttaaacataccatgctgttgtgcggaggacaggctggggggcgagggtgggaatggaggtggggacaccagttaggaagctattacagtaacccagacttggattaggacggtaagggtggaggtggttaaatgtgttcagattcagtgtacattttgaaggaaggtctgacaggacttgctaattaattggatgtagaatgcagagtaagagaaagacagggatcaacaagtatggaaggtgttggttcgagcaactgagtaggtggtaatgctatttacagaggtaggcaaggctagaggaaaacaaaataaacagggttaggggtgggaatgagaatccagagttttattttgaccaccttaagtataagatgcttgccgggtgtggtggctcacacccgtaatcccagcactttgggaggccaaggcaggtggatcacctgaggtcaggagttcgagaccagcctggccaacgtggcgaaaccccgcctctactaaaaatacacatacaaatacacgccaggcatgatggcaggtgcttgtaatcccagctactcgggaggctgaggcaagagaattgcttgaacctgggaggcagaggttgcagtgagctgagattgcaccactgcactccagcctgggcaacaagagcaaaactccgtctaaaaagaaaaaaaaaaaaaagtataagatgcttttatatatgcaagtggagaagtcaagtaggcagttggctatccaaatctggagcccagggaagaagtcacagctagagataccatttgaagtcatcagcatacacagagcatcaaagccatgggactgcatgaacactgaagttgtgttttccctctcacttgatctcacagaagtttgggtagcccttgcctggggactggggaaggcatccaaagtcattaccatcagtcctcgtaatgtgagagccaggtacagctaaagacaaatctgagtcagggactgcttgcagagaaatggtgccagagaaactaagacttcacaggagagctgaaggtgttccatctcctccttgatactgaggatacttagtctgtacagccagcaatgggagccctagctgaggcctgaggggctaaaaatgggagttgatgtggctatgcaccctccccacaactcacctcctgtccccacctccacccacacaagagtcaagcctcctagaattggcataaaatccacatacagagcagtcccaggaggaggcttggggttcagtgacaggagatgagcacaggctgaagagctgagaccagccatccactgaatttttttttttttttttttgagacagagtcttgccctgtcacccaggctggcgtaccgtggtgcaatcttgggtcactgcaacctctgccccctgggtttaagagattctcatgcctcagccttctgagtcgctgggactacaggcaagcactaccacgcctagctaatttttttgtatttttagtagagacagggtttcaccatactggccaggctggtctcaaactcctgacctcagatgatccacccagctcggcctcccaaagtgctggtattataggtgtgagccactgcacccagccccatccactgattcagagcaaacaggataaaagtactgaagaccattgcttctccaactttaagttacattcaaaccatctagggattttggtaaaatgcaggttctatttttgtaggggccagctccacagggtcagtgggtttttctccctgtgtgcaaagacgagagatcatagaaataaagacacaagacaaagagataaaagaaaagacagctgggtccaggggaccactaccaccaagacgcggaaaccagtagtggccccgaatgccaggctgcgcagttatttattggatacaagacaagggggcagggtaaggagtgtgagccatctccaatctgagcaaacaggataaaagtactgaagaccattgcttctccaactttaagttacattcaaaccatctggggattttggcaaaatgcaggttcaactttaataggcctggggtggggcctaagattctgcatttctaataagtgcccacctaatgctgttgctcctggtctacagaccacattttgagtagcaagggattagaggcagccgtggaggccacccataatggagagggcatttccagttccagggagaatgtgtttattcatgcgcaaagtcacagaactattaaagtggaaatacccaccatttggcatggttgtggggcagagagttatttctcagcagattagcctcccaagagcatagcacagcatggctgttatgcaggtgggttctgaaggttgacctcctgagctttatgtcttagtatgtaatcttgggcaaatctttaacttctctgtatctccgtttcctcatctctataatggaaataacaagactattgtgcggattgtctaagtgaatggatataaagtgcttaacacacggcagcatagtaagtgctcagtaaaagttgctattctgatgctattataccattctataatcgttagcacagatacagaggctgagttgccttttggtacacggtcaaatatacaacccccatctccctcacaccaaaaggcctgtgtcctctctttcaaattcctccttccctcctgcccactccccctcccctggcccctggccccagtgtggtctggatgggccccagaggggcagggacagggacaggacgtggggctgtatctgacaggaacctgaggggctggcctgggaggggattggggcccagcttcctgaagggaggatgggctaaggcaggcacacagtggcggagaagatgccctcctgggccctcttcatggtcacctcctgcctcctcctggcccctcaaaacctggcccaagtcagcagccaaggtgaggtgcacagagggtggagatcacctatgcccaggaagagggagccctgggaggtgatgcagggccccvggaggggaggtagagtaagaggctctcctgctggtcccctccccttccacataaacatgcctgggaggacccagggccaactcaccagctgttccttagatgtctccttgctggcatcagactcagagcccctgaaktgtttctccygaacatttgaggacctcacttgcttctgggatgaggaagaggcagygcccagtgggacataccagctgctgtatgcctacccrcggtaggtgctggactgtgccccactccccatgtatctgtccctgcacttagctgagtcccactccagcagctttcctgcctgtccgaggaccactctgaatacaagccctaagtacctactttttgaacagatgtgctttggatgtatgtgggccccagctccagccctacataacccctaatcccacctatcccaggcagtgagaagaaaaatggcagtactagagacagaagttgggcatgggcccaggtctgggtcctcaggsstccgcatggtggctgtgtaggagggacctcttctatgccaacagggagaagccccgtgcttgccccctgagttcccagagcatgccccactttggaaccygatacgtgtgccagtttccagaccaggaggaagtgcstctcttctttccgctgcacctctgggtgaagaatrtgttcctaaaccagactcggactcagcgagtcctctttgtggacagtgtaggtaagagccatcctcctgtcaccctgccccctccacttgctgccccyagtccagctcccggaatcagacttgcctgtgcccttccagctcagcacggatacccctattaccagaccccctgaggcaccccaagactcccttgtcattcctcccagccttggcatctagagctagaaatgcccaacagatcattcacaccctgttcctcccatcgtcaacaaatcatttattcatccattcaagagttacagaatacctactgtgtgccagacactgggctaggtgatggggatatggagagaaaaagggatccctgcttacaagaagcactgagtctagcaagccatcatactgcaaagaagtcactgttctcatgagagaagaacagaatcaggagcctccyyagcctgccctccaggagaatgacagcctacaatttttgaatccagaagctgccccaattcagcccccagcacccctctctgcagtccagaggctgagccatagactgtggtactcagagttctgatgtgccctgtcttgccctcaggcctgccggctccccmcagtatcatcaaggccatgggtgggagccagccaggggaacttcagatcagctgggaggagccagctccagaaatcagtgatttcctgaggtacraactccgctatggccccagagatcccaagaactccactggycccacggtcatayagctgattgccacagaaacctgctgccctgctctgcagaggcctcactcagcctctgctctggaccagtctccatgtgctcagcccacaatgccctggcaagatggaccaaagcagacctccccaagtagagargtatgctgaccttcttctgccccacctcttatctcctaccttcaatcttgccccaggaaaggacagaccatactttggggattccagacctaggttcgtccttggagagttagtataggctcagatatgagccaygcctacttaggggcttcctactttgggtcattcccactgacaaaagcaaaggctttcargcctccaaattaatggagatttcgcaacaaaaccctgaacaccacctgaaacccaccaacttagcccctggtctgtgtgcatatctatccagcaaggagctgagctcctctccacagagatgctgtgcaaatataagggttggaggctctctcagctgacaggcagacctagattgtgaagctgggattttcctcccaaggcttcagctctgacagcagagggtggaagctgcctcatctcaggactccagcctggcaactcctactggctgcagctgygcagcgaacctgatgggatctccctcggtggctcctggggatcctggtccctccctgtgactgtggacctgcctggagatgcaggtgagtcaacaaaggaatagggagatggggaggagataaaagaatatctctagggaagcctgggctagatctgaagctctgggaaccatggtccttcctgatgatctcgaacttgccactggacaggaactatgttcagggaaagaagagagaataggagtcaatgttctaagttatatgtgtagaaattatctgaaatctgaacaccctatacagtaggggcacacgggccctgatgggacttacttctttgactttagtggcacttggactgcaatgctttaccttggacctgaagaatgttacctgtcaatggcagcaacaggaccatgctagctcccaaggcttcttctaccacagcagggcacggtgctgccccagagacaggtgagagctgaactgctgattgaggttggtgtcatgggagtgagccacaatcttgcagaaaaaaagaagagagtgttcttggtcctcttcactctccttcctttgtctccaaaccatacagctttcaatgctctcttatctattctgtcatcctccaatcgatattttatcttctcaacccctctctgttcccattgggaatgctttggtttagtttagccttaatcatgtcactgggaccattgcaacatcctacagtctaattcacctccaatgtattccccatgctgctaacagagtgatctttgttaagctcaaactgtgcatgacctttgtaaagctctaactttgcatagtctccccttactcaaacatgtactgcaatttctcattatcaaagccataaaaaatttagcctggccttcaaagacttccaccaagcacctcattgattcttcatcctctccatatctaaatctataaccaagttgtattgattttacctattaactatctctagaatctgcccacttgtctatcactgccattatcctactacaacccatcattaattctctcttgggctactgaaaagacatagtaactgatcaccctgagtcttccaagtaattcttcacataggtgctgaagggatcttttcattttgttttgttttgagacagtctggctctgttgcccaggctggaatgcaatagtgcaatcttggctcactgcaacctccacctcccgggatcaagggattctcctgcctcagcctcccaaggagctgggattacaggcatgtgccaccataccccattaattatttttgtatttagtagagagggggcttcaccatgttggtcaggctggtctcgaactcctgaccttaggtgatccacctgccttggcctcccaaagtgctgggattacaggtgtgagccaccgcacctagcctgaagggaccttttaaaagtgcaaaaatgaatgtaacactccctgcttaaaaatcttcaatagcttcccactagtcttaggataaagaaaaaaacctctaccatggacttgaaaagttctgagactcagcccctacgtacttcttcagcttcatcttgtgctatgctgccctttgatccccatgctccagcacagggcttctgtggtcccctcatatctggcatattcccttctgcttctaggtctttacactgctgtttacccagccctactgcctttacttaacttctacttatcctccaaatctcaactcaagcgtcactttcttagggaccctcccctggccttctttattaagtccaatagcactaatatacattcttgttgtaccatgtaccgcttcttcttcttctttttttttttcttttttttttctttttgagacagagtctcactctgtcgcccaggctggagggcagtggtgccatctcggctcaccgcaagccccgcctcccgggttcatgccattctcctgcctcagcctcccaagtagctgggactacaggtgcccgccaccacgcctggctaattttttgtatttttagtagagatggggtttcactgtaagtgttagccaggatagtctcgatctgacctcgtgatccacccacctcggcctcccaaagtgccgggattacaggcgtgagccaccatgcctggccgtacctctccttcttaagtacttatcatagtcatactttcatatttatagtttatatgattatttggttgataataaaaatctggccaggcccagtggctcacacctgtaatcccagcactttgggagactaaggtgagaagatcacttgaggccaggagtttgagaccagcctagacaacatagtgagacttcgtctctacaaaatttctttaattagccaggcatggtggcacctgtattcctagctacttgggaggctaaggtgggaggatggcatgagcctaggagtttgaggttacagtgagctatgattgcaccactgcactccagcctgggcaacagatcaagactttgtctcaaaaaaaacaaatctctcagaactccagttgagaaaggctgatcttgaccacatatgatccatgagggcaagatcaatgggtttttattcaccaatatattctcacctaccaatagtaggtgcctggtaaaaaattgttgaacactattaactatttaaatgtattcttccagtttttttctatgtatttacatacatctctatacaacatttaaattttattatttttgagatagggtcttgctctgttgtccaggctggagtgcagtggcatgattatggctcactgcagcctcgacctcccagactcaaacgatcctcccacctgagcctcctgattagctaggactacaggcattttctttctttctttctttctttctttttttttttttttaagtagagacaaggtctccctatgttgcccagactggtctcaaactcctgagctcaagcaatcctcccatctcagcccctctaccacgcccagcctaacatgtaatattttttttttttttgagatggagtcttgctctgttgcccaggctggagtgcagtggtgtgatctcagctcactgcaacctccgcctccagggttcaatcgattctcctgcctcagccccccgagtagctgggattatagatgtgcgacaccatgcccagctaattttttgtatttttagtagagacgaggtttcatcatgttagccaggctggtctcgaactcttgacctcaagtgatccacccacctcagcctcccaaagtgctgggattacaggtatgagccaccacacccagcctaatatttaatttttaaatataaattggattacattacatatatggtttgttgactcacctttttgcttaaaaacatgtctcagagatcattacaaaaagatgtaactcattctttttaataactgcatacatatccataggattgagatgcctgagtggactaaagggtagcaaaactgaagtcatcatttcctctatcaaaacttgcttttcctgctgggcacagtggctcacacctgtaatcccagcactttgggaggccgaggtgggtggatcacctgaggtcagcagttggaaaccagcctggccaacatggtgaaacctcatcattactaaaaatacaaaaattagtcgggtgtggtggcacgcgcctgtagtcccagcttcttgggaggctgaggcaggagaaatgcttgaacccgggaagcggaggttgcagtgagctgaaatcgtgcccctgcactccagcctgggcaacagagagaagactctgtctcaaaaaaaaagaaaaaaaaaacttgctttttctttattgtctccgatcctaccatgaattcagttttcctggactgaaaaatagaaatcatcctggacttctcccattccaataccctccaggcctaaccagaaatagtcttgtcatttttaccttttcaatatctcttcaatcatctctttccctgtctctcactgctgctaccctattttcacatcctcatcactttgcacatgaaaaactacaagaatgtcataatggatttctctgcttctagtcggccctcacaaatcctttctacagactgtagttagaatgatcttcctaaagtacaaaggtagctatggcacttccctgcttaaaatccttaaatgtctacataactaccacaaggttagtagtaattcaagttcaagctccccagaaaggccataaggccatccatgacatggtctgcagtctcacatttaccacctaccaccaggccctttatgcgaaaaccatctgcaccacttagaatttcccccaaagcaccacactctcttatctatgcacaaccatgtgcctgggatgcctgtttgtcccttttgcctatcctatttttagttcaaaactcagtctaaacatcgccgtatccaggaagcattccctgaccctcccagtctgggttggatgctcccctttgatgctcccaagccagtctatgcacatcacagaaaaatatcatgtttgtttttctgtctttcccactgaaattagagctctttgaaccttattcctctatgcactcatagggcctggcacagtaccaattggcacatagtatcaattatttgttgattaaatgggtaaacatacccattttagtgacggtgagccacttaggggttataatcaagagggagacatgattcaattgttcaataaagaattattgagagtgactttttgcaaggtactggggataaatagtgcaacaaataaaatggaaaaggggccaggctcggtggctcacacctgtaatcccagcactttgggaggccaaggtgggcagatcacttgaggtcaggagttcgagaccagcctggccaacatggcgaaacgccatctctactaaaaatacagaaattagtcaggtgtggtggtgggtgcctgtaatcccagctactcaggaggctgaggcaggagaatcgcttggacccaagaggcagaggctgcagtgagctgagatcgtaccattgcactccagcctgggcaacaaagcaagactgtctcaaaacatttttaaaaataaataaagtggaaagggttccagcattgttggggcttacattagtagaggggaggggaaaaggagggggagaaaagtaagtaaagaaataaaggaacaaagttataatagagactaaaggggggcgtgtggtgggtggggggtgggtgttgctaatttagactgagtggccaggaaaagcctcaccagggaggtgacagataagccgagatctaaatggcaagaaggaatgagtcacatgaagacctacagtcagagcaatccagggcaaaggcaaagtgcaaagatagcacatttggcatatctatggcacagaaagaaggcctgtgcggatgaagggtgataaactggcatgagaatcataagagatgagaatggcaaggcaaggagaaaccaaatcacagagtcctgtaggcctggtaaggggtttgggttttattccaagtgggatgaagagccactgaaggattttaagcagtaaacaatgacaatttgacttacatttttaaaagatatgtttctctgtgaataaataaataagagtagaagcagaatcaccagtcagaaatttgccttaatccaagcaaggaatratagtggcttcatctaacatagcagtggtaaagatcaaaatcaatagtttgtgacattatattctggacattatcacatcaacatttttggaaacaaattctggtagctgtgtggagaacaacttgaaggtagtggcaaaaacagaagcagaaaagccagttaggagactattgtcataatctaatagcaaaataacacataggggagagtaggaggaatgacgtatgagaacacgttaaaaatagaggatatttttctccagaaagatgagggttctttaatctttgaaacaatcctgtgaggttggtatcattaacccattttacaaatagaaggaaactggagcagagataaaccaagtaatttgcccaaagttacacaaaggtaagccaagacctcaactcttggtgaaaacccatgctgttttcacatatcatgccaggtctttcctcaaagggaagaggccagacaacaaagctgacttcagaaaacatcatggcaaaatagcaaaaacaaacgaacaaatgaacaaaggaaaaaacaaaaagaaaacatcatggcataaagacagagggaaagctctggaggcccctggaaggaaggagttaaatgataatccctgcaggccatcgttcttgtaggatgggaagccttgggattagtctctgrggcaggcctgattcaatgactctgtggggctgggtcttaggtaccccatctgggagaactgcgaagaggaagagaaaacaaatccaggactacagaccccacagttctctcgctgccacttcaagtcacgaaatgacagcattattcacatccttgtggaggtgaccacagccccgggtactgttcacagctacctgggctcccctttctggatccaccaggctggtaagaactttcttcctcattcttcccacatagttcccacccccactgaatctgaccctgtgcccaggatccccaactctgacccttctgaccgatggctctggtggcacaatgccttgtgcacagaaggacttaagctgctccctgctgacatccctgtagtgcgcctccccaccccaaacttgcactggagggagatctccagtgggcatctggaattggagtggcagcacccatcgtcctgggcagcccaagagacctgytatcaactccgatacacaggagaaggccatcaggactggaaggtatggtcaagcaacaaatgcccacagacctcactacgcaggggatccctggggttggccatgcctgttagcaggagtgaaagtgtctatgtatccagtctctgctagtrtatctatgtttatcagattcaactggtatcttagtctctcttgggcatctgatatttctggctactcctacttaacatttctcttccctttgtctttgggatatcagtcttccccgattttcctcctacctctctgactgaactttctcactctcctctcctggctcctcctttccagccttccacaaaatgctgtgcttcctagagtctcatcctaggctcttttctcctctgataaaataaatatgttctccccaggtgagtgctttaactccatggtttcaatgtccatacattaacaatcgcaattttaccattctaactcccatatggaaaggaatttacaaaccacaggcaaattaccaaaatgtttgaagtctgtttcctcattggtgaaatgaggatgaagctatctaccttatggagttatagtaaagattaaatactatatctaaatacctagcatactgcctggcataaggaaggtgctcaatatacattacttaaatattagtttgtctacttttattctcatttgccacacatatatacaactatgtacaacatcttatggttctaccaaaacttcctccccctggacatttcagactcagtctatccagaatggaactcctcttcctcctgaagctttacttttttattgtgataaaacttacatacaacaaagtgtacaaattttacatatatagtctgtacttgtgtatacatccacataaccataaccaggatcaagatataaattatttccagcacctcagaagctcccaatgctccgacacatcccccgccaccaaaggtaatcaccatcctgacattaccattgattcatttggactgttgttgaactctataaaatggaaccctaaagtatatcttcctcaaacttacttctcttctgtgtcctgtctctgacaatggcaccgctacttacccagtacccaagcctagaagcacccttgactcttcttgctcttcccttatcccttccccttactcatcaactaagttgatggcaataacgtactaatagtcctcaaattcctaccaggattgccttagactcatctgtgaccatccagccgtgtcatccatgcttttagcacactaaactactctgtggcacaaaaccaagcattaaatgcttctctggacttccgtggtgccttgcactaattaattgttgtgattatttacctgtttggatgtctttctcattagatatgtaagagacggtgttttattgctttctccccagtgcctaacccaatgtttggagtatcacacagttcataaatgtttgctgccttcctgcttgtacacatgatgcttgtaccccagcgcctaacgcaaatctggcatcctctgcagcatgagtattatttgtggcatggtctgtgtggctctgaatatatctgtttctgggggtgtccatcgcccgacctggagttgtgagaacacccggtagggtgtgcgtgtaccgggatccctgccgagggtgtacctgggtgttggtgttaggatacgtagctctctgaggtgaggtctgtgtctcaggaggtgggcctggcacgtttctctcgggcagagcgtgatcccgttagggagaggctctcggttagggcgctctatcctgttgctgggaagcgtgttttctgccggtggggctctttgtgggaatctccgaccgcctggggattcggagctgcaggatttgggtcaaacagacgctgggctatcgaagccccgacgccgggccaccgcacgcttctttgctcaggtgctggagccgcctctcggggcccgaggagggaccctggagctgcgcccgcgatctcgctaccgtttacagctgcgcgccaggctcaacggccccacctaccaaggtccctggagctcgtggtcggacccaactagggtggagaccgccaccgagaccggtgaggcaagccccggccgcaccaaagccgcacagcgcctgcgccagggactgggcgccgggtgcgagtggggcggggctcggagaggggcgaggcgcggggcgcggagaggggcggggccctgaccttgcgggccgacggctgcgcaggtgcccgcagtgcccaggggcggcgaggggcggggccagagyaggggctggctggatgagggcggggctccggcccgggtgggccgaagtctgaccctttttgtctcctagcctgratctccttggtgaccgctctgcatctagtgctgggcctcagcgccgtcctgggcctgctgctgctgaggtggcagtttcctgcacactacaggtaccgcccccgccaggcaggagactggcggtggaccaggtggagccgaaggcctgtaaacaggcattcttggttcgctctgtgaccccagatctccgtccaccgcccgtgcgcacctacggcttcgccacttcctgcacgtcacctctgggactcgccgcggctccttacactctaacacgcccactataccgcccacctcgaacagccccgcctcctgctgctcacctcggcgactaggccaccgtccacccttcagccaaactgcccactccacccccatccaatctgccgtcaggtcccacctcctaaacctagtccaaacaatggccccctttctctagccctacagacacgacctgactcactgaaacagaacctcttgcccctccgatctagcctcacacagccaccagaataatctttctaaaatgcgcacatgaacctatcaattccctccttaaatcctttcaatagctcccaggatatagtccaggctccctatgatgacaagcgaggctctgcaaaatcggcccctgccagcaagcacttcagcctgttctaccctgtgcatcagcctttccaaactggttttctccacaagtcaggttttacttctcagtgcctttgcacataacgtccgctctgcctgaaatagcctccctgtctcactaaacccattcatctgtaaataactttcttcaccaactcttaagaaacctttcctgaccctcccccttttggccgctgctctgtgctccaatacagtaccagtagtgttttactgtgtttatttctttatatatcttccctattataccttacttggtcatctttaaatccttagcacagtgcctgccaaaaagcaggcccttaaataaatgttattaatgagtgactcatttatgtgggaagacgaaggctgaggagaaatgccattggaggctataaacatgaagggtagaatgcatcccacctccatccttcatctgctgcttctttaagacttagctcagaagtcatctcctccagatggtgtcttctgatggtcctgggctggttcaggtgccactctcatgggctaccatctccctctgaacatacctctctttgaacttttaatctgcccatacgtatgagcagactgaaaggtagcctccatgcaggtagccagatccaacaaaaaagttggagaagtaggaggaggtggtctgctgagccaggcatactcagtttcttttccccaatttaccaggtaagtcacaycttctcccctggagagatatgagtgaggtcactgaagcggcctgaaatgttctactgacgtccctccacatggaaatatgaagctaaagaatccaggttctggccgggtgcggtggctcacgcctgtaatcccagcactttgggaggccgaggtgggcagatcacaaggtcaggagatcaagaccatcctggctaacacagtgaaaccccatctctactaaaaatacaaaaaaaaytagccaggcatggtggtgggcgcctgtagtcccagctactcaggaggctgaggcaggagaatggtgtgaacctgagaggcggagcttgcagtgagccaagaccgcgccactgcactccagcctgggccacagagggagactccatctcaaaaacaaaacaaaacaaaacaaaacaaaacaaaacaacaaaaaaatggaggcccctccaatacatcttaatccatattcttcccagatagactaccctctccagtaacttactaataagctccactgattttcttcattcattcattcagctaatttactgagcacctactatgggtcagacactattctacaccctagaaatacaggagtgaataaatagacaaactctcttttctcggggaccatatgttctagtggggtgagacagacaaaaagaaatatacataacaatgtaataaatgtacaacaagtcaaatactataaggaaaaatgaagtacagcaggagatagcctgtcatggggaaaggaagcagcactacagtggtcccctcttatccacagtttcactttttgtggtttcagttacacgcagtcaattaaggtctgaaaaaaattacatggaaaattccagaaataaacaattcatgtattttaaattgtaagtagcacgatgaaatcacttgccatgccgctctgtcccacccgggatgtaaatcatccctttgtccagcatctccacgctgtatatgctccctgccccatagtcacttagcagccatcttgcttatcagattgactcgttgaggtattgcagagctgtgttcaagtaaccctcattttagttaataatggccccaaagtacaagagtagtgatgttggcatattgttctaattgttctattttattagtagtcattattaatctcttactgtgcctaatttataaactttattgtaggtatgtacgtatagaaaaaacatctgctgggagtcttgaaacatatcccctgcagataaagagggactactgtgtttcaggcaaggtagtcagggatgacatttgaacagaggcctacaatgaggtgagggaatgaatccagtgttccagacagaacaaacattggagtgtttgaggaaactgcagcaccctttgttgaacctgcccaccactgacttccctcccctacctgaggttttcttcttactctactcccctgcccaactttattgccttgaccatgctcttatatctccaagccttactccccggcctcactgctcccccaccccaactgctgtcctcctccctgccaatccactgccatggctcagtctgcttctcttccttctcccccaggagactgaggcatgccctgtggccctcacttccagacctgcaccrggtcctaggccagtaccttagggacactgcagccctgagcccggtgagtgtgcttccctcccctgtgcccaccaccaaccctgcctggtactggatccttgccccaacaatacaacttgttcaaggtccttgccctaccagtgtgccatccccaggcactaccccagcactaccccagcccttctccttcctgtacagtccagcccctcctcccacaggatctgctttaatccagcrcctctcctcatctctcccagcccaaggccacagtctcagatacctgtgaagaagtggaacccagcctccttgaaatcctccccaagtcctcagagaggactcctttgcccctgtgttcctcccaggcccagatggactaccgaagattgcagccttcttgcctggggaccatgcccctgtctgtgtgcccacccatggctgagtcagggtcctgctgtaccacccacattgccaaccattcctacctaccactaagctattggcagcagcyttgaggacaggctcctcactcccagttccctggacagagctaaactctcgagacttctctgtgaacttccctaccctacccccacaacacaagcaccccagacctcacctccatccccctctgtctgccctcacaattaggcttcattgcactgatcttactctactgctgctgacataaaaccaggaccctttctccacaggcaggctcatttcactaagctcctcctttactttctctctcctctttgatgtcaaacgccttgaaaacaagcctccacttccccacacttcccatttactcttgagactacttcaattagttcccctactacactttgctagtgaaactgcccaggcaaagtgcacctcaaatcttctaattccaagatccaataggatctcgttaatcatcagttcctttgatctcgctgtaagatttgtcaaggctgactactcacttctcctttaaattctttcctaccttggtcctgcctctttgagtatattagtaggttttttttatttgtttgagacagggtctcactctgtcacccaggctgcagtgcaatggcgcgatctcagctcactgcaacctccacctccgggttcaagcgattcttgtgcctcggcctccctagtagctgggattacaggcgcacaccaycacacacagctaattttttttttttttttttttttttttttttagacggagccttgctctgttgccagactggagtgcagtggcacgatctcggctcactgcaacctctgcctcccgggttcaagccattctgcctcagcctcccaagtagctgggagtacaggcgtctgccaccatgcctaatttttttctatttttaggagagaccggttttcaccacgttggccaggatggtctcgatatcctgatctcgtgatccgcctgcctctgcctcccaaagtgctgggattacaggtgtgacccactgcgcacagccccagctaattttcatatttttagtagagacagggttttgccatgttgcccaggctggtcttgaactcctaacctcgggtgatccacccaccttggcctcccaaagtgttaggattacaggcatgagccactgcgcccggctgagtgtactagtagttaagagaataaactagatctagaatcagagctggattcaattcctgtccttcacatttactagctgtgcaaccttgggcacataacttaatgtctttgagccttagttttttcatctgtaaaacagggataataacagcaccccatagagttgtgacgaggattgagataatctaagtaaagcacagtccctaggacatagtaaatgattcatatatccgaactactgttataattattccttcttactctcctcttctagcatttcttccaattattacagtccttcaagattccatttcttaacagtctccaatcccatctattctctgcctttactatatgttgaccattccaaagttcttatctctagctcagacatctactacagcactgtgatgctttatgcaactaactgtttacatatctgtcccctgctactagattgtgagctccttgagggaaaggaacatgatttatttgtccttttcccccagcacctagagtagtgcttggtgcatgatagtaggccttcaataaattttttctaaatgaatgaaatctttctggacaaggttaccttaatcccatgccagctgtcctcatcctctaaaccgttcataggcagcagtaaatgtgctcagacagttctgattatggactctcctaacacattctaattctcaaacaaatggttttgttgtcattgttttttctggctccaaatatacccactgtatcagtcagggtcttggaagaaatagatgacacactcaaattgggtaatatgatgacagtgtaataaacggcaaacagtatttacaaagatgagggcaagatttgggaaaaccatcaaggaacagtgcaagtgcctctgaggctaacaacaacaaggtgctggcactagccctaggcatcaaggggtaagggagggagtggttcccagatcaccagagagtagctgtaagacagggctgccaggaaggagtcatggcctttctttggtggaggggtgcagccaacctatgggcaggtggcaatgagagatccagggggatagacagctcaatttcatgctcttcccattccagtcttgagtccctaggagtaaagtcagagcctttcatgtggctggggaggaattatggagattgggtatactggatgtcatccatttgtcccacccagacctattctccatccttctccatcttgtcctatgcttagcaaggctgattcatatggctggcatccaagcattctcctgggctttggtttctgcttgggttccaacagtaggaggatattatggattgaattctattcctctcctctccctcaaattcacatgttaaagtccttttttttttttttttggccgggcccggtggcacacacctgaaatcccagctacttgggaggctgaggcacaagaatgacttgaaaccgggaggcagaggttgcagtgagccaagaccacaccacaaaaaaagataaaagtttttttgtttttttttttttttttgagacagggtcttcactctgtcgcccaggctggaatgcagtggtgtggtcacggctcactgcagcctcaaactcctggtctcaagcgatcctcccacctcagcctcccaagtagctgggactactggaattacaggtgtgcaccactagcttggctaatgttttctgtattattattatttttttttgagatggaatcttgctctgtcgcccaggctggagtgcagtggcgcgatctcggcctactgcaagctccacctcccgagttcacgccattctcctgcctcagcctcccgagtagctgagactacaggcgcccgccaccatgcccggcgaattttttttatatttttcgcaggacagggtttcaccgcgttagccaggatggtctcgatctcctgacctagtgatccgcccgcctcagcctcccaaagtgctgggattacaggtgtgagccaccgcgcaggcctgttttctgtattttttttagagacaaggtgatactatgttgcccagactggtcccaaactcatgagctcaagcaatcctctggccttggccttccaaagtgctgggattacaagtgtaagccaccacacccagccagatgttgaagtcttaactcccagtacttcaaatacgaccttattaggaaatagggtcattgcagatataattagttaagatgaggtcagggccctagttcaatatgattggtattcttataaaaagagaaaattggacacacatacacacagaaagaaagccaagtgaagatgaaggcagagaacagggcgattcttctataagccaaggaatgacaaagattgccggcaaaccaccaccagaagccaggagagaggcatggaacagattcttcctcacggttctcacacaactctcatgacaccttgatctggaacttctaacctccagaattgtgagacaaccaatttctgtcatttaagccagtttgtggtactttgttacagtaactctagcaaacgaatatagaggatatcaggggatgggctacacaagtcacctatacttgccggcttcccgttctccctatttcattctttccgcaactcctccaaaatggatctcaagcacccactttcctgatcctgctctctccaaagtcatcggtaatttgattttcaatggccaaatctgaccctttctgtcatcattccacttgactacatatattagggtatctcccacttcaagatccatgtctggataatttccattgccttccttcattcatttattattattattattttgagacaaagtctccctctgtcacccaggctagagtgcagtggcgcgacctcgctcactacaacctgcgcctcccaggttcaagcgattcccctgcctcagcctcccaggtagctgggattacaggtgtgcaccaccacacctggctaattttgtacttctagtagagacagggtttcgccacattggcccgactagtcttgaactactgacttcaagtgatctgcccgccttggcctcccaaagtgctgggattacaggagtgaaccatgacaacctgcccaaatcctttatttttaaatgtacaaattccctgaggctataccctttatccttctctatagctaccaccagaagttgcaaattattgccatatcccccccctcagatgttttatttggtccttccctacacagaaaccccacaggtaccacaatgcctagcagatgaagtccaaagtctttagcttaacatttaagaccctgaccaacttgacatgagacaaccttttctatgttttctgggaattccccacctctaacctaagcatatccaattccttattttccaaggtaattggaaatagagaatgcaaaggcttcaagtcaaagataataacattatctgtaagcatcggagtggactttaagctaatgactgaaaatgatttttccagcctctttctgggacagtatagcgtattgtttagattgcagggattagtcagatagtttgaatcctgggctcccctacttattattggctgcatgcctttgggcaagtttctaatctttctgacccagtttcttttttctgtaaagggaagatggggtatctatctgccttatgggattaaggattgaactcgataatgtatgtaaactttttttttttttttcagacagagtatcgctctgttgcccaggctggagtgcagtggctcgatctcggctcactgcaagctccgcctcccgggttcacgccattctcctgcctcagcctctcgagtagctggaactacaggcgcccgccaccaagcccggctaattttttgtatttttagtaaagacggggtttcaccgtgttagccaggatggtctcgatcttctgacttcgtgatctgcccgcctcggcctcccaaagtgctgggattacaagcgtgagccaccgcgcatggcctgtaaattgttttaacacagtagttagatggtccataaatggtaccattattacttttatgattgctgctccacctctgagcacattcatacaattcactcaagtcattattagagcactagattgagtgcgagtcagacctggattcccacaaacttctttgtatgacctcgggcacatcccttccctgggcctccgtttctccatctgtaaaatatggatttgttgtcggggtggggaggctgcaccacgcacaggttagactaatggatctctaaggtcctcacatctttaaagccccaaggggataagccacagtgcctcctgtagggcagtctaagcttatcttccagataggcaggtttgaataccgatcctttttcttgaccttaaggaattcattcacccttttcaacctcattttccctgtttgtaaaacaacagcaaacgagacaaacacacgttacttcctttctagcagggttcctacccggcgccaagcaaaagtggaatgtaccctaagtagctctggccttcttcctgctcccaagcttcccaattccgtcccctgccccgctgccgcccgcggctctccttccccttctaggaacggctcaagcgccttgggcactccatcgggttctgcaccgagttctgcatcataaatacgactctcgtgtaggatttaagtgtgaacttctgcaggttctcggaccctgaagcacccggggccagacattccgagctcgcggcggtggaaggcacgcaaaagggcgaaccgagacgactccaggacgctgaggcagcgcaggccccacccgkccccgccctgccccgccctgtcccgccctgtcccggccggctttccagtactagtcctctggcgccggctcccagcccctctcgtacccttcaaatcgcgctccgcgctagactctcgtgatagctgagactttccccggaaggcccgcccccttcgccggagaggccaatgggctagggcaacggttgcgacggttggattttgaaggagccaataggcgctcggagcggagagtttaagaggcgtaagccaggcgtgttaaagccggtcggaactgctccggagggcacggtgagaggtggtggggctgagccgaggtggggccgtggccagggggagggggtgctaggccggaaggggctgcagccgagggtggccctgattttgtggccggccaggagcgaaggggtccctttctgtcccctgagcaccgtcgcctcctttcctccagggctccgtaggcaccaactgcaaggacycctccccctgcgggcgctcccatggcacagttcgcgttcgagagtgacctgcactcgctgcttcagctggatgcacccatccccaatgcaccccctgcgcgctggcagcgcaaagccaaggaagccgcaggcccggccccctcacccatgcgggccgccaaccgatcccacagcgccggcaggactccgggccgaactcctggtcagtgaggtgccaaaggaactgagtgagagcagccttcatactttctccctggggagcctggtcagactgtcttctctttctccgccccaggcaaatccagttccaaggttcagaccactcctagcaaacctggcggtgaccgctatatcccccatcgcagtgctgcccagatggaggtggccagcttcctcctgagcaaggagaaccagcctgaaaacagccagacgcccaccaagaaggtatgtgtcccagaggggcttaaggcacgggacctgactgttctttggataataccatcttgctccttcactaccctttatgccaggaacatcagaaagcctgggctttraacctgaacggttttgatgtagaggaagccaagatccttcggctcagtggaaaaccacaaaatgcgccagagggtaagacccgaagttcctggttcctggagggaggtgtcagttcatctccagggctgagcacagatayctgtctcctcttcctatctaagattgagggcaagggaggtgttgattttcccagcgtctagactcactccgttgccacaggttaycagaacagactgaaagtactctacagccaaaaggccactcctggctccagccggaagacctgccgttacattccttccctgccagaccgtatcctggatgcgcctgaaatccgaaatgactattgtaagtgcatccttatcctcrcctcatgcatggagaaagagggcctgggaccacacaaacaaggaagctcatgctcttctctccacctctgacagacctgaaccttgtggattggagttctgggaatgtactggccgtggcactggacaacagtgtgtacctgtggagtgcaagctctggtgacatcctgcagcttttgcaaatggagcagcctggggaatatatatcctctgtggcctggatcaaagagggcaactacttggctgtgggcaccagcagtgctgaggtgcaggtgagacgtgtccagtgctgtcattctcaccagtcccaatgggcttgcacagctggaggatattaatgccaagtcccaatctctgatcctagtgggcttctctctctagctatgggatgtgcagcagcagaaacggcttcgaaatatgaccagtcactctgcccgagtgggctccctaagctggaacagctatatcctgtccaggtcagtggtttttgttggtctatggtagtctgatatttgcccaccctacccttgactg

SEQ ID NO: 8766 - DNA, 201990 bp, Homo sapiens
  misc_feature (1)...(201990): n = A,T,C or G, or insertion/deletion polymorphism (see Tables 1-2)
ttaggagggctttggagaatggtttgctcatggtggcttttaaaatacactgagggttgccaggctgaatgggatccctgcggggctggtgacctggttctaggctggtgctcagcagagctgcctcctggtgggttagtggacttgttaaacatagttgcctctcctattccctgttcttgggggatgaagaagaaagtcttgtactctatcccttcccattctaaaattggggtaacggaggcccaagagagtaataatataagaaataagagccaacacagatcactttatgttaacttgtctacaaatgtcaaggggaggaacatcatggcatagtggcaagaaagatatagttttagatcctggtttttgccagtctgaaactgtgtgaccttgtgtaagtaagtaagcctgagactcagtttccttatttgtaaaatactgatgatgatgcctattatacagcattgttgtaaggagtagaaataatggatgtaaagtacctggatgagtgctggcatccagtgggtacctgataagtggtctgtatttatttatttatttatttatttttgagatggagtctcactctgtagccaaggctggggtgcaatggcacgatcttggctcactgcaacttctgcctcctgggttcaagtgattctcctgccttagcctcctgagtagctgggattaccggcatgcaccactacgcccagtgtgtttttgtattttcggtagagacagggttttgccatgttggccaggctggtctcgaactcctcacctcaggtgatctgcacctgcctcggcctcccaaagcgctgggattacaggcatgagccaccgtgccctgccttctttcctttttttgagatagggtctcactctgtcacccaggctggactgcagtggtgcaatctcggctcattgcaacctctgcctcccgggctcaagtgatcctcccaccttagccccccaagtagctgagaccacagggatccaccattatgcctggctaatttttgtattgttttgtagatggggtttagccatattgcccaggctggtctcaaactcctgagctcaagtgatccgcctgcctcggcctcctaaagtgctgggattacaggcatgagccaccatgcccagctgtaaaatttttccttttagagaacagggtcttgctgggtttgccagactggagtgcagtggctattcataggcaatgaccgtggcatactatagcctggaactcctgggctaaggtgatcctcctgcttcagcctcctgagttgctgggactacaggcacccagcagataaacaatgttttgtaatcatgcctgacagtaagaattttccaacggctagttaaaaatacagattccctggccaggtgtggtggctcacgcctgttatcccagcagtttgggaggccgaggtgggcacagatcacttgaggtcaggagttcaataccagcctggacaacatggagaaaccccatctctactaaaaatacaaaaattagccaggcatggtggcgggcacctgtaatcctggctactagggcagcagaatcacttgaacctgggaggtagaggttgcagtgagccgagatcgggccactgtactccagcctgggtgacagaacaagactttgcctaaaaaaaaaaaaaaaaatacagattcccaggcttcaccctctacagtctatggaaaggcatgggaatctatattataacaagccattgagtttctttttctttttctttttttgagacagagtcttgctctgtcacctaggctggagtgcaatggcgtgatctcagttcactgcaacctccgcctcctgggttcaagttattcttctgcctcagcctcctgagtagctgggattataggcgtgtgccgccacccccaactaatttttgtattttttagtagagacagggtttcaccatgttggtcaggctggtctcagactcctgacctcatgatctgcccaccttggcctcccaaagtgctgggattataggtgtgagctggcactgggtggcttctatgaggaagttttggaatgcatccaggagccctccactccaggttcttggtttattagccttttggtcctctatttatctagccctctgttcagtaaagctttaggtttgtttgaaggagacatgattagaaggtcaaatattgtatattctcaaggcgaatgtgtcctgaactttgcatagtagaatttattcctgaaaagttgtttgcagatggaatttgttttgtgcgtgagagaacaggcatatacagaataccttagtttgctatttaatttaaatcaatattatctgagtgactgttatttgctgaggatacaatgataaacaagatgcagaccccatcttcaagggtcttagagtccagcgaggaaggtggtcaaataaacaggcaattacaaaattgtggttagataaggttaagcacagggagctatggtggatggaggaggaagtgcacccaactcagtgttggggcatcttggaatttctaggtgaagtgacatgtgatggagaaacctatagactggaatatagtctcaaatccattgcaaagggaatgatccttccccaacttatcttcgtggaaaaataaactttctttctttcttttttttttttttttttattgagatggagtcttgctctgttgcccaggctggagtgcagtggtgcgatctcggcttactgcaacctccgcctcccaggttcatgccattctcctgcctcagcctcccgagtagctgggactgcaggtacctgccactgcgcctggctaattttttctacttttagtagacgggatttcactgtgttagctaggatggtctccatctcctgaccttgtgatctgcccacctcggcctcccaaagtgctgggattacaggcgtgagccaccgcgcccagccgaaaaataaactttcacatcatgttacccctggatacatttttgtggccatgcatctgcacgaatattcaatccctgctacaggcaagacactgagtgggaygttgcagggctaccaaggtgaggaggtcccaacccctgtcctcaaggagttgatgtaacacctacccaggattaatttcatttctctcagaggtcattaatccagtgtgatctgtttatggctgaagaggtagtttattattcaggtcttcactccctttcctgaaaaggctgtttattttgtttcatcactgtgcagtggcgaaatccagttccaaccaatacttaagctgggcatacattttacccaggagaaaactgaagggcgtgcaggagttcacagagctgtttgctgacccaagccatgaatctgtggagacctgggtcggtcttcagggttagtagggtctgtagggtctgtgaggatccgaggcagcctgcagacctactatcatcttctttttcttttttataattggcaatcatccttggctacccagtagcatcttttttttttttttttgagatagagtttcactcttgttgcccaggctggagtgccatggcgcgatctctgctcactgcaacctctgcctcctgggttcaaacgattcccctgcctcagcctcccgagtagctgggattacaggcatgcgccactacacccagctcattttgtatttttagtagagacagggtttttccatgttggtcaggtggtcttgaactcccgacctcaggtgatccgcccaccttagcctcccaaagtgctgggattataggcgtgagccactgtgcccagccccctggtagcatcttaaatcaagctttccttccctctgggtatcatggacatgaacaccttttatgtctctgcctcaagaggggaggaggcacagaggaacaaaaatccttgtgaattatgataattacatagtgtttaaatgaagggtggcaaggtgtgtaagtccataggtaaggtttcttttttctttttcttttcttttttttgagatggagtctcactctgtcacccaggctggagtgcagtggtgcaatcttggctcactgcaacctccgtctcccgggttcaagcgattctcctgccctcagcctctggagtagctgagattacaggcacgccatcacgcccagctaacttttgtatttttagtagagatgggttttcaccatgttggccaagctggtctcgcactcctgacctcaagtgatctgcctgccccggcctcctgaagtgctggggttacaggtgtggtgtgagccaccacgcccagcctcttcttttttttttttttttttttgagacaggttttcacgttattccccaggttggagtgcagtgttgccatcttggtttactgcagcctaggttcaagccatccttgtatcggcctcccaggtagcttagtctacagctgtgtgccaccacacccggctaatttttgtagaaactgggtttcaccccgttgcccaggctggtttcgaactcttgagcttaagtgatctagtcaccttggcctccggaagtgctgggattacaggcgtgagccatcgtgcggcctggcaaagtttctttatcctcagtgcttgtctgggtgtgttgtctggtgggaaccacttagaccctgtaagtgaatgtgtattcccatcttgtagatggtaacctgaggcccaacgggtgtctggaggtagtgttggacacctcgtggtctgcatcttgctgcacacagaatccagcctagactcattatcctggcctttgaagtctcccccagtatgaatcccccagcctcccattcctgtttctccgaaggccaagctcgaagcatctgctgcctcgtttctgccaagttggccccacctcctgagacacttctcccctctactggcctggtgaaactcaacacatccttcaaagcccagctcaggtgtcacctctctcctggttggaattaacctcttcctccttagcactctctggtttggccctttctcttgcggcttctcctgggcaagtggcatagcctccctgatcctagtgtcttcctctgtgcatgggcacaggagtaatatctgctgtgatctttaactcctgtcagttcattgacctctttaacaacgtgatgaaagcttccagaagagctaatgtatgtggagtcccacgatgtgtcaggctaggtgtttaggactttactaactactgtctcgtttaatcgcgaatgcagtggacctctctctccacacgtcctagtacgatctttatttcacacgggaggagaggagggtgggtggggtcggccagagaggagaaatgcgtctccagagttcacagggctggtactaccagcagagccccgtccaccatatgccacagctggggttctaatccctggactggcttgtactgggctctctgcctccctggccggcgctcgggggctgggggacagaacacaatgtacagcgtgccttctacaatttcggggttcacgcacccccaagcccacccagggccaggtcaaacgcgccttcgccgggttgctgtctacaatcaggcttggctgcgctctcagtaggggtctcggtcaacctctgcccacccgaacccggcgccgtggacctggtgtgaggctggggagcccgtcctgaggggtgccggctcgaggcgctagagccacggagcctggtcccgggctccaagtcccaggaatgtgggagggctgggcggaggggcgggcgaggcgggagcgcttcctctgcccgcgggaggggatccgcggccggctcggagggggcgggggcagcggcgggcggcggcgaggggctgcggagctccgcagccgccgggccggccggggcgggaggaagcgatgaatattcagagggggaggggaagggagggggccgagcgctcgccgcggctccctgcagccccagccgcatgacgcgcggaggaggcagcgggagcagccgcgggagccgggaccgggtagccgcgcgctgggggtgggcgccgctcgctccgccccgcgaagcccctgcgcgctcagggacgcggcccccccgcggcagccgcgctaggctccggcgtgtggccgcggccgccgccgccgctgccatgtctccggggaagcccggggcgggcggagcggggacgaggcggaccggctggcggaggaggaggcgaaggagacggcaggaggcggcgacgacggtgcccgggctcgggcgcacggcggggcccgattcgcgcgtccggggcacgttccagggcgcgcggggcatgaagccggcggcgcgggaggcgcggctgcctccgcgctcgcccgggctgcgctgggcgctgccgctgctgctgctgctgctgcgcctgggccaggtaagcgccgggtgggctcgggcggggggcaggaggctggggcgggactggcattgactgcacctgcccgagcgtacccccccggggggttccggggaagggggcgggggtccggatccccggatccccggaaggcgacttgcggggaccccggccggcctckcacgccggcgatcgatcccttttccggctgcccaggatcgggggagagaggcgggatccgggtgccgcggtgcccgagcctcccggggaaagcctccgcgcgggctccaggccgtccctggcccggctcttcccggcgctgggcacatctggcgggcacgggcccggcttcctagccggaggcggccggagggggcgtgtttgcggaggtctggggacgcagagccgggcggcctggctgagcctttgccgacagacctccgacccggcctgcaggggcccgaggggcggcgggggcgacagggcagggccaggcgctgggcagtggggccctgggcgaggcgcgggactccgggccgagggccctgttcctggggaaagttcccaggccggggaaaaggtggccgcacgctggcttttctcaaggcagccggccctcttggcgtcgtgcttgatttcatgggtgtttaatwygtgctttgtgggcgctggctccccctccccaccccaccctcaccctcttttctggcttcacttttcagataatgctgtccctggcgttttggtgaccgacctttccccttcctggcatttccataggggctgaggcagagcagytgaaggggcattcccatttcacagatggggaactgagggagagaagtgaaakagcggagcacccagcccgtgccatgggagctgagccagcgggcacgtcctcttagcctctggagcctgttggggtttgaacccgcaggggaagcggtctagggctgccttgctgtgcgtttctgcaaatgaccatcttgcttgttttatacagacaccatctctgaggaaatgagttattggctggggatggaacctggtttcagggaaaacttctccagcgcgaatacaggagagagcagaagcatcaccctggggcagcaatgccgcctagcaggctgtaggagaagggggctggggcctgggggctgcgtgaccctcggcacccaagggtctctcctcgcagtttccccagcaggttctgcacaggctctcctgggggccagaaggcaatgtgacctcctgcagagaacctgggagtagatgtcaggagactggctccagggccgggccacagggctggacttgctcttcaggcttctctaccctcagttaaccgcatctgtagaatgagtatagcaccctctgcccaatggaattgtttgaggggcttccactggccaatgtctaaaagaactttgtaaatattaagggtttccacatgggattctcattattaaggtacagtgcctgtgggggctgtcttctccctgtccatgtaaggaaattcagggaagcagtgtctgaagttaaaaaagccttgtatttgaagatttcttgtatcaaaagtttatgctaaaacaaaaaccacaaaaaacagaaaacccccaaacttaaagcttcatttatttttaaatgtataatatatgtaattttttttttgcttcagcaaaaaaattttaaattatatatatataaaatttatttatttttgctccagccatagtggttgctagctgtgttctcaatcagcaaaaagtttcttgggtaaatttattgcttgctcaatccttccttgtatttcattagcatattgccactctacacttgtcctgtatttagatatttccttcctctatggtttgttctgtagaacctcaaaaggactctcttatttcttttttttttggacacattatgaaataggaagtctaaaaggctcccagaagaagcatcttcaaaatccacattcagcagttcattttgataatggatatttcagggaatcagtgcatttttgagctggaccagactttcaagayagctgaaacccctcagagctcttagatgaggatattgatgtccagagaagacagggagcaggctgaggtcacccagcaaggtattagagaagacaagatgggaacctgggtcacckgcctgggcctcatattttcaaagtgctatttttttttttcccgtgttttcactttgatcttacttttaatgatagggacgtatcactgtgtcttctcaaaatggtgggtgtgaatggaatttttcaaagttgaatcaatttgagatatttctgaagtttgtttaggaaacaagtatgtgactaccttcctaagagctgactggttttttgaggcctggattgtgtgtgtatgtgcttatgtgtgtgttataaaatggaatcaactataccaggttaaacaaatggacaagtcatggaaaagacacagctctgtttggacattaataagggcgggtgtggaagctggaaagctgagatgccggaaggctcagtgcttagtaggcccggaaaagcaatttttgaactggcatctcattccccttttctaagacaggaaggacggtcagagatgattccaacatgaggactttgctagttgcagtgtctgactcctcccattctcatagcagttttgcacagtagttttggtttgtgtgtatgttttaggcaatgtgacaaagcagttttcctcctgcctccttgagaaatttaatcctgacaggttctttaagaaatcagcttgatgtgggctgattttaaaagaataaatgaaaaaaaaaagctggtgactgatagctgttttattggtcttgtagtgttttggttttgttttatcttcactttcttgtttcctggtgaataataactgggtttattatctctcatggctaatccttaagcctgattccttacctgttccatccagagtacaaagtatattttgactcctctttaaactgcttgttagattctcatatgagtgactttaaatatttttgttttgcttcaggacaacgggaaaaccaaacgattatgttttgtttgcagacagtttacgaaaacagcaaattggtttatggttagaccgtgactttgagctgacttcaagttgggccccacgataaagataaccatggaatacccaagctttcctaagcagagaggatcctggcttccaaatgagcaattttggtcagcaaaggggttatttagctcctaaaagtaatttttgcttgaggttggggctgaggcagagtggctgaacaaccgtaggcctgggtgtagccagaggatcatcagtaattacttctcagttcattcacttcttgggctagggaattattttgagtgcaggataagaggcaattttctgtgtgtttcccttctaatataatgccactgatgatattataattaataggtaacattatgcatgacaggcactgtgtgctaagggttttaatgcattatytcatttggccatttcagaaataccaagaggtaggtgctgttcttgtttatttgtttgttttttttttttgatagggagtcccactctgtcacccaggctggagtgcaatggtgcaatcttggctcaccgcaacctccacctcctgggttcaagtgattctcttacctcagcctcccgagtagctgggattacaggcgtatgccgccatacctggctactttttgtatttttagtagagatggggtttcaccatgttggccaggctggtcttgaactcctgaccgtaggtgatctgcctgccttggcctcacaaagtgcagggattataggcgtgagccactgtgcccggcctttttttttttttgagatgaagtctagctctgttgccaggctggagtacggtggtgtgatcttggttcactgcaacctccgcctcctgggttccagggattctcctgcctcagcctcccaagtacctgggattacaggcacgtgccgccatgcccagttaatttttggatttttattagagacagggtttcagcatgttggccaggatggtcttgatctcctgacctcatgatctgcccacctcggcctcccaaagtgttgggattacaggcgtgagccaccgtgcccggcctgtttttgtttttaagagacagggtcttgctttgtcacccaggctggagtgcagtggtacaaacgtaattcactgcaatctcaacctcctgggctcaagggctcctctcgttttagcctctcaagtatctgggactaaaggcgtgtgctaccattcctggctaatttttttttttaatagagatggtgtctcgctatgttgcccagtctggtcttgaacctctgggctcaagtgatctgcccaccttggctccccaaagtgttgggattacaggcatgaaccactgcacccagccatgtttttattttatctgagagaaaactgaggttcagaacttaactgtrtacttctggaatcttcacagagaaataaaaaaaaagaaaaataatttactatagattcattaactactacgtggcggagccagggctgatgtctccactgccccaatttaccatcctgtgctgtaaaaagtcatggagaaggttttctgtgtgcagctaagagaggaggtggcagacatttatttatttatttatttatttatttatttatttatttatttatwgagacgaagtctcactctgttgcctgggctggagtgctgtggcacgatctcggctcactgcaacctccatctcccgggttcaagcgattctcctgcctcagcctgctgagtagctgggattacagacgtgcgctaccatgcgcagctaatttttgtatttttagtagagatgaggtttcgccatgttgaccaggctggtcttgaactcccaacctcaggtgatccgcccacctcggcctcccaaagtgctgggattacaggcctgagccaccgcacctggcccagacattttttagacagtcttgctgtgttgcccaggctggactcgaactcctgggtccagttgacatccctcttcatccttccaagtagccaggactgcagggacatgctacctttattttgggttctttgtgtcctaaaccctgtatgatctgctccatttgtaacacagagaacccaggtgccctctttcctgcttatatttctttggggcctcagtttacaaggcaagtctgcctttgtggagatagactggggtctgggatggaaagacctgggtttgggtctttgctctgccactgcataaactcagcaagtcacttaacctctgtgacttctcatttccttatctggaaaatgggactaacacttcctgcttcactgggtggttgagaggatcaaataagatagaaaaggaattgctacgtaacacctaaagcaaggcccaactgctagttgtggctgctgctgttacttggagagaagaaatgaggccccagatcattagttcatatgacaattttttctttttttaagacggagtctcactctgttgcttaggctggagtgcagtggcgtgatctccacttactgcaacctccgcctcccgggttcaagcaattctactgccttagtctcctgagtagctgggactacaggcacgctccgtcatgtctggctagtttttgtattttagttgagacggggtttcaccacattggccaggctggtctttaactcctgacctcaggtgatccacctgccttggcctcccaaagtgctgggattacagtctgagccaccacgcctggcccatatgacaaatatttatgaagtgttttccacagagtagtatggaataactctgggtgtgtgcaagatgaactgagctcagtcacaatacttttttttcccctaatgttaagaattattggctgggcagggtgactcattcctttaatctcagcactttggaaggcagaggtgggaggatcaggtgagcccaggagtttgagaccagcctggatgacaaagtgagaccttgtctatacaaaaaattagctgggcatggtggtgtggacctgtggtcccacctacttgagaggctgagttgggaggatggcttgagccctgggaggttgaagctgcggtgaaccttgatagcgccactgcactccaacccaggcaacagagtgagaccctgtctcaaaaagaaaaaaaataaaaaataatttattttagggggtcttagtaaagaaagacccccaaaagtccatgattttataggtcgaatgaggtgaaaagtggtatcatgataaataaatttgtttaaatatcataaaaagttggtctaaagaaaaacattgggtaaataattatgtgagtatgatgtggttatgaccaaattgtaaagatgatcagtttcttaagtctgggggacaggcactgagcagaggccgtggtggggaacaggagcctgtcttcatggctcttactggccactgggcaagactcagatagyaccaaccaaccagtcacagttgtgatgtaggatgtgactgtgaatgacatccctgctgccygcttcagagaaagggctgccacttgccagagaaggaatggtgataatgagggacagccagtccctaagtggagatccctgaaagtggtgaatatcttagaccagagaagcccagagcagtttttttaccaccttgtatggctggttttccagtggctttactggtgccccctcggaggacaggggctgtaggaagtttgttattacttccttattagtgacagctgcagtcatcctattgtctcagaatttccctggcatgtaaatggtaggataaggggtggtggtaagcagatggggggcattttgaaaacgaggcagtgtcagctcccacagaaggtctaattttaaacatgcaaataattttcagttccacttttccttcttcctgttagagggaagytgtcccctgttgccatttctgaaacttgggcggacaatgtcgttattgtgttacaaacgatttgcgtctccagggcaggagttgggtgatatttttctgggagcctgtgccagggcgtagcccagtgttatctcatggtttctgagtgaatgagtgagtgagtattaaaacttcatatcaacatggagcctataacacagtggttctgaatctttcttgggggggaaaagaagagatacaagacccctagagagtatagagagtatgtaaaagggaagaatccttccccaaaagggaatgcacatatttacaatattgtatccaatttcagaaggtttttttaaaatttttaattttattgttttttttttgagacacggtctcagtttgtaccccagcgtggagtgcagtggcatgatcttggatctcggctcactgcagcctctgcctcctgacctcaggtgatccacccacctcggcctcccacagtgctgggattacaggtgtgagccaccatgcctgaccatgactagtgttttgatgtgtggatttactacaatttatttgaccattctcctatcaatggacactttagttgttttagtacacctccctgtcccgtcacaaatcatactttgtaatgtttctggtggatatttcttgtaaccttcacaagtttatctgtagagtaaatttctagtttcaggattactggattggaagatgcatgcatttaaaagtgtgattgctgttgtcaggttgtcctccaaaagtgtcccctcagtttgtacctgtatccataggtttggagagtgtctgtttctccataccgtctcatctgaaatgaaaatttttacatgtttgctagtctgaaaggtgaaaaattgtatcttgttttttttttttttttttttttttttgagacggagtcttgctctgttgcccaggctggagtgcagtggcgctgggctcactgcaagctccgcctcccaggttcatgccattctcctgcctcagcctcccgagtagctgggactacaggcgcccgccaccaagcccagctaattttttgtatttttagtagagacgaggtttcaccgtgttagccaggatggtctcgatctcctgaccttgtgatccgcccgcctcggcctcccaaagtgctgggattacaggtgtgagccaccgcgcctggccgtatcttgttatttttatttatatctttaattttgagttagttgagttttttggtcatttgcctctgcttcttcttctttttttgttttctttttttttttgagacagagttttgctcttgttgttcaggctggagtgcaatggcgtgatcttggctcactgcaacctccacctcccaggttcaagtgattctcctgcctcagctttctgagtagctgggattacaggcgtgtgccaccacgcccagctaattttttgtatttttagtagagatgggacttgttccttaggaaccatgttggccaggctggtcttgaactcctgatctcaggtgacccacctgcctcggcctcccaaagtgctgagattacaggcgtgagccactgtgccaggccccattttttgttttttggttaactccctgttcattaaaaaaaaaaaatctrtatctatagatagatagatatagatataatctttgttatcaatttgtataagctctttggaaattagtccttcgattgtcatttgtattgcaaacacattccccctcccccatgccaattattttagatgtagcacttgttccttaggaactcagagataaataagaccctagggtggtgaagagagcatagaatttggaacaagactcctttgttggagtcttggctctaccacctcattagctgtgtgatcttgggcaggtatcttgacctttctgatccttgctcttcatattccaaaaatgctaataataggagtacctctgacacagggtagttggagaagctaagtgtgatcatattatgctaaaattccttgtaaatggctatggaaacataaacacagcattttataaaataccacgaggtattccatttactgaagagttacatcagaagagtatttctgattgtgccactgcactccagcctgggcgacagactgagattccatctcaaaaaacaaacaaacaaaaaactagccagtcatttataagaatgagttacagctataggtgcaggcggtaaatactctccaagatatctaaataaattaaaaggctatgtagagaacaatgtatatataatgttacctttaaagtgacaaaaaaaggtgaatatagatacttgtgtatcagaagagagaggtattccatttactgaagagttagggcaaagaccataatattgtaattatcaataattatgaattgtcaaaattatgtcatgaaacctctttttttcttttttttgagggggagtcttgctctgtcacccaggctggattgcartggtgtgatcctggttcactgcaacctttgcctctgaggttcaagtgattcttctgcctcagcctgggattacaagcatgcgccaccatgcctggctaatttttgtagttttagtagtgacagggtttcatcatgttggccaggctggtctggaactgctgacctcaagtgatctgcctgccttggcctcccaaagtgttgggatttttttttttttttttttggagacggagtctcacccagtcacccaggctggagttcagtggcgcaatcttggctcactgcaagctccacctcccgggttcacgccgttctcctgcctcagcctggctgggactataggcgcccgccactatgcctggctaatttttttgtatttttagtagagacagggtttcattgtgttagccaggatggtctcaatctcctgacctcatgatccgcccgcctcagcctcccaaagtgctgggattacaggcatgagccaccgtgaccggcggaaagtgttgggattacaggtgtgagccaccgcgcccggccccatgaaacctcttatattgggtttgagattaaatccacaatggattgtgtgtattatatatacacacacagacacacgcaaatgtattaaaatgtataatatgaagcagtggaacttccctgatagcacaatttaaatatttcctttttgacaaacgtgcatagttaaataaattaagtgaccaccaggtgtgactgaagagtggccagtgtctattcctagccccgaaggagcacagggatattgactgtgtcccttaaaaaaaacaaaacaaaacgtagggctttctttgtattggtttgaacatttctctttatcttgtgacctggccaactctggctatggctgcctcctgtctctcggtacattttctgtggcggtcaagaggagttattttaagccaccaatgggaaagtttaaagacataatccttggctgtaattgcgggagacgggaggctgagagtctgtgctgacttgccacctgtttccacggcagcaaggtgattgtgcatttcctgctgctggctgaggggccagcaaattttcatgtcgttgtgtcatggggaagttttcctgtctcaatgagagcacaccgtgcttgtggtcttgttcctgtgaccaggacatggagaactatggggagattgttctgggtgtgaagggaaattgctggccagtgcttagtgcacgggctttggagtcagagccaacttctccacctcctacctgtgtgaccttgggcctatccttctaatgcttggagtctcttctgtcctcatctgtatgatggggataacaagaatacctactttataggattgctgtggaggattaaatggatctgcatgacaaatgcttagcatgaaaaaawccctcaacagatattggctgctattttattatcttattgtgctgagacactggcataatttacaattcaaaaattaaatttttttaatcttatactgtagtttacaaggccctttcacatatatgagcttgttcaatcctcacagcgtccttgagtttgtcattgttattgccatttaaaaaggtatgactcagagtggctgtaattgacttgtccaattcaggtttcatctgtcttttgcagaataataatcatgtacgttcatagtataggccacctctttttttttttgttttttaagacatagtctcgccctgtcacccaggctggagtgcagtggtgcgatctcagctcactgtaacctccgccttctgggttcaagcgattcttgtgcctcagcctcctgagtagctggcattacaggagcccgcccaccatgcctagctaatttttgtatttttagtagagacagggtttcaccatgttggccaggctggtctggaactcctgaccttgtgatctgcctgccttggcctcccaaagtgctggaattacaggtgtgagtcaccgcgcccaagtataggccacttttaagaattactcagagttagcttataagaggcgaatcagtggagtcctccagtttggttcacacataattattaggttgaaccatataaagttactgtttttggtcctgtgaatattagtatttatatatggttccaatctgatatgttccagaaaatacacacttaagtaaagtttggaaaaccaaatcatagacttacatactgtaaggcggtgtatttgaaactgggatgtaaaatcaatttagtgagttatgacctgcattaaaaaaatggtagaatatcagagtttgctggtaagtattgtaaaaataccagagtttgctggtgagtattgtccatttcagttatatatgtgcgcacgtgtgtgtggtgtgtatgtgtgtatactaaattgcatataaaatgaatttcttatcatgggttcacctgttgccagaaaacactggaagtcactgttccagggaatggaatggtggaagatgcctggtgggggatggaggtggattctgtttccagacacagtaaaaaaaaccagtataaagtccccaattatgcattgtcagtgtctctatgtgtagctggaaaccattcctgcagcaggtaagcaggaagaaccaaattgtcgagaggcacttcaggaagggaagtgggccgactgaaagctttggaggcctgcctttaagtagctgcttttctggaaacttcagggtgaccagcctagtgaacaagctatgggtcagcgttgtgtgttcctttggtaaatggatttggtagagagctaacactactgcatttgtagtttatttgtttgtttgttttctttttgagacgagtctcactctgtcacccaggctggagtgcagtgttgcgatctcggctccctgcagcctccacctcctgggtttaagtgatcctcctgcctcagcctcctgagaagctgggattacagatgtgcaccaccacacccagctagtttttgtatttttagtagagacggggtttcatcatgttggccaggctggtgttgaactcccgacctcaagtgatcctcccatcttggcctcccaaagtgctggggctatagggctgagtcaccgtacccagcctgcgtctgtagtttaaatgataacttaatgaccaccatccagtagctgaggctctaagagggaggtctgaatagtgggtgactcagctcagccctgcctgacctctagctctaggctgtgctgtctctaggctccggcactgatttgcatgggcctgaatgaaccttctggagattgttagcccaactggctgaaggatcctgatccccaggttaatttgattcccatcaaacagttcatttttttttttttttgagaggcagtctcgctctgttgcccaggctggagtgcggtggtgggatcttggcccactgcaagctctgcctcccgggttcaagcagttctcctgcctctgcctcctgggttcaagcagttctcctgcctcagcctcctgagtagctgggactatatgtgcaggccgccacacccggctagttttttgtattttagtagagacggggtttcaccatgttttccaggctggtcgtgaactcttgagctccggcaatccacccgctgcagtctcccaaagtgctgggattacagttgtgagccactgtgcctggcctttttttttttttaatataaaaaaattgaaaatacagataaaaggaaacaaaattacctgtaatctccactcatccaggttaactcctggtacctttttgatgcgatttctttgtctttttaaatgcatgttctgtctatttatactacaataggataacctcctacatgtgctttgtaacttacatcttttaatttttaacagttgaggtgggccgggcaccgtggctcatacctgtaatctcagcaccttgggaggccaaggcaggcggattgcctgagctcaggagttagagaccaccctgagcaacatggtgaaaccctgtctctactaaaatacaaaaaattagtggtggtgcacgcttgtggtcccagctgtttgggaggctgaggcatgagcatcacttgagccctggaggtggaggttgcttgagtcctggaggcggagtgagccaagattgcgccactgcacttcagcttgggctgyagggtgagattctgtctcaaaaaaataaataaataaataaataaaataaaaaaacaattgaggtggatgtctccctaggggtaccccaggaagccacaggataaaaagcaggcatcttgctggagggtctctgttgctcagtagaaattattttgtaatgttttttgaaaaccacaaacatggacatattatggactrgataccacatttgcatcaggatttttttttcaaccagtacagtacataacaaagaaatctctaccctgcagaccctctgggggtgtgagagcgctccttgctattctcagggtcaatgtatggcaatctgtgaaggactgacaatatattgcaaacgtttccccctgccagtaaatattcttcttttgtataactgttagctgttgcatccattccattatgtggaggtaccttaatttatctaataagtcctgtgattagtcttatagtttgttttcaaaattttttttgtcacgataggccctattcagttgactttgtgatcagctctgaacatataatctggtgattgccttaagataaattgaataataaaagtaacaatagtagctaccatcggttgaatatttatcatcaactgttgtgagcacgttgtacatattaactcatttaatcctatgacgtaggtatagggaaggaaactgaggctcagaacctctgccagctagttgtgggcttcctttgaggcacaggggagctgaatgggagggtctacataggacagggcgtgtctgagtccaggaaggacagctggacttgggccagtctcacaggtgggaaggctgtctttctgtgaggatgggtgacttgttgacctttgatcctcagagccctgatgcagcaggagtgaaatgattcccagagccacagaaaacaagagtatctttgtcttggattttagatcctggagctatcaggtggtaagaaggctgtctgacccagattaagtgatgtcatggtatcatgttggggtgtgggccttcctgttgtaaattatttgggatttcatagagatcgaagtcatgtgtggatgacatgacttcaggatgtcccattagaagaggaacgtgggggtcaggcgtggtggctcacgccagtagtcccagcactttgggaggctgaggcgggcggatcacgaggtcaggagttcaggaccagcctgaccaacatggtgaaaccctgtctctactaaaaatacaaaaattaacagggtgtggtggcacatgcctgtaatcccagctactcgggaggctgaggcaggagaagtgcttgagcccgggaggcacaggttgtggtgacctgagattgtgccattgcacttcagcctgggcaacaagaatgaaactccatctccaaaaaaaaaaaaggctgggtgcggtggcttacgcctgtaatcccagcactatgggaggccaaggcgggtggatcacaaggtcaggagatcgagaccatcctggctaacacggtgaaaccccatctctactaaaaatacaaaaaaaattagctgggcatggtggtgggtgcatgtagtcccagctactcgggaggctgaggcaggagaatggcgtgaacccgggaggcggagcttgcagtgagccaagatcgcaccactgcactccagcctgggggacagagcgagactctgtctcaaaaaaaaaaaaaaaaaaaaaagaggaacttgggaaagagcatgggctttggtgtcagcagaagcatgtgtccagttccatgctcttcccttatagctgtgtgaccctgctatctgcacagggacttgagcctctcagaatctgttactgcatctggaaaatggaaatctggaaatgtcactgcatctgtagcaayaaccaggccattttgttactaggtttaagtgagggaaggcatgtaaggcactcagtccagatcatggcacttagtaggcctgagcacatttgctcccacctcagtgacctccttgttaacacgacatctcctgactttggggctgcagagtgatgcagagcactggccagtgttgccatgcacccagggtgcagggagacctgtcttgcaggtgttcaaacaacttttgtcagcctcagtgtcagggacttttgttgcgtagagcagtcaccraatcctatggtgagaagagaaatcgttggagatgggggtgcaggggtggaagctcttatttcagaagacctgttgtgaggtaagactcagaccctcagcttctatccggccacagagtttgggaccagcctttcgatgtcttttggaagatgcacatggaatgcttagcctttgctcttccctggaacctggcttaggctttgcacctatcccaccatgtggttggggtgagtgaggacaacttcttttcctccagaacatggtttctccatctcagccctattgacattttgggctggataactcgctgttttgggaggctgtcctgtgtgccccgtaggatgtcctgcagcctccctggcctctgcctgctaggagccagtagcgccccctcccccacagacaaaaatgtctccagatattggcagatgtcccctaaagggcaaactacccttgctgtaggtaatacttgctttgaagtactggtgtggatggcctatgccctggcagtcttactaggtgggactggctgtcctctcattctcatgggawtggcctcatgctggtagctgacttcctccccgtgagaccgtaggtctaaactaacaaggtttacacatgtgacaaacatccaggttgccagggctcaaaagagggttcacatcgactcccttctcattcactgagtcctttttcrggagctttggccgagtttgtgctgcgtctgggcatctaggtgtcgagttcttccctagtgttttcagcctcggcttcctcctctgtaaaatgggagtaactgatacttttcctgtctgggtgggaaaggaaccccgtgctaatgtgattgatggtgtggtgctaagctctgctgcaagggatgtgaagttgagggaaaggtttaccatttattaggagctttgagaccaagttccttccacacaagagatatgccctgtcaaagggagatcccattgcaaagagattcactgccaagttccccctcccactagctccctggagcaattttcagcttttagagtgtttagaggcctcagggtgtaaagcgagagagagaatgccttccagccagcgagagagaatgccttccagccggtgacattgagaatagcaggaaagaggcagaagaagaaactgacttgaagggtgatgccagccaggggtgagtggagtgaggtaggatttgctttctgaaaactgggatgtgcacacaacctatcaagaatacttcactttgtgaggcccaaaaacagctcctagcacagtgtagagcagacttggtcagaacttcaatccttgayttttttttttttttaacccgaatttcatgaggtttttctgagacatccactggactgtcatataccgtgtgctgggctctcattttatccttacaattattatgttcattttaaagacctcatgttagctagatcagtagggtgactacagtttacagtaatctactgtatatttcaaaatagctagaagagaacaatttggttctagcataaagaaaagacaaatatttaaggtgatacatatcccaagtacattgatttgatctttacaaattgtgtgaatgtattaaattaccacatgtgctccaaaactgtgttcttgaaaaaattatcacgcccattttagagatgaggcacagagaggtggagggacttgcccagatccaggtatgtggctctcctgtaatckcgcttctattgctttgtgatcagcagcaacttagtagctttcaaagcttcaattttcttgtgtgccaaatggggctaataaataccttagaggattgtgatcaagattccgtgaaaaaatgtatgcagtgcccccggcaaggtgcctggcatacagaaagtgctctgtacgcaccagctgctgtcattattattgtttcaactaccagtgatcataaaggatgcctgctttgatgagcttttccaggaatatggactggtctgccctgatctacttgaataatctgtctcaggccctattcggtaaatacatgtaggaggtgcagctgccagggaagggagggatgttacctggagaggacagagtctgaagttcaggaaatacagcaagagccttcctcagggatgaaacatgtgatcttatggtctgactagcctcaagccagctgagctcattgccrtgcaacttggtagttaatgattgctagtaagaagtttaaaaggatcatcccctcaaagaatgtcagagttggaaaagaccttagggacattaggctaggaaagacaatgtcctagtgagtgactgcttgggccctgtatagaagggattctcagatcacttgggatgtcctggctcagcaggaggctaaggtgggatcaattagtgatgtctgccatggccacaagagaggcaaggagtggcacatgtgctgtttatttgctgtctttggctgcagctgaggacactgaggcccaagacttgcttgcttactggacgatcacccaagtcattaaaccacaaaaatctcttttggaaggaatctgttaagaatgtctgattataagagttgcacctttgagcaagtattttttgcttgatagtcttcagtgaggaggaactgtcttcaaagagcacattctgtcttttggcaattctcccaattagaacttagaccactgaggtagaaaggccttagaagcccctttaagtgggctcttctcaactggggctgcacctgagaagcttttggaaaataccagttggaggctccctccccagaccagtggattctggatatctgggtgtatggacacctcttgcccccattggtgttttattttccaagctcctcatgtgttgttaatatgtagccagggttgagaaccactgagaccaaaactctttggaaacagagacccagaaagggagaacatgattgtctatgggtatgtagggctagtggcacaaggagaaggaaaactaggggggaaaaggcctttatcaaatgccacccatatgctagtctcttttactttcatgccgagattcttctttttttttttgagtcagagtctcgctctgtcacccaggctggagtgcagtggtgcgatctcggctcactgcaacctccgccttctgggctcaagtgattctcttgcctcagcctcctgagtatctgggagtacaggcttgtgccaccacagctggctaaattttttgtatttttagtagagatggggtttcaccatgttggccaggctggtcttgccctcctcacctcagctgatctgcctgccttggcctcccaaagtgctggtatgcctggcccttttttttttttttttttgagatagggtcgtgttctgttgcccaggctggagtgcagtggtgtgatcacagctcattgcagcctcaacttcctgggctcaagcgatcctcctaccttacctgcctgagtagctgggactacagatgtgtgccacctctcctgggtaattttaaaattttttttttgtagagatgggggtctcactatgttgccacagctggcctccaagtcctgggctcaarcgatcctcccgtcttggcctcccaaagtgctaagattataggtgcaagccacctctcctggcttgcttctttcccgtaaattgaggtgtgttattccactgcttaaaagcctacatggcttcatatcgctsttagtataaacccaaacagtggtctgcaagactctgaaccttagatyaggatgatcagacccctccctcccctccaccctccgacctcatcctggctacccactccctgttcacagactrcagtcacctggctctagtacaacagacacttgaacctaccccgcccctctccctcagggcctggtactatcctcctcgctccttcttatcactcaggcccctctatcccatcatcctccttcatttcctcccatccttatcacctactcatttctgtctgtctccccacctcttggattatgagttcaggggagtgggaccccctatgtctgatttccttatgtgtaggacagagcgtgcctcaaaagcatgcttgcttggtgaatgaattgaaagaaccaccctgacatggagctggtattatccacaggttacaatggactggacctcctcttccagtcccatataatttttttttttttttttttttttaaattttgagacagagtctcactctgtcgcccaggctcgagtacagtggtgatcttggtttactgcaacctctgcctcccaggttcaagcaattctcggtcctcagcctccccagtagttgggactacaggcatgtgccattacacctagctagtttttgtgttttcgtagaaacaaggtttcaccatgtttgccaggctggtcttgaactcctggacttaagtgatctgcctgccttggcatcccaaagtggtgagattacaggcatgagccattgtacctggccccatatcacttcttattatctcataatattcttaccttttgcagtgacagccccaaagtgtgtgtgtgtgtgtgtgtgtgtgtgtgtgtgtgtgtgtgtgtttggggtggggatcataataatcctgcaggtggggtttagctctggtgaaaagagcacagatcctttgatttgggtttgaatcccagcacttcctcttactaagctgtgtgatcttgggacattactaacctctgtgaggttcagtttttcttggctgcaaaatgtaagcacaatactaataagtaactgacagatgctgtgcttctgccagacactgtacccagtgctttgtgtgtattggctgagtgaatcctcatgacaccctaatgaggtaggtctcttctcttcttgctttcattttacaggagaggaaaatgagatgcagagaagctaagcaaccagcctgaggccacacagccaatcagttgagagtcagagttcaagcctaggctgcttgctgccagagtcagagtgttaggtaggactttatgaaatcatgcccacaggccccggaacaggtagtggtgcagacacttggtaaaccgtagttacccctcccactttgacatttactctcctggtgacatttaagttttctgactgttttgttgttcaagttggtgacaaaagtaccaatttcctgcctgctcacttccaaacacagcttctgttgatgagaactaagggagtacaacttttcaggccgggggtgtgcatggtgttttgggccttggtgctcaggaagtgtgggcactcccttaaattttttaaatgggcaaatgagtgcattttcctatttaaatttttttttttttttttttgagacagagtctcgctctgtcacccaggctggagtgcggtggcgccatctcagctcactgcaacctctgcttcccgggttcaagtgattcttgtgcctcagcctcccgagtagctgggattacaggaggctgccgccacacctggctagtttttgtgtttttagtagagatggggtttcaccatgttggccaggatggtctggaactcctgacctcaactgatctgcccacctcggcctcccaaaatgctgggattacaggcatgagccaccatgcctagcctcactcccttaaatttttaaaatgggtaaatgagtgcattttcccatttgaaacattttctgcttcaaatccttattgagcactttgtgctaggcattgtgactatgatcagtataaaaaccccaagaaaacaaaaaaacaaaaacagtaattcactgtcctgtcacccccaactcatcaatcctttgcttttccataactggttacctgggtgcttttcttcgttgtgattattttttattggaaatgcagatttgtgactgtgatgggcctgaggtcaggtcaccttgctgaggcgagtttcctgggcggctttgccctgttttgataaacagaagaatgagcagctggagctgcatttcaagtggctgctttagttgaggcaggcaggcctcagtgtttatgtgacaccgagcagcttcaaaatgagcttggtcatttaaaaaaatttattttttcctagttaggtaacagtggtataacaacattaaaagaaatgtagaaactagagaaaggaaaaaaaaaagccctttatcccccccatcacaaaactattataatttcaaaatagttacaagtacaatgtattccaagtggcttcttatttaagataattatattcacagagcagggaccgtttcaggtcctttaatgctgaaaggctaaataaagagaactttttattttttccatgttaatacatggatgatattaaccatgatgtttaatagctacagaatactgcatgaaatggakgtactataattcatttagcctttttcgtatttagagatttaagcagtagccaatttttcaccattacaagtggtgcaaggaccaatatcttcatgaatacagcattttctgtaaagcagaaattctttcttcaggattaatttccagatatctttytggtattagacacataccacttgcctaataacgttccaaaaggaattcattgtttacattgctattagaacataygagattgcctgtttcattaygtccgtcccagcactgggtattatcattaaaaaaaaaagattttaaatttatttattgagttatttacttgagacagagttttgcttgtctcccaggctggagtgctgtggcacgatcttggttcactgcaacgtccgcctcccaggttcaagcgattctcctgcctcagccttccaaatagctgggattataggcacccaccaccatgcccagctaatttttgtatttgtagtaaagatggggtttcatcatgatggccaggctggtctcgaactcctgaccacagatgatccacccaccttggctcctcaaagtgttgggattacaggcgtgagccaccgtgcccagccaatattttaaatttaatgtttacatttgcacacatgccaattgggcwtcatggtggctgcctcacaccactttttgtccgtgtgtgagactcacatakaggctgttttctgtgatccttttttaaaaaataattacatttttttaatgctcagggaaaatgtcaaataattgtttatgttttgtactgaaatctgcactggtctgatggtacccagaaaaactcttaactgtagccagaaaccagctgagcctagttgtatgcaacctgactgcaaaggtcatcaggtgctctcattttatttttagagctatattttagctctaacgtgattgttgggtgaacacttgcagaatgaaatatgactgacacctaccagctgtctayacattcctggttatatcttaggaaggcagtgtgtgctagcaccttgggaagagaatgttgagttcaaatcctagttttgccccttgcaccaataccttgatcagattcctcccctgcgtcctccctaccctttcttcaacttcacaccttagtttctttacttgtaaattgggttgatagtgggctgctgtcagaattaaggacatcgttttgtcaaggattttgcatacrggaagtcatggtgacagctgttgttactgttgtcctgaggagtggggacaggagaggaggaaaacaggctggtccaggtgtctttccttaaaggaggctccagcttagttggggagatagatgggctggtcagagtttcaagtcataggcagtgcaggcctcaaaggaacagccaggacttgagacaagaatcaggccaagtgagtaactgttgctgctgtggcagtgaatgttagcagcccaggcctgcaggggggaagactcatttggggtacagtgagaggtcttgctgggcaaatgcagggtgtttgcggcaaggtaggctggggctggacttggaggatgcctgcgtgatttagattctatcttgtagagaatgaggtatcatggaaggattttcttttcatgttgtaaatattaatcattttattgttttgtatttttgatggcaatataaaaataccagctttgttgagatataatttacatacagtaaaattcatccatttagaaagtatacagttcaaagctgggcgcagtggctcatgcctgtaatctcagcactttgggaggctgaggtgggtggatcacttgaggtcaggagttcaagatcagcatggccaacatgatgaaaccccgtctctactaaaaatacaaaaattagccaggcatggtggtgggtgcctctaatcccacctgcttgcgaggctgaggctggagaatcacttgaacctgggaggtggaggttgcagtgagcagagatcatgccactgcactccagcctggacgacagagtgagactctatcttaaaaaaaaaaaaagcatacagttcagttgtttttagtatattcagaattgtgcaaccatcactgctgtctagttccagaatattttcgttactcacaaaagaaaccccatgcccacgagtgctcactcctgatttctccctcccccacctcctggcaaccaccaatttgctttctgtttctgtgaatttacctgttctatgtatttcatgtgagtagaatcatacactgtgtgtccttttgattctggctatttcgcctagcatagtgttttcaaggtccatccatgttggagcaggtatcactgctttgttctttttttatggctgaatgatatttcatcacagagagataccatgttttgtttatccttttatgagctgatggtcgtttgggtcatttctactttttggctattgtgagtgacactgctatgaacgtttgtctaccagtgtttgtgtggccacgggttttcaatgtgggaggattttgaactggggagtggtgtttggagcctttgggtggggtgggctgtgaggagcctgtgtgtgtgtctgcccttactgggctgggtttagggcaagcttcatgtgcttcctttcttttaagggactctctgagacagggttattatcccctttttgcagatgagggcactcaggctcagtgaggttaaataagctgcatggctagacaatggcagatagcagccctgtccggctcttagccagcttgcagccacctgcccctgctgggccaggcgattgcagtggtcttggctgggaggggcccagaggctgtgtggtgctggagagaggcagcaggctggacctggttgggcaaggctgagtggttgtgggataagaggagatgtttcagagcagcacccacagaaccgctgtgatgggagaaacaagacttcgagttaggagagtgggttggactcttggtgcagcctatgtgaccttgggctgatcttgtctcttttgagcatcactttcctcatctggaacctggggctcttgtggcttcctgcctctctcaagggtgattcgggaggaagagtgggagagagagagagagagggagaggatggaggcgagagaggtggagtgggaaaggagggcagaatctgctagaacctgcagagctcataatctaggggcggggagggacatgcagcaggtgcaggcaggtgtgggaggaagtagcctggtcatctggatggacatccctgcccattcagagaagctctgaaccctgcaaaagctcccacgtggaggccagtgagctggttataatccagagactgtcagtttttcctagtacatatttgracytgagcctttgtttctgcaaagagtctggtactgactcacacagtgtcagcagcccccttccatcccctggcacacccctccctcattcctactgagcattaccttaaaaccagtgaggtctttctgggtcttaaaggtcacccagtgtccttgcctatctgggcctgtctctgttcaagtggcaaggcggaccatcccctttatcactgacttgcagcttgcctgggttttgtaaaaagcttgtcattgccagttagaaaataaagacagaaacctcccctttggcattggtatcgtgatgacttgctcttgttctgactctattttgctggcttgttatgagtcagtcatttttttttaatgaaatgaatacctttgtcttaatatgaagctaggcatatatgataaaggttagatgatttttcaaatatgaaatcagaattctacccatactcccaaattagagagcagtctgatgtgttcccctttactgtgaccagtggcttcataggggacctagttatgagtcctgtttcttttttttttctttttttattttgagactgagtctcgctttrtctcccaggctggagtgcagtggcgcaatctckgctcactgcaagctccgcctcccgggttcacgccattctcctgcctcagcctcccgagtagctgggactacaggtgcctgccaccacgccyggctaattttttgtattttttttttttttagtagagatgggttttcaccatgttagccaggttggtctcgatctcctgacgtcgtgatccgcccacctcggcctcccaaagtgctgggattacaggcatgagccaccacacggggccaggcctttttcttttcttttttttttcctcactgtgtcacccagactgtagtgcagtggcacaatcttggtgcaacctccgtctcccaggttcaagcgattcttgtgcctcagcctcctgagtagctgggattacaagcatgtgccaccacacctggctaatttttctatttttagcagagatggggttttgccatgctggccagggtgatcttgaactccagacctcaagtgatctgcccgcctcccagaatgctgggattacaggtgtgagccactgcacccggctgaggcctttttcttctgtgcgttcctgctgtcttccctccaggcagcagcaagctggtaggagctgtacttgtgagttgacatcatgatgtacagtcactggtcacttataaaactgggcaggcccagagcaggaagggtcattgagggtcatctaatgcaaaccgtttactttagagatgttgaaaccaaggcgcagagaggggaagtgacttgcccaagaccacacagctaatatcactgtgagcccaggttcctggctccagttcctggttctttctgcccccttcttcccgacactaaagatacagtggtgagcacacagggtattcagtaacgtatctatttttgacctgtttttaatggaggctgaattgggcttttagggttgagttctgacacgtgccaggtgatctgctggagggaaatctgttacttctggggaagagttgaaggtgtcttctgaactctggaatctgttttgaggggaggctgagcccatgcgtggacccttaggctgagcccatgcctgcttcagatgttccacacctttcaccacaatttatttatttatttattttttgagacggagtctcgctctgtggcccaggctggagtgcagtggcgtgatcttggctcactgcaacctccgcctcctgggtttaagcaattctctgcctcatcctcccgagtagcagggattacaggcatgtgccaccacgcccagctaatttttgtatttttagtagagacggggtttcaccatcttggccaggctggtcttgaacttctgacctcgtgatccaactgcctcggcctcccaaagtgctgggattacaggcgtgagccaccatgcctggcctatttatttattttttatttttttgagttgaagttttgctcttgttgcccaggctggagtgcaatggtgtggtcttggctcactgcaacctccgcctcccaggttcaagcgattctcctgcctcagtctcccaagtagctgagattacaggcatgcgccaccacgcccggctaatttttgtatttttcatagaggtggggtttcaccatgttggccaggctgatctagaactcctgatctcaggtgatccacccacctcagcttcccaaagtgctaggattacagtcgtgagccaccatgcctggccacaccccggtttattgcatttgcttctaatagagaaatcaacccagtaaacaaatgaattattgttagcaaaactggggggtgggttgggaaaggaaagtagttccttctataataaaacttgctgatatttcgttgaaagtcattgtcttactcatccttgtataagataagtcacacaatgagtggtatcagggttgcagggtttccccctgtgaggacacratgggatgaaccgtgtgtgggatggtctgttaaagaaaaacaagaagccatgtgttggaaacaacctaagtattgagcggtggaggattgctgaaattgtggactactatgcagtcattaccaacgcactgaaaaaatgttccatgatatggcaggatgtttatgctataagaaatttaaagacgcgagcttcaaagtaaagtataaacctaatttggtcaaacaggctgggcgcagtggctcacgactgtaatcctagcactttgggaggccgaggcaggtgggtcgttggaggtcaggagttcgagaccatcctggccagtatggcgagaccccatctctactaaaaatacaaaaactagctgggtatggtggctcatgcctgtaatcccagctactcaggggtctgaggcagaaggatcacttgaacctgggaggcggagggtgtagcgagccgagattgtgccactgcactccagcctgggcaatagagcgagactctgtctcaaaaaaaaaatattggttaaagaaacaaacgttagacttgaagccgtgctttatatggatatgtggtgcactataatgtggtgcttaaaaagcaacttaggcagacctgggccaagtctgggctctgccacgtaactgctatgtgcccctgggcaagtcactggatctttcccagttcaggcttctcagctgttaagtgggactagtaccttatctctttgggttgttgtgagaattaaatgagctatctgggctttcagagaaagggcttcatgtgccgtggctctgatcagaccaaacaagttatctactgctctaagccatcaaggccccccatgcctgttggatactgttgagttatttgggttggcatgtagtgcagcgtttctggacatacatactctggggactccccatcccaaatttcttacagtctctccagtgtgccacacgctttcttgccactaggtccttgcatgtgatggagtaactcttgtacctctgtctccctaaatagacggggttctccaaggacatygtgccacagggcctggtaacccagtaggtgctcagtaatttatttatttatttattttttttgagacagagtctagctctgtcgcccaggctggagtagagtggcgttatcacggctcactgcaacctcccactcccagcttcaagcagtcctcctgcctcagcctcctgagtagctgggattacaggcgggtgccaccacgcccggcttattttttatatttttagtagagatagggtttcgccatgttggccaggctggtctcaaactcctgacctcaagtgatccgcccgtctcagcctcccaaagtgctgggattacagggtgaaccactgcgcggcccattaggtgctcagtaatttgttgaatgaattgaagacatgggacttgarttaggcttttattattattattattttttgagacggagtctcactctgtcacccagtctgggagtgcagtggcgtgatcttggcgcactgcaacctccgcctcctgggttcaagtgattctcctgtcttagcttcttgagtagctgggattacaggcatgccaccacgcccaggtaatttttgtatttttagtagagatgaggtttcatcatgttggccaggctggtctcgaactcctgacctcaggtgatccacctgccttggcctcctaaagtgctggaaatataggtgtgagccaccatgcctggcctattattattattattattattattttggagatagggtttttctgtgtggctcaggctggacttgaattcctgagcccaagtcatccttccgcttcagccaattgagtagctgggattacaggtgcactgtccstcccagcaagttgggtctttaaataaagagtggggtttggtgagcagggtgggtgcactgttctaggaggtgggcaggacagaggtcagtggtggtccctactgcctattcagggaccagggcccctgggcaaaggcagagataacattggcacaatctgcctttcagctttcattgtcatgcgggagtcaccatgctttgtaagacatttaatctataagacttgattagttttgctacctttcatagcttggggctgtgtatgcctgtttgtaagagagatccatccagatcaagcctgtgcagcaataatgtatgtgcacaaggcctcttgtgttgtgctgatggtaagataggagctggacttggaggcaggaggtggcctgggttctgtttctggacttaccacttactagacgggtactcttgagtggagtcacttaagaaagtaatgccgatcaggggctcagagtgtcccaagtgttttctcttgccttattctcattaaacagaagtacagctcagaatatgatgggccagtcttatgtgattggtgttaataaggcagtagagagttgggggtactctggcagaccatgagaacctgccctgtttgaaggagaatgctgcctcctcttcctccttttaaaattcacacatatgatgctcactaagtgtctggcacccttttttctttttctttttggggcagagtcttgctctgttgcccaggctggagtgcagtagcacaaacacacctcacttactgcagcctcaaactccctggctttaagtgatcctcccacctcagccttccaagtatctgggaccacaggcacatgtcaccacacctggctaattaaaaacatttttttgtagaaatgaggtcttaccaggtcgcccaggctgatcgtgaactcctgggctcaggtgatcctcctgtcttggcctcccaaagtgctgacattataggtgtgagccactgtgccccgcctcagtttttaaaaatacttgcttaaggagagagcactgaaggaagatttagatctgctctgttgaagtgacagagtacggtggtttccatttatgcgtattttgtagttcggatggcttcttgtggggagtcctgtgagttcacacttgggggcatggtgtgggggacctgtgaagtgggtgttctggggtgagtgcgatgctagtcactgtcccagttttcttctcatttctttttttgtgagtgcttggctagtggcagccttgcagatcagctagttttgacccacatcctccctctaagtggtgctcattgaattgagccacagccccaaggtcatgttttcaaggttggcatttgggaggccttgtcagaaggtcttataccatattccagtcacccaragtgctgcccgccatgcctgttcgttcagcaggatttccctgagcacctgctctgtgccaagccctatgctaagcaccaagggagtaaatatggagggcagtgtccccagagtccaggaactcgtgatctagtcggggaggagaggggtacctactctgtcttttacacagcaagtgtaacctctgaagaatgatgttccaggaggcaagagcaaccctggcggactggtggagctgggaagggaaagatgcttctggaggggccttgggagaagagtcctccagggtgagccccttgagagaggtttcagagctctcatccatcttcatatcctggcacttagcccaggcactaaaatttgcatatttttgatggcaattaaaaaaatactagctttactgagatataattcacatacagtaaaattcacccatttaaaaagtatacagttcaaggttaggcacggtagctcatgcctgtaatcccagcactttgggaggctgaggcaggtggatcacctgaggtcaggagcttgagaccaacctggccaacatcgtgaaaccccatctctactaaaaatacaaaaattaaccgggtgtggtggtgtgtgcctgtaatcgtagctacttgggaggtggagacaggagaatttcttgaaccgggtgggggaagttgcagtgggctgagattgtgccactgcactccagcctggrcaacagagtgagactctgtgtcaaaaaaaaaaaaaaaaaaaggttccattcaagatgtcaagccccacgggactgagggtaacatgagggtaacagacaggtgatgttaaattccatttgggctcatgttcacccccaggccccttattttctttcaaacacatggaatgggcatttagaactaggaagatcatgaatctggtggctgtgtagatgccataccaggtatggaccacaggcttggagcgcagcagcatacaggggtcagaggtcaaggccagtggtctatcagaacccagttcctgcaggagccagtgccggtactaggtagactcagatgactgaatggtcctcgggatctgarggccagtgggggagatgaggcctggcctcccggaagtgctcagtaaacatttgttaatcatttcctgcctagggaagctctgtggtatgctcaggagaatcttgcttctcrtgggggaatgggtggttgtcatttgggtggcctgactgccagcctgcttgctggctctctgggagttggggtggtggcatcaacctgcagaggcggggcagtggggcagctcacggctgtgtgggtaagtaagcagtgagcacagtgagggagctgttgccaggagcctcttggcttagtgagccaagcagaaccatgtgatgcaccctgtgggcggccacctggggactcaggacatgcacccagatccctcctcccctacccacttcaaagaaagtgctgccctcccagtggtgatgaagaccttccgctggccccagcctctgggatctggcctttacttgggtattcatgtggccctgggrgttggctttgctgaagttgggcagagcaggtgggttctggaatgtgcaggggcaaccagagtgtccatctgtttgggtgaagccagctgtttaggtctgaaggatctgtttgatttttagaaacatgatgtgttccagagttagtaggtggtggtgatggagggtattggcgtgaagagtgtggatgctcttcgttcctttgctgttttgggactatctctctatggggtagtggcccctttccttgttaggatcatttagaaccccctgggatcatgagaatgaatgtgggtctatccttccttctgtgtgaggaaaaggggaggtattgtggttaagcaagtttggagaactctggcctgaacaaaatcaaacagatgtctttcttgcaggacttagaagaaacttaaatctgttggtaactctttaagagggaaggggatataaaacccttgttttccctagatttttgttttactctatagctgtctctttttagaagcatctcatgagactaatgtttttaggaacctgctgtaggaaattcatttattcaaaaaatatttgttgagcatctgttatgtgctagtgactgctccaggtgcttgggatacagcagtgaccacctccaaccaagatcccgctttcaagaacttccattctagcagaagtgatgaactcatttttatggagcacctactgtgtattaggcatgtgagttatcacacattatctgctttacccctcacaacagcctggtgaggtagatggactattttattttattttattttatgacagtgtttcactcttgttacccaggctggagtacagtggcgcaatctcggctcactgcaacctccagcctccaccaggttcaagcgattctcctgcctcagcctctcgagtagctgggattacaggcatgcgccaccatgcccggctaatttttttgtagtttttagtacaaatggggtttcaccatgttggctaggctggtctcgagctcctgacctcaggtgatctgcctkccttggcctcccaaagtggtgggattacaggtgtgagccactgtcccaggccagatggaccattttaaagattaggtaactgagctctaggggtcaagagacttggccactttggcagctgcattgtcgtttttggattatgtcatcaaattgcaaggggaggtggtgaaataaggaatttctgcaacagaaattggagtctgcggtggggatgctgcaggccttagctgctgtatcactgtgtccgtttatgaaggcccgatggagaagaggctctgaatcaggccgggaaagaggtatttctctggaacaactggtttgtttctgtgttatgggcaccgagaagcgtgtggctcatcatgttttcctttggctttggttactaagcacctgagagctagatttgtggcccatcttgacacttctgcaggatgggaccatatggcatgcatttctatgtgctgatcttaccccaacctcccgccctccatcccgctttattattttctctatactcatttttgccttgcctggttctcttgtttgttttattcttttgtgttatttgtattattctaaaccaccacatatacttggtgggatggagctgggtatagttaaattttaaaaataatggtgagggccaggtgtggtggtttatgcctgtaatcccagcactttgggaggctgaggcaggtggatcacttgaggtcaggagttcaagaccagtgtggccagcatggtgaaattagccgagtatggtagcgtgcacctgtaatcccagctactcgggaggctgaggcaggagaatcccttgaacctggtggaggtcggaggttgcagtgagccaagatcatgccactgcactccagcctgggcaacagagtgagactctgtctcaaaaaaaaaaaaaaaaaaaaaagaaataatactaatgatgagatgacttgcataagatcccccagctactctgtggggaagtcgggctccaagccagctctcctggccccaccctctttccaacatactcagtgcctttctggattaggatccactgcaaggttcctttgcagtgggagccaggtctgtttggcttttgcagccattgtgttatgggttccagtggaagctgggctggctggattggaggtgttgaggggcttggattgacctaagtgtcacctgtggctcaagcaaggctctggactgtggattccttcttggtgagggctgttcagcctcacccaggagagaacccatacctctgcttcttgcttgtgaggcatcaggtttcaagcaggggtcagaccagatgagcactgttatgttcttcacagctgcttcccactcgttatcctcatagtagcccagggtagaaaaggagaggatgagtgggtggtattgatgaagaaacggagacctacagaggtgaaatgacttcacccaccaggtgatggctgagtctgcaacccaacaaaaaactctggcttgctggcatttctcaggccagacagttccaatgtgaacccacggtaccttctgcgggagaaaaggtggcatgggaagcaggaagagcctaggatttgggagttggatgccatggacttgagtcctggccactactatgtgcatatggggaagtcacttttctgagcctcagccgcctcatctttaaaatgtgggccctaatttctgccctgccagcctcacaggatggtcatgagaaactgaatgagaagatgaacatggaagccttttgtctggcattaaccacatgtgcctgtgtgctgggttctgtctgcattgtgctaatgatggtggtgatggtattaatagtaataatagtgaacatttaaggaacactgcctcctataatagtcaccatggtaaactttacatacattatcttaatgaatgcagaaaacaagcagatgagcagggaccgtctattattttcccatttatttttgtttatttttaattttttttttgtagagacagggtctcatgttgtggcccaggtcttgagctcctgggctcaagcaatcctcccacctcggttccccaaagtgccaggatcacaggtgtgagttacctcacctggctgtattttcccatttttacaagtggaaacagggggttcaaaaaagtttatgtaatttgcttaaggttgtagagatgttacatagtggagtccagatttgatcccaagtaggtgaccctactgtggtatcactgctatcagattggaaacagcagaagtctaggacctttttggtttggttgatgacatctgtgcacatcattctggtaggtaggggccatctgggggcaggaagttgggtgtgggtaggggttggccctggagaggcaatagaagctggggcttggctggataacaagcctggcacactgagtttgtctctgaggtttagtttctcacctgtaagatgatgatataataatgtgcctcatgggattaaagaaaataagagatgcctagatacttatacattgctataaaaatgtctgtgttataagagtgacatggcattccacaaaatgcagtgtagatgtaaattagttggaatggtgacctcacccctgctaggtagcactggcttatgtcccacctgagagtagtagcatctgagggctagccacactgaacaagccacacacctgacctcagcatcctcttctgtgaggggaatgctctctgctcttctacctgcatgcaccgtgtttgtggaagtgctctgtgtaggacagggaaagcaccttgcagagagcaagggcccactggctgcagagagcctggtgggtgatggaccagagataagggtgagggacagtttagagtgtcacagtttctcatagagctttgggcagtgacaccagtattagtctcaggaccatcattgactcctggttagtttttctgttttcaaaacactttatcagctgtaaagcacttaaaaatgtaaattagttcctgcaaaaacaaaatgcacaaaaaatgatggctctgccaggctgggttgggagatgaatgtgtatgcatgtgtgaatggattcatttctgatgataaaaatactttatgcttatttatgtgaaacttggaaaayagaggaaaagtataaaattgaaactaaaagtcatccataatccttytaagtagctttatcatttaatgttttagtatatttccttcctgtttttttttttttccttaattctgggtgtatgcaaaggattttgtaaccctttacattctggaaactgttcaacatgacttcttttttttttctttcaaccaatttgtggagagtccattttgcaaagccttagcacagtgccaagcacaagctacacacccgggatgctgctgaatgcagatgagagcatgccarctctgctgaagttgggggctgggggcagtggatggctgtgagtggtgtgaagcyccgggccacagtgaagaccctggaatggctgagagactgggattccaggagaccgaggtttgaggggaggcttttcattgtttgattagctctttttttcttaccacatgtaagtcatcataatacttaaaaaattgctgtaaaaagcagctaattaaaaatataaatacagtctttttggagactagaaacagtcacaagagaagcagtttcagtgagaaccagatcctttgtcagtgtcagcgagggggaggggcgtcggggcccagccagcaaatccttccctccgaactgggggtgcggaatgtggcactccctttagttagacttgatgagctttggatttgagtaagtgacagccccttttatttcctgctttgttctctcccaggtaccagttgaccacagttttcattcatgcaaatggaagctgacagctgcccagggagggttagatacctgggaggatagagcagaggccctccttctccccgacccctcgcctctgcaggctggtggggaggggggcaggggagtcsagttaccctctctccacgctttcttcttgtgtatgtgtgcgtgtacgtgcgtgtgtgtgttgtgtgtgtgtgtcttgggggatggagaacccctctcaggagggcctgtggaaaggctggggtaagtggagtgagcccgtgggtcctgcccttccaggctgccaagagtttaagttgctgcctcccggtctctgtgcccttttcctgcctgtggaaggccctctctctgtttaggaacgtggatgtggcaggggctgggcgggcacttggcctttataacaacagaagaggattttcagtgacgaggaagcatcccgcccttctggttccctgtcttccacctggccccactgcgacagcctctccaggcctctgacttcactagaatctgcccctccaccccaccttcccccgaaccccacctcctttctctgagcctgagaggagttaattgtgttagagtgcactgagaaacctccaggaaggggccctagtccctgtgttgcctgttcagcaatcacatttgctcacgtctagaaagtacaatataatgactcaggttaaggggtgaaaaaatgtggtggacattttgccagggtactgtgttaactgttccaaggtatcaccctgtgtgagactcaggaacattcagtgttttggtttcccccctattgtactgaatgccggcagctttccccttctaattatttatcttaataatttgaggaaagttgatttgctttttaaaaactggcatccaagcgtaccctatcgcactgcacacagctgagagattaaggcagttctttagaattcctagtccgtgttgtgtacacagcgataggctggggtagtggttctgggtgcaactggggacaggcgaggaaccataaatttggcaggaaagatttgtgttggtaccctgttatatttgctttgcatcacatattgtttaaaaagagcgatattttcgttaaaggaaaaggaactgtgtatttgagataagaagtagaataaaatgaaatgaatagttgggtttcgtcctgtggccttcaaaatggcgttatttctgagatccctgtttctatgctgttccagtatttatacggaacttataaaatacaaagtataggcatgtcccgagatcctggcgaggctgtaatttatagtgttgttctttttcttttgttttacagagctgagtttggtgaaacttcaggaggttttagctagtggcgatccaaagacattaaatattgctttgtgggtacgwctccaccttgygtcttacttggtgactgttcagtggtaggcaaatgtcagaacccagtatgcaaatgtggaagtggacagatttgagtcagttatctcagctggtgttatgaaatacrgaaatttttggcgttggtggtggagggcgttggcataggaggcgtgaatgctctttgtttcttgctgttatgggagtatctcttgattgccccatcatcttgtttggtgtggccccgtttccttctagaagttgagttccctgggcttgtgagaacccttgtacatctgcctccattaaactcacatttggagatctcgtaaatgaacscagtgcagtccgggggcagagtgaaggctcagactgcagccggacatggctcagttaccctaggtgggttagcagctgagcaggtactggtctcaaaaccctctgaagcgaagctgcctgtcgattccacagttgccagcttccagcatggagcttctggaagtatcacggactgagttgggtcccaatgctggatgtccctactcttcctcctgcccctcccacgtttggatgggcaaatgcactaagaacagcccgtgggcaagtgaatgaaaccaaaaagcagcaagggatttggacagtccacctcagagtatctgactttattttgaggggcatgtgtcagagttgggtgaagaaagagattctcagatggagatagagaaagatccccaaaagggcaggctggctaccagtgatttatttttatttttcttacttttttaagagaatgcagggcattttactcttctgtggtaggagagtagactggccacagcccagcccagaacccttaacaaaaggttaagctgctgggcatggtggctcacgcctgtaatctcagcactttgggaggcagagatgggtggatcacctgaggtcaggagtttgagaccagcctgtccaacatggtgaaaccctgtctctactaaaaatacaaaaattagccgggcgtgttggcatgtgcctgtaatcccagctactggggaggctgaggcaggagaatcgcttgaacccaggaggcggwggttgcagtgagccaagatcacgccattgcactccagcctgggcggcaagagcaagactccgtccctaaaataaataaataaataaataaataaataaataawtaaataaataaaataaaataaataaaaaaagaggttaaggtttatacgcaggccatttctaatagatgttatggaagccccaggktttggggcatcagggttggaaaggaagccaaaaatgggtgtgtccaaaggacagatgcattgagaatgggttgtaaaatttcagccattgtgtagattaaccagcacggcaccctgcccctcagccattgtgtagattaaggagcactgcaccctgcccctcctcccccaagcatgcagcacctgagaaagaaatctgacaaagatgctttaatatgagtctagcgctttgagcctttcattgtcatctccagtgcaattgtctgtgggttttgttttgttttgttttgttttttcatttttattggactttgctttgccttttaagggaaactctggatgatatacttcattatttcacttgtcagatggttagtaatatggtattgccattcctgacctaaggcagcaagtgattccttctggcaaactctttaagaaacatgggcatggagcctggctgcctgagttcaaacccctgctctgctgcttaccagttgggtgaccttggtcaagttacttaatctccgtgcctcaatttcctactctgtaaaatggagataataatagaacctgtgtcattacattattgtgggaattaaatgtgttagtctacgaagaggggtgcctcaggcccatggtaaattttatgtaagtgttggttgtatataagatgatgaagtccgggcgcggtggctcatgcctgtaaatcctagcactttgggaggccgaggcaggcagatcacctgaggtcaggagttcgagaccagcctggccaacatggagaaaccccgtctctactaaaaatacaaaattagccaggcctggtggtgcatgcctgtaatcccagttactcaggaggctgaggcaggagaatcgcttgaacctgggaggcagaggttgcagcgagccgagatcgtgccattgcattccagcctgagtaacacgagcaaaactccatctcaagaaaaaaaaaaaaaattaagatgatgaagatgcagcgtggggccatgagaagagtcctggtctggtgagtttggaaacctggcttctggcctgtttctaacactgtatgtccttgggccagaccctttcccctggggtgctgatttcacacctgtaaaatgaagaagtttgacttgcacagtgcttttcttagactgtggtaaggggtggatgtgggggtagtgccaagaccaagtgaaagaggcttctggacctccatccttgcttcagccagagcagcgtgggttcatttcatttttggattttggtttgtgggaagaaagggttctcttgccggtgtgtgtgtttctgataaacaaagaagtgtggaagtggctgaatgagatgacccaaggactctttctgggaagatgcaggaggaagtaggtgagctgaggggaagctggtggggataggcctggtggggcctggggagaaggatttgaaggctcaagtcacacggtgcaggatgggactcaatatagggtgggatagggcggtgggtaaaagccgttacaattttgtccaaatggtatgggctgatttacttattagggaggtacaaatggcttcrtgttataaagtgtcaagatccttatttggataaggcaaccagagtgtagacgagagagtaagagtaagaaaacaaggagaaaaatgagtgtcttaaggatgtagaaatttagtttgctggaagtctctgcagcctgaacaaaacagctgttaggtttgccagaacttaaaccagagggtgcctgccagtggttcatattcttgctacctcttcctcctcttgtcttgtttttcctttccattctaataatcacgatgagtttccctgacatgcacgccccttcattcatttgtatgatcacttagagatgaggagctgccttgccaggtagaaaaaccattctcaggatgaatctttggctttctgaatcagagttttctttgggttttagaacttcattcttattaaagtgggaatttaccggccgggtgcggtggctcatgcctgtaatcccagcactttgggaggccaaggcaggccaatcgtgaggtcaggagttcgagaccaccctagccaatatggtgaaaccccgtctctactaaaaatacaaaaattagctgggtgtggtggtgcgcgcctgtagtcccagctacttgtgaggctgaggtaggagaatcacttgaacctggaaggcaaagattgcagtgagccgagatcacaccattgtactccagcctaggcgacagagtgagactcggactcaaaaataaataaataaataaataaataaataaattggaatttaatatctcttatcatttcttcaattccagtttttattagatccacaacttttttggtcaaaaccagaattttgattatgtgtgccatcctaggctacctcaccatccaaaaatcctcttggaaaaccccacgcttatcaggaaaaggagatggaagtgaaaaaataaaaatatatataaaaaaaggaaaacctagtgttagcaccccttatscagcaggccccccacctggacccccacctgtattcacattcctcccacacttacagtcagtggcttcattaatctctaaggttccatgttctgctccccaaatagactgtttgctcattgaagacaggcaccacacttacattttttttctttctttctttttgttttgagatggagtctcactctgacgaccaggctggagtgcaatggcgtgatctttgcttatttcaacctccgcctcctgtgttcaaggaattctcctgtctcagcctcccgagtagctgggactacagacgcatgccaccacagccggctaatttttgtatttttactacaggcagggtttcaccatattggtcgggctggtctcgaactcctgacctcaagtgatccacctgccttgcccttccaaagtgcwgggattacaggcgtgagccactgtgcctggtcttatatttcttttctatttttctaccctgatcaaccttttcttttctatctctctcactgtttctacgatcaaagtagtggagtcagtttccttgcatctgtcccaagcagccgttgctaatgggaatgagtgtcaggcactgtacatcagccctgttttgaaactctgtgcctgctgcctcattgactagctggagagtgttgaacatttggttgtagaatgtatgtggattgctgagtttcacgcatgagctgtgttgtcatttcattcattctgagtggcatctgcgccagggctacctggagtttttccagctccccaggcctagcaaaggcagggatcctgtctcattcagctgcatttcttgagctgtgcttagaaggcctgccacacagtagggaatcaggaacagtcgcgtttacagagctctcgggtgatagaagggaaagtaaaggtatattaaatttcttctaggcttgctgcctaatcccctaaggggccttctcatttctttcagcagtgccatctggcaggcctgagagtatatgggaataagtggggtgctggatcttgtgggcaggctatgggatctgggaaaggggttagcacctgggcctggagggacctggaatctaggggggscatacatctaagctaaatgtggctgtggcttgcaaactcagaggcctttcgggcagcctggtgaaatgataaatgggcagttgctgtttattctcagtcctagagattaaaaagaggtgcccccattggaaactggaggttacatgttctacccaaagggagcagctgccagtcggcttcttgcgatgtgaaagtacagccccagaaaacccaggttaagtgatgtcccctaatttttaaaagttggcaaccaattcaactataaaatcatgcctgctggcctctgagcagtaggcagggctggtgtatgccggaggccaccaggggacataacacctgccatagggtcagaataggtgggtgttagtcaccatccagatggtcagataccggaattgccacagaaatgaacatgacatgcagagcaggcagagcaggtgccaaaagttggtatcaaggaggcgaaggtcaagttctttgcccaccagaaagccttctgttccttgtctccttcccttcctgcacctccaaggactctccactgctccctacagcttaagtccaaatttccctgtctggcattcaaggtcttccataccttccttacaagtgccctttaggcgctctaaatggcgcgtcagctcctatgtgtggcctcagcttagcagtccagtgttccctccccctgaatccctccagactgcccaggctgcatctgcctcagacagccgggtgttcccaagacatgctgcactttcttccctctctgatttgctcatgctgctcctcttcctggaatgctcatccccccaattatggaaatcccactccccactcatccttcaaaaggctctggacaaaaggcacattctccctgaagtcggctaccctcccgactctgtaaatttggaataaatcacatctttcagcttctatagcactcaccctgcatctccaccacagcccttatgacatagctgttgagaaaggtctgtcttccttggtagatgatgaggtcattgtggaaggttcgagtcttacttactgtgtccacagcatttggctcagggcaacagtcaacagaggcttagtgacttagacacttgatggtagagtatggaaaactgattctcatgaggaaggtgcttaaggtctttggtaagcctgggaaaggggcagttggctggaacagagggtgtgagaggagcaggtaaagctggatccagctctctttcagcccaaggcaatacctaaaaccctatctctgacttggaaaggcagtatcctgctgtcttcctgctgtggccatgagcctcactggggcttgacttgaatgttaggactttttttttttttttgagacggagtttcgctcttattgcccaggctggagtgcaatggtgcgatcttggctcaccgcaacctctgcctcccaagtagctgggattacaggcgcccgccaccatgcccagctaatttttgtatttttagtagacatagggtttcactgtgttagccaggatggtctccatctcctgaccttgtgatccgcctgccttagcctcccaaagtgctgggattacaggtgtgagccaccgtgcctggccatgagtaggttctttagtggtgatttgtgagattttggtgcacccatcacctgagcagtatacactgaacccaatttgtggccttttatccctcacctgcttcccaccctttccctctgagtccccgaagtccactgtgtcattcttaatgcctttgcatgagagggaaggctttttaaagggcccttttcaaggtttgaaataaggctccatgacaatggcctgatttggatgggtcttggaatacccttttttttttttttttttttttttttgagacggcgtctcgctttgttgcccaggctggattgcagtggcgcgatctcagctcactgcaagctctgcctcccaggttcacgccattctcctgcctcagcctccagggtagctgggactgcaagcacctgccaccgcgcccagctaatttttttttgtatttttaatagagatggggtttcaccgtgttagccaggatggtcttgatctcctgaccttgtcatccgcatgcctcggcctcccaaagtgctgggattacaggcrtgagccaccgcgcccggcccggaatacccttaaaatatagccagaaagggctgaggatgggtaagaacccaggatatagagtcttcccataaaagggagggccatcatgcaagatgaacaacttggtcctgatatggatggggctagaatctccgtattgttgctaataaggtggaactgaatcccctccctgttccccaacacaataaaacttcagtgtcgtctgggtgcagtgactcacgcctgtaatcccagcactttgggaggctgaggcaggtggatcacctgaggtcaggagttcgagaccagcccggccagtgtgatgaaaccctgtctctactaaaaatacaaaaaattagctgggcatggtggcacatgcctgtagttccagctgctcaggaggctgaggcgggagaattgtttgaacctggcaggtggaggtgcagtgagcagagatcatgccactgcactctggcctgggcaacagagygagactctgtctccaaaaaaaaaaaaaaaaaaaaaaaaaaaaaaaaatcttcagtgcagggcctgtctgctctccagggaaggctgcagtattgtcaggtttgtttctttttccccacaaaactgcttcggagagctcttaggtcccaagtttgcctgcatccagggtccagatgcttccagggtccagatgcttccagggtccaggcagtgagtggaagtgaaggaggctcctctagtgaaagaaaaaggcatccagtgttaatagtatttcttcccagttgcatggggcttgcatattagagataaaggaaacatcttwgctactactgagccataagtggtctcacctttcttgaaacataaggccgtcttggtttgttgttctgttttgtgcttttcacagaggcatggacactgaaagacgtttctctgacagtggagatataggactgaagagtgacatggcttgcagagcactacctgtccccctaatccacactgtcctctctcctcatgggcagcctgagaatgtggacccaaggtagcccatcatgcagttcttcatgaaatctggaaatcttggcatttcatgggaaatctcatcactgctaaagtaggcttagatttgttttaaaaccttgtgtgggctgggtgcagggcattttactcttctgtggtaggagagtagactggccacagcccagcccagaatccttaacaaaaggttaagctgctgggcgtggtggctcacacctgtaatcccagcactttgggaggctgaggtgggtggctcacctgaggtcaggagtttgagaccagcctggccaacgtggtgaaaccccgtctctactaaaaatacaaaaattagccaggtgtggtggcgggcacccataatcccagctacttaggaggctgaggcaggagaattgcttgaacccaggaggcagaggttgcagtaagcagagattgtgccactgcactccagcctgggcaacaagagtgaaactccgtctcaaaagcaaacaaacaaacaaaaaaccttgtgtgggtgaatcaaacacgtctgcaagcctgattcagcctgtagcccaccagtttgcagcctttgtttagatccgtagtggagaaagaggttaaagctacaagttaggacccctgaaaatgaaagatggtttggaagtgaatctgaagtaaattgtcactgtatggtttcagaccgttttctggtagtatgtgctgtgtgacacaggttgtccctgtgttgtgcagtggttttgagcacaacattggccctaggcctgcagtgtggggtgcaggccctctgctgagggctgcagatgctgccgggagtgcagtggatgaggtcctgcccgcacagcctcattcggcgttgatacccatgcctggaggatgtgggctcatcttcttgggtcaggtgagcctcttacacctgtgttcattgcttagctcttttgatgtcattgcatattggttcaattacttttcccttttcagagccatgaataataactatgattttgctagagggaaaaaatgaaatgatcaaggtaatgcatttacatgttacataaaattcatatcatacagaaaggcagaaggaaaacagggagaattacttgttcccttttctctcttcccctcccarttcctttaacaggaagaatgtctcactagtcatgtgatctacagcaaatcctttaacctcttcaaacccgcatctcttatatgttacaggacagtaataaaacttaactcatattattgttattttttatttaatgtggattaagttagttggtatgaaattctccaaatcctatgcatatataaagggtgctcatagagcttttttcttcttttttgtatatccaggatttctttagcggtcttttgtaattatagtaaaagcactgaggttagatttatgggttttttttgaggaggatagactgaatccctttcccgcctcaaggctatagtgggtcggcacagtttgtgtttgctaaacatatctttagctgcgtaagagaaagaaggaaaatagtaaagatgaacagtactgttttctacttgaagttctagttggcccccmctcccttccatgtaggaaccttagcttgctttccacaccctcccaccactggactcacaaaggcccctgatgagtgcctccggtaagacagggggaaatttttatcttaattagaaaaaggcttagtatcttgattgtatgttctctggagccagtgatagagatagtataagaaattctggacattcaaatgtaaaacagattaatttgtaggaatgttggatttttatctggacagatgttttgtcttttatggagttggttgggattaagaagtgggggcagggtcatgttggtattttatttttgctttgggcttatgttacttaggattaactttagctgtgtataacaacagcaacaaatcagatttatagtcagttaacggaggcttaagtgatgtaaagttttatttctctctcacatagaaattagttagaggtagtagtttagggctcttagagsscccaggctgtcatattctacctgcttacacatggctttcaggatctaggtcacctcacagtccatgatggctgctggggctccatcccccttgtctgagtcatatgttggcagaaggaggaaaggcacagatcaagaggaggcctttcagctgggcgcggtgggtcacctgaggtcaggagttcgagaccagcctggccagcatggcgaaacaccatctctactagaaatacaaaatttagccgggcatggtggtgtgtgcctgtaatcccagctactaggggagctgaggcwggaggatcgcttgaacctgggaggtggaggttgcagtgagccgagattgtgccactgcactgcagcctgggcaacagagcgagactctgtctcaaaaataaataaataaataaataaaataataaagaggaggcctttcctgctgcatcagctctctctgagcagcgttcctgggaagttccatggaacacttctgcttatctcattggtcataactcagtcagatgcacacactgagctgcaagggaggctgagaagtatagtctcttagtcccagatacaatatgtataaaattcagaacaagggtccttttactaaggaggaggaagagactggatgttatggatatgggcagcaagcagtgttttcaaagtactgaaacagattgtagaactttgtaaactggctgcctttctactcctctgctcacctctaaccaaagagccacctaattgttctgcatggtgaccattrcctgttagattcttggtgaatagattcctagcctcatcttttkttatttttatttttttaataaatggtagaatgaggatgcaggaaacttggaaaagcagagtcaaagttcaactagcacaggagcagaaggtaaattctgttggcttatagaatgagcccagaccctggtgtcagaagacctgggtcagttctggtctgtcctctcctgggactcagtaaagtctcttggctctctgagctttccacatcagtaagatggggaatgacaacccttatgggactgcagtgaggcttagccaagttggtgctgtggaaggccctactggattccaaagcatgatacrgatgatgaatactttatgtggctgaggtgcttccagcaggcacgtgggaagcatccatgtaagattggggtcatgcaaaatggggtgggatcacatcgcgggatgaagcacttggatgcaaaggcctgtgtggtccagcctgagtctggctcaacacacagggtyggatcctggctgcgctccttactgctgtatgtacagatttggctcagagggaatgcaggattggcaacatgcatctagtctttcttgtggtctcctggtgcctctcatggtgtgcttattcttattctgctacggagagtgtgacttaagcatgtaatttgcatatagcgtggctcctgaatgcaagccactaacccattattttacttagtaagttccagtgttggggcttgggggatggtgtgtcctttgccagtgaatgcttatgttggtacatttcaagggttattttgcttatgcaccctccccacccccgtcaacgttagagcttagcatcatatgaaaggcagtgtccctgtgactgtatcatagggttgatgaggatgaaatgaagtaactgcaggcagtgtccagcccagtgcccagtgctctgtccaggctcagtgagtgacctttgctgctgctgctgctactgcgtccagctggctacatggggctggtggcagagggtgactcagttctcagtgtgtcttttcctgccccctgccaggttgcttcccctagcctagttccctttttttgtgaaatgctcatccctcagctctggacttcaatgtactgttggtttcaaaaccttatgaaacacaacatcaatgggggaagggagaagagagaagctgagaagcctaacccaactctgacagctgagcggctacagaggacttctcagttgggcttcaatacttcttaagaactttcaagttaggcctcagatgtgattttgtttgctgactttctctttgctaccttggcttctatttagttaacaaatctaggccgggtgcggtggctcacgcctataatcccagcactttgggaggtggaggcagaggtgggtggatcgcctgaggtcaggagttcaagaccagcctgaccaacaaggagaaaccccatctctactaaaaatacagaattagtcgggcgtggtggcacatgcctgtaatcccagctactcgggaggctgaagcaggagaattgcttgaatctgggaggcggaggttgcagtgagccaagatcatgccattgcactccatcctgggcaacaagagcaaaactccatctcaaaaaacaaaacaaaaacaacaaaaaaccccaaatctaattcattcattcagcgtgcacaatttattcaacacagtttgttccaaacactggggatatgccccaaacagaccaagttccctgtttcatggagcttacgtttggtggaagagagacaaatatagaaacaaaagtgtaggctgggtgcagtggctcacgcctgtaatcttagcactttgggaagccgaggtggggagatcacttgagcccagaagttcaagatyggcttgggcaacatagtgagactccgtctctattaaaaaaaaaaaaacaagtctaacatcaggtagacttcagggctgtgaaagaagtgacatagggtaagggaatacagcgtgttgaggggatgggtgctattttccaaggaaagcccctcctggtggggggccataggaaacagctggtgcaaaggcctggaagactcactggcatctttctggaatarcaaggatcagcttggtgggaagtggaatgagctgggggtggagtggggtggggtggattttggagtctgagcttgagatacctgcttggagatgctgagcagtctgcaggaaccaggagcccggagctgagggaggacatgaaggctggaattgtaagtttgagagaaatcagctttttgaagctgtgggacggggtaagatcaccgtcatgtgagaggatgggactggccaggtggtgcatgtgtccaggctcagcggatgttcctgggatacaagtacctgttcatcttgttgacatctaatctgtatctgcgcatagtgaccaaggataagccactgagctgctccaaacgtgtgctatgggatggattaactgtgtgggtgtggaaatccctcagaatgatgagacagggagcagtggagaggaagacagtcgatcattgatcggtgagcctgtacttgagatctggcctggatagttgtgatggtaggtggtacccacaatgatggcccttcaggggatttgaagattgtgaaggaggaccaagaggagctgtttggaccacctgtgatccaaggcrggaactaggaagacacctaccggaagtctttgtggatcttttgggattggattggattagcagatacagarcgtttgacctatagtaaccagctgactgttcagcaaacgcttcacttcctaaaaggcttcttctttccaaggcaaactggggcatgtgaggaacaggaacttacaagagcttctagtctgaactccaggtgctgacactgttaacagttgctgagtggagtccttctcacttgggtggaaagtaacctgtaaacttggcccaagtctcccttttcctgtcctttggcccatgctgttctggtgctagatgttggctctggcctttgcactgaccatctcctcgagatggcacgtggggaggatgtgctgtgttgagaagaacttggctggataggcaaagacttgagctagaaaaagaacaagtggttattcatttggtgcttccctttaaccagggcctttttttttcttttattttaaaggaaacctttaagaaaggagggctctcaggcctttcttagaatttaggtctcagttttacatcatgggattctgtttttcttgggtttccattagaagattaaataacatagtggctatgaaagcatactatagatactaggaactgttgctttgattgtgttaaaggatacctctattccccaggtcctttattgattcatcttatttttatttgtataataaatcattagaatagtgcctggtgctctattgcactcacktgcatatactgtataaagctttgtacatattacttgtttagtcctcacagcagccctaggaggtaggtactattattttgctcattttgcaggcaagaaaacaggcacagacagttaaataaggtcacccaactaacaagcagtagagctaggatttgaactgggggagcctggctccatgttctaggttcttcaccattatactccaaggcctgtcggttttcccatcaatctctactgaagaacaatggcgatggccatactggtaattgttgtgctttatatgctgtgcactgtgttgtgtatttcagatgcacgaatgagaatcttcatccccgcaagatattaagagcccgttttacagaggaggaaatgaaggctcagagaattgagtaacttgcttgaagtccaaagctgaggagtggagccagaattcaaactcgagtttgtctggcttccgaatcstgctatttcctcagcacagtggccgtcctccaaggctgtcacatgttccttccctggtgattcacggcacctggctacctccttttagactcactttgtggcccatggcacccagttgtgtcatgacaggacagtggctcccatttctccgggcctgactgtgaggccacatgagccaccccagggaggccagcagagtcagagcttggctttgaaagctgttaatcgacctgagcccctccatgtcccttgctccattttaagcctagggctttcctaaagcaccgcagatctccttttcttgtgagaagagattaggcagatgtatacatacacggtaatgtgcaagtgtctagtttcttgtcagcatcgggatgagctgtttgtagtgaagagcctgggcctggtgagcccccgggatgatgggtggggaccatctgtgctctcctggaaaggaaattgtggtttctttcttttcttttttctttcttcttcttttttttttttttttttttttttagyttatgggaaagggagacttgtgtctcaattgagtctttgtggcgttgtattacagagagtcacagaaaatgttctatgtaaatgactatgtgctctgattagagcctcaatgggcaccattgtgtcatattgctattattggcgattgcaggatactaaatgatattctcatcaggctgaaaaacttcagtgttagcagtgaaactcggggttaattatactgctctgaattagagcatggaattaagttgtagggagagtaagcctattgctttcttccccctctgtcttcctcttcaagattcttgctgggggtttgatcagaatagtttttaacccatgttctatatctgtactactggcattttgttctccatgagttactaccccatttggggttgggaaacacaggaccaatttataggacagtgggagaaggggagacatggtctacttaatagtgcattcttctcagtcaatagctgggtaaaaaatagcatgaagattgaagtcttaggggaatgctggactctctagaggggcctctttaatttagctcttgtctcttctgcctttgaattctcatctcttctgatcctgactcacctctttgaagaaatgacacactgacctacatcttggctgaaacagatagaagagtctatctctgttctgccccttcttggcattcccagcacagcctccaagggagtctgtcccagagctgaggcaggccctctcgggttgcatgccattgacttctcagctttgttttaactgcagagtttccagtgctctgctcttcttgaattgctcctgattgtcaccttcttgcattcctttctctcatttctttttctgtaaatttcatgtcactggtatcaggtttaaagtcgtattttttaaatccctttcaatgttacgtgggttgtaaatgtaattgttaatattatttaaaaatttttgaaaagtgatttttagtggtggccttatcatatctacatattattactccmccattttgggatgtttaggtcgaatcctggttttttcttcttttgctgttgtaagtcatgtatattggcaattagcctaggagagattcctagaaatgagttcactgagaatatgagcttaagagaaagtgaggatttaaagccagatctgtctgccttcaaatccagcgctctttmtactgatgtgagttctcctgtcttttttacctatcagaattctagaactctcccagagaaaccaggcagatactgctccacaccggtgagctgcttctcacctgggtagtctagggtggtttgctccagaattgtatttctgctttttctttttttaacttggcagtggttaaccattccctggagcagcaccaggtaagtcagcttgtatcagagtcatctgctttacctgacatgagcacacgttgtcatatatttgcacatgcagatatcatatgttaaacaatatcacattgttgaagaaaattacactggaaagcgtaaaatatagtttggatgccatattgagtgtaacttaatccacccgattcagaacttttgtagagtgcctcggagttcctatttggaaatatcagttagcagttttagtcagtagagtaacatattttctatatttatgatatatcaaagagactttctgaagcagaaccctgattgactcaagagtcttttccaaattctgtattctctcagaaccaggatttaataggaggtgggtggggggtggtccttggtcaaactggggaaaagcctcataatgagattgccaaagcgcttacagcatttgaaggctcagagagatgccgtggtcaggaagcttgtttgagtctgtctggaagccagtaagtcccacagaatacctactgataatcctgtggaataagcagcatatggaatgttgctgagctagaattaaagtccacacacggccaggcgcggtggctcacgcttgtaatcccagcattttgggaggccgaggtgggcggatcacttgagtccaggagttcgagaccagcctggccaacatggtgaaacctcatctctaataaaaatacataaaattaggtgggcgtggtgatgggcatctgtaatcccagctactcaggaggctgaggcaggagaatcgcttgaacccaggaggcagaggttgcagtgagccaggattgtgccattgcactccagcctgggcaacaagagcaaaactctgcctcaaaaaaaaagaaaaaaatatattccacacacctagtttttcagccctatacaggctgaccccatacctgccatctccttttcacttcctgttctttctggcctccgtgagtccacgtgtgcccttgtctctgcttgctgtgcctttctctttcctccacgttgctaaattccgtccatttttcaaggctcagttcagatcatycttctttgctttatcattttacatactgtgtatggtttggcctcttggtctgctgctctctgtgtctgttgtatggagcgcttttctatctggtattacggttatttgtgtgcatgtcttttgattcatctacttgaagacaagagctggtcttgggctgccattcctgcagtgtaggctctcacattgccttgcacgtagtaagtgctcagtaaatgcttggtgaacaagtgttcatggcgtaacttaatacttccagtggtgagagttcctgtcaagagtgttggcagtgaagttgttccccttggcaatttctatgctgatctcgggttactgcatgagacacagaatctgcgtttccctcccttcagcatcactggggaggacagccttactttggagttttttttctgatcagttacatgatggtttcatctttaagactactgataacaggcagctctgcctatggagtagccattcttttttttttgagatggagtctcgctctgtcacccaggctggagtgcagtggcatgatctcagctcactgcaacctccgcctcccggattcaagtgaatcttctgcctcagcttcctgagtagctgggtctacaggcgcacgccaccatgcctggctaatttttgtatttttagtagagacggggtttcaccatattagccaggcagtagacctgcagatctcatatcatcgccactgtggtgcaatgccctcccaaagtgctgggattacagacataagccatggtgcccggtggagtagccattctttatccctttactttcctaataaacttgctatcactttactctaaaaaaaaaaaaaaaaagactgaccaggtgtggtgactcatgcctgtaatcccagcactttgggaggctgaggcaagtggatcacttgaggtcaggagttcgagaccagcctggccaacatggtgaaacccccgtctctactaaaaatacaaaaattagctgggtgtggtggcgggtgcctgtagtcccagctacttgggaggctgaggcaggagaatcacctgaacctgggaggcagaggttgcagtgagctgagatcataccactgcactccagcctgggtgacagagcgagagtctgtctcaaaaaaaaaaaaaaaagaaaaagactattggtaacaaccctcatttttttgagcacttgctatgctgctaactgctttatgcacactatttctttaatccttaacactatttctttaatccttatatctacccatgagatagggttttgttattcaggcagtggcaaaacctgcggcttagagaggttaaaaaaaaaaaacaacaaactgcctcaaacaaagtcatatagtaaatggcagtgctggagattaaatttaggtctgtcttgttctgcagtccatataccatataactttgccaaatacaacactatggtgtgtgtgtgtgtgtgtgtgtgtgtgtgtgtgtgtatgcacatgtgtggcctttattgaacactgtggtgtgtgtgtatgcacgtgtgtggcctttattgacttattgaattgatcctgaatcttccctactcctttcctgtctcttttctctttctgaataacatcatttctttttctctactggacatggtctctgtgggtttcacccctcacccctcttatttttgaagttttattgaggcactggttgaggctttagggctcccactgttaagtttgacagtaataggtaagtgtccccccagtctcccttttgccctttctttttttttttttgagacagagttttgctattgtcatccaggctggggtgcagtagtgtgatcttggctcactgcagcctcgcttcccgggttcaagcgattcttctgcctcagcctccccattagctgggaatacaggcgcacaccaccatgcccagctaatttttgcatttttattagagacgtggtttcaccatgttgggcaggctggtcttgaactcctgacctcaagtgatctgcccgctgcagcttcccagagtgctgggataacaggcgtgagccacaccgcctggccgcttttgccttttcttgacattgccaatgcatcctgtccccgagcgtctctgagttttaagtctcagatttgttttctttggagacaaactgcaggtaggtgttacttctcaccgaagttcccagatagcacaggctttgctaaacaacacagcaccaggaactccatcatagagaccgcaggatgctgtgtgcgcgcacatgcgtgtgcacctagtgagatgtaaacatttacctggagtaaaagaaattctttccccagagcccaaatttggctagtctccttatgtacacagctttgacagggattccatatgttttgctcatctttgcttttttgcagcctccacaaatttattttccgtaccactgccactaaacagagttgtttctaaagtgcagatctggttgtgccattccaccgtcaaaaattattttttggctccttgttgccttcagggtgataggacaggtgactgctcacctctccagcttctcttactttctttcttcttcttcttcttcttttttttttttttttgagacggagtctttccaggctggagtgcgatggtgcagtctcggcttactgcaacctccgcctcctgggttcaagcaattctgctgcctcagcctcctaagtagctgggattacaggcacctgtcaccatgcccggctaatttttgtaattttagtagagatggaatttcaccatattggccaggccggtctcaaactcttgacctcaagtgatctgcccgcctcggcctcccaaaatgttgagattacaggcgtgagccaccatgcccctcttacattcttttcttctgttcactacagccgtggagagctccgggttgtcctgcacatgtgcactgccctctcttttatggaccttttaggctggctgcaccctccgtctgtgtcaccctcctgctcctcctccacctggctagttcctgttggccacttttggaaattcatgccagtccagtccaccctgagtacatcctckttctgtgtcactgagctcactatgctgggttttatctatgtctccctcgcaactagatcattcacgtcttgaagttaggcatcatgcgttcttcatttctgtacctcccaactcaatgcttagcacccagcaggggctcaagactgtgtgtggaatgaaggattcgtgtgaaaatgcagggagatggaaggctgagcgtttctgttccttgaccattcccgggtttgactaataactctcatacacactgctactcattgaaggcctactgtgtgcatgcattccatgtgtgctatacagtttatttattgttaacccacgtagaattcccagacacatagcgttactacaaacttcatcacaaaaataaagaaaccagggccctgtttctctttgtttctcagatgagaagtctcaccagagttgactgtggcttctgagcattatgaggcacatgtaggatttaaagctgaaaggctttatccctgagactcagggaaatatgacaatcttttattttgttttaattaatattttttgagtcagcgtcttgctttgtcacccaggctggagtgcagtggtgcaatcatggctcgctgcagcctcaacctcctgggttctagcgatcctcccaccttagcctcctgagtagatgggaccacaggcacgtgccaccatgcctggctaatttttgtactttttgtagagatggggttttgctgtggtctcaaattcctgagctcaagcaattggcctgactcagcctcccaaagtgttgggattacaggtatgagctaccgcacccagcctgacaattttttaaacagaattttaggtgcttgggccctggaaggttcccagttgtccaactcttgaggtggggggtgggtggggggtggagagagagagagagaggaaggcttttccttctcaaatagtttgcatttacacgaaggccacggtgtacttgtttattgaatcaataaagatacaatctctttgaatagttcagaatctgatatccctgttagactgagttcaccttttgtgaaggacacaggactgctggatagggtgttgcagcaatgaggagttatgttataaggggtctcttcagtgtctttttggtcatatgaattttatttgcccagtagaacatgactgatgaggctctgaatagtcaaagaaaacatctctcttatgttctgctcatgaatagaacactctgtgtcctgaattgttgctccactggggccagcacgtggtgtatttttctaatgtttgaaccaatgggctttttcattttggggcaatcaaggtaaagattttctggtgctcctgtgtgacagggaaagcatgtcttgtattttctctctctttcccttctgtcttttgagtttggaaaattatattttgagttacatgactaattacatgagtaattttagcaaatttactagaaattgatgttctgccaatgattggaaatcccttcctcccctccactcttctaaaccaaaacagtgctgtgtcctgaagctagaggggtgagtattcagtattggagtacagcggtttagaacattggagacatttacaaggataaatctatggccctgggttctgactttcttttgcctgtgtgtgtgtgtaggggtgtgtgtgtgtgtgtgtgtgtgtgtgagagagagagagagagaaagagagtaagagagagcgagctgggtttggggctgggaaggaagaatgattgattaggaagctgttgtgcagagtagaacaggacttcctgaaatgtaagacccaaagaaacatagatagccatattttccagtcctggaatcagactcaagtctgataaaaggttttcttttgatttgtgattctgataatatgaaaagtcttacaaaagtatagaattgtagctggtaggctgctttatgagaaagaaaataaactcccacagagtgggcattgacctgggagatctggagcctggtgcaagtgcagaccatggttttcacaatctttgatcactttccttttgtgttgaactttctcttttagctccatatttataaatggggtcatatttagccagatattttatttttatttttatttttaaagagaggcaggatcttgctgtgttgcccaggctggagtgcagtgccatgatcatagctcactgcagcttcgaacagggcacaagccatcctcccatttcagcttcctgagtagctgggattacaggcaggagccacatttcctggcttctagttgggtttttttgtttctggaagaacagaaccatactcctcaggccaggaagacctaggtagagcaagaccagcaacctcttggctagagggctgtgggagctgagcatcagtgagtgaggggaaagcagtggttttttgtcttgagaagaagttcagcgctcagttaaccagaacaagtgccacctgtataagacagcagacggtcaaagcagaagagggaaggaaatggttgaataattctttttttccttttgttccttctctgccctgagtctcccccacccccaaagagatatctcaaaatgtcaaggtccagtgaaatggacggtgggatccttgaggaggggtctgtggggtgggggtctctgaaggggctaagccatggtgggctaatggctctgtttaccgagtgcatgccctatgcctggcattgtgcttctttctcgaaaccatcctacaggtggaggaagcgggggtttaaagggagccagcagccagcgactctctatcttacagcttctaattggctttgaaaccacacaggctgctgctggaggaacctttgacatcctcagtgtgcagccctctcccctccctctgaagggaggcatactccttcactgttgctttgacactctaggatgttccaaaactaggtggtcagcttactcagaaggctctgggcatttttcctcctgcaggagggactgcgcacatgcgaaagacatgaggaagctctgatgctcagggctgtgggggctttggccttggcccgcacagccttctctggtatagtgaggtctccttttgggtttttcacttgtgtttgttttgaggcgtatgtgcttcatatggttgaactcattcctcgcccagctggacatagagttgactgcctcagtgggtcccacctcgggggtgggaaatgtaacctcatgagggccactgtatggttgggcagattcacagctgctctgaggtcaggcctggcaggtggcgagggcctaagaggaattggatcaccctggaacctagctggggctaggatggttgttgcatgtgattttcagcaggactctaagggatctccaaagctggttggctggctagygaggttgggcgagggaataactcatttgcttaacttttcatatgtaacaactgggttttgggtttcacaagagacaaggtaggcaggcaggctcaggtggttctgtataccccatttcatacatgagaaaatggagacttgtttcagatcgtaaggtagttggaccgcagctactcttccaagactggtattcgttcctctactctgttaaagccagagagaggatgcaggccaagtcaagtgaccaaagctaaaggggaaggaagggctggctggacttagcagtgaccacagacagagttgaagccttcacggttggcgttggycttgttcactgctgtgtgccaagctgctgacagcatctggctatcgcaggttcgtaataagtgtttgctgagtgaatgaaagaatattggtgttggggatgatctctttttcacttgctcagcaccttccagaattttgttcttctctttgccactcccttttttctcctccctgggtaacacctcttattgcaggagtaggatcaggttttgagtagcacctttggggtacccattcagttcctcttttcccccgtaattatgggatttgggattgccctttgggagaattaggtaactttaggttctgtatgttaatttgaggcctggattttgaacttccttctgatgcagatagaccttggaagggagtccttacttagaacctctttattttatctcctcactgggagagtagatcccagacaggttttgggaaccacctggtgtccccaagcgagcagaggcagagttgggcttgaatctcctccttcattgcagtgctttctctgccctgatcccattgggtgaccctggactatgaatatggattatgagtgggccctgagagtgatcagagacatccttcaagattgaagctgctttggttcctgccacatggaactgagtgggagaatgtctcaattcaggatggtgggagtgtctctttgtccaagtaataaatggaaaccgtttgctcccgacttttgcagatatcaagggcttgtctttccagagtttggttttcttcccttctctccgcctcccttttctctgcccgcctgtggttttgagcccctcatggctatctgggcagtgatgggtggaagggagctggtgcagtattcgagtagagaagttctgctgcagtgagtgtggggcaagtttcccagacccttgttgggtcagggcaggtggttgtggcccagttgtttggccttctgcaggctgcacccctgccctgctgcctgccagtggggtgagggcctggccacctggtacttaacaagtttggttctacatgtgttcccgtgagtggaggacaaaatgaaaatacctcctgatcgtgttcaaccattagttgaacaaccatttgaaatggttattgcaaccatttcagagttttcttctgtttgtgatgtcatctgtgccttataaggggtgacttgctaccttatggagcacctaggttgaggcccgggttgagcacagttccatacgttagctcatttatttattttgagacaggatctcacttctgtggcccagggtggagtgcagtggtgcaatcacagatcactgtagccttgacttcccaggctcaggtgattctcccacctgagcctcccgagtagctgggactacagctgtgtaccactatgtctggctaattttttgtatttttagtagagatggggttttgccatgttgcccatgctrgtcttgaactcccggcctcaagagatcctcttgtctccaaatcgcttcgcagaagtgctgggattacaggtatgagccaccatgcccagccaagttagttcatttaatcttcacagtggtacaatgggctaatatctctgtcttataggtaaggaaatggagactaagagctctttgccaagggttgctgtcatccatttattcatcaacaggtagttattaggtatctactctgtgctgggccctggcctgaacttggctttggtggatgagactgacaagttctctgttctcacagagctgagagtctggggataaagatcccttattatggtttcttttgtggtgttgtggggagagggtgatgattagggtttgggtactggagagagaattaggattttagctcattttactcaaatgctttatattgcaccatgttactacattttcccctgtgcttcccccctaccctatgtggattattacagtttacttgtgtgtaaacttaggctcagagaggctgggtaacttatcccagcttgcacaaaagaggacctgaatttgagcagaccgtaggttgaattctgtccttctatgctgcctttctatgaataatatgtttacatatatatatatatatatatatatatatatatatatatatatatatttttttttttttttttgagatagagtcttgttctgtcacccaggctggagcgcaatggtgtgatctcagctcactgcaacctctgcctcctgggtttaagtgattctcttgcctcagcctcctgagtagctgggattacaggtgcgcaccaccacgcctggctaatttttgtatttttactagagatggggtttcaccatgttggccaggctggtcttgaactcctgacctcaggtgatccacctgcctcggcctcccaaagcactgggattacagcatgagccacagtgccaggccttacataaaaattgtttaaaaagcagtttgcagaagaattatcaatccttttgttaacattttggtgaactcttgaacacattttttaaaaagttgagagttgctaacaagtaaagtgaagtcctgtgcctgttgtaatttggactgaggagtgtgagttgtcttggtctaaaggtcagagtgagggtctctgcctgctgcaggggtctcccggttagggttagggtgaaaagctttttaaaataaacctctcaaatttgttgtcaacattaacctatggtaattttttttttttttcttttttttgagacagggtcttactctgttgcccaggctggagtgcagtggtgggatctcagctcactgcaacctctgcctcccggttcaagcgatcttcctgcctcagccccccaagtagctgggacgacaggcgcgtgccaccatgcctggctaatttttgcacttttttggtagagacagggttttgccatgtcacccaggctaatctctggtaatttttaaactctgctcaaagttttagaaaacataagtctggaaattccaagttgagccactggtgacttgtgagcatgagtatggcatgggattgggggtggggtggggctgacgtggcctggggcagatgccgggtggttctgtttggaaacagaagttccactgcacatgcagccttcacgtcttgtgggggcttttgtgggggctgtgtacttcccagtttggttattagtaactttatttggttctggtcattaacggcttttgggggcgttttgggggcctgtttgaggcccctgaacatgcatttttcagttgtcgttgtccatgttattaaaaggatatgttggagggggttgcagtttagtctgctgctgtttcgaatccttttctttgatagtgtttgccttcctcccaccaaatgctgcactgagagtctctggtacctgggtccctccttcccttgcctttgcttgggaggtcagtgccttcatccaggacatctttgggcatacaggtaatcccaagcagctctgctcagttgttgataccccttctcacagaacctgatctgcctcagctctccttgcctcctaagtggcagtgccccgctgctgggaagactcctctctctgctggatgcttcttcaggcctgctgctgcacagcttacggccatgatgactgctgcagtgcagaaggcatttcagttggctgtttgtttttcatgcattttgtgtttgtagtgtgctggccacgggagcactctaaacacattatgggccgggcgcagtggctccggcctgtaatctcagcactttgggaggctgaggcgggcagatcacttgagcccaggagttcgacaccagcctggccaacacggcgaaaccccgtctctactaaaaatacaaaaattaaccgggtgtgatggcgcgtgcctgtattcccagctactagggaggctgaggcaggagaatctcctgaacctgggaggcagggactgcagtgagccaagattgtgccactgcactccagcctgggtgacagagcgagactccatctcaagaataaaaataaaaacaaaaataaacataaaaataaacactttatgtacacaatctcacatcactttcacagtcttggaaggcagatatttctgttatcctcattttacagctgaygcctatctaaggcttgtataaaagtcagtcactgtccaggctcacacagccaatgctggagggctgtgtggcacccagagagcacagttgctgcttggaataaaccttcacttatagtccggagcagggtggttctaaagctcccttagctttcccactagtaagcttccaggttctggtacagtttctcagcctcggcactactgacgtttggagtctgatgagtctttgttgtgagcgctgtcctgtgcattgcaggatgttaggagcatacttggcctctatccactagatgccagtagcacccccctcccaactctgcccagttgtgacagccaaaatgtctgcagacattgccagatgtcccctgggggacaaaatcttgcctaattgagaaccaccgagtcatggcaaccatttcaaaccctaagccaggatgtacgtggagatggagaaaggtacaacatttagaattggtactgttggctgggcacggtggctcacacctgtaatcccagcactttgggaggccaagacgggcagatcacctgaggtcaggagttcgagaccagcctggccaatgcggtgaaaccccgtctctactaaaacaaaacaaaacaaaacaaaacaaaacaaaacaaaacaaaacaaaacaagtcgggtgtggtggcgcacttttgtaattccatgtactcgggaggctgaggcaggagaatcgcttgaacctgggaggtggagattgcagtgagccgagatcgcgccattgcactccagcctgggcgacaatagtgaaactctgtctcaaaaaaaaaaaaaaaaaaaagaattggtactatcttagaaaacctggagcaccctgctgctttaactgcagccctctgtgtgggcagacagattgacagtgggcttaatgtggggtaacctttcatcatgaaaattaaattacactgcaggccttttgtagccctcctatatgaaaccctcttaaaatattttctttttgcaatggaagcttgggggaaaaatcatagtcttagatttattgaagttttgtggataaaagcactttttattaaaaagaaccaggtgaaaactagaagggcctcttttgagtctgctgacagacacgtggagaatatatagtcagcggaacattcctgtgctttccgtaaagctgtggatgaacctgcctttcaggtttcgtagcctcttcagtcagatggtttgagaatgcgtgttttgtggtgtatgcacacagactgtatgagtttgtttttttacacatgactagtaaacctgtcacattttgtcaaatgtgattttctttctttattaaaatagattttatttttagagtagttctaggttcacagcaaaattgagcagaaggtgcagagatatcccatatacccctggcccccacatatgcacggcctcccccgttagcaacacccccaccagagtggaacaatcaatgaacgtacattgacatatcactatcacacaaagtccatagtttctgttagaattcatgcatagcattctacattctgtgggtttggacaaggtatgatgacatgtaactgtgatttcctcaattcaatatgtatagttcctgttcacacatttcttcacacatttgttcctcagtgctcaaatgcctgctgtattccaggctgtatttgaagcccctgagcctttatttggagagttcattgaacattagagcatgcagtttgctgagatgtcttgtacttagaaaatccaatttataaaaaacctcaaatagaacagtaaatttagggaattttttttttctgatgataaaattagataactctgttgcatggattctgtaaaacacagctccctcctgttacgccatgaattgggttcaatttacaacacccctttaggcatactttttcagcaacacatgtctgagccgaggtgcactgtgcctctttctgtagcaggcagcttttagggggtgtcctagtggtcttatgttttatacatctcatgggagtggctggtttctaggaaatagctcacttgccagttttggtaaccctaacagagctgttttgccaaggcgtctggtgaatatttctgtcttccagtcaggactaatatagtacttttcagaggtgatagccagttaactgatgactttttttttttttttttttttttttttttgagatggaatctcgctctgccacccaggctggagtgcaatgatgcgatcttggcttactgcaacctctgcctcccggattcaagcgattctcctgccttgcctcctgagtagctgggattacaggtgcgcaccaccacgcctggctaatttttgtatttttggtaaagtcagggttttgccatgctgctcaggctggtgtcgaactcctgggcccaagtgatctgctcacctcggcctgccgaagtgctggcattacaggcgtgagccattgcacctggccgtgttttctgttttttatttagaggaagtcacttgatcatgcttttccccccacccatggcataggaaaatgattcttttgctgattgtgctgattaaatgtgatgtggaaaaacctactcctggtgttcagagaggttttccaggtcacagtggggtgggtctcatctggacatcagaatcattatgttaatgataactaagagcagttgactgcttactataagccagccactgacctcagggcattgcataactggcttcctttactcttcacatcagccctgtgggcttgggagtgagacctctacctagtttttaaacaaattacataaactttttggggctcagctccctcatctgaaaatcagaaaatgatacttctctggcattttgagcatgagttcaggagtcagacttcctgggtttgaattctagcttcttctatgactttgagcaaattactttaactttgctaagcctcaggtttctcgtgttgcataggcagatgatagtcatatctgaatgtaacgagaatcaaatgcaacctgggacacagtgaacacttggtgaacgttagtgccttggtaacagtgatgatagtgacaataaagatcgatgatgatgatgatggcgatggtgcttaacccagtatgaaggtgaagtgtctaagcttcttgagggcagagttttgtcttcttctgcactttctttctagtgtctagaattgcctgtaggtttacccctggatcccgtcaggatggggctaaatttagaatttttggaaagatgtgagctagcccgtctacagtgacatccagctcagtgtgtatgtttggtctgtgaacatagtagaggcatgattcaactgtgagtttgtgctgggagcatagatggatgcttttcaggctcttgaaatgtgcaagtgtggttcccttgcagcaggcattgcctctccctcgttaatcaagatcttttccttgccaggacttcaggagatcctggacatcctctggagcccaggggtggcctcacccgctccttgctttagcctggaatgcaggccctcaacattccagccttgggttagtgccagagctgtgaaagcagggcaggcatttccaccttgcttgacaaaggcttttgctctctgggtggttgggggtgcctctgaagccaggcgagaccagagatctcatgggtttgtgtttcttcattgatacttttaaggggagcaacttaatcagtgggaaaccagatctcaaaggatgggacagataaacscagggtacagagaagagcttgggggagtgtcaagcttatttgcccaaaagggctgaccctaccttaccgccattaatacatgtccttcatgcatccctgggtaacagggaagtagtaccaaaaatcttacagtgcaataaacacttggcagaaatggagaaactagtaatggctgagcagctgtgccctctccaccacctcactatgcagtacgtgggccaccagccgctaggggcctggcagccacagagatgagggaagcatgctgaggaccctggtgtggagttggaggggtcatgtcctctgaaaggtggccaccactcatcgccagcccttactgtcatgtgagaatgtggctctgtgtttccagatattgtttttttttttcccctccaacagaagcaggaaatataaaaaatttatataatatatataaaatatattatatataaatatataaatatataaaaataaatatatattatatatataaaaatatataaatatatataaaaatatataaatatattatatataatatattaaatatattatatataatatatttatataatatatataatatattatataaatatataaatatataaaaatatataaaatatataaatatataatatatattatatattaatatattatatattatatataaatatataaaaatataatatatataaaatatatataaaaatatatgatatataatatatataaatatatatgtataaaatatatattatatattatatactatatattatatataatatataaaaaatatatataaaatatatatataacttcacggaaactctgaaggagaggtcaaatataatattatatattttatatatataatttatatatatataaaactatatatatatatttttgagagacagtcttgctgtgttgcccaggctggagtgcagtggtgtgatcttggctcattgcaacctctgcctcccaggttcaagcgcttctcctgcctcagcctcccaagcagctgggattacaggtgtgtgccaccatgcctggataatttttgtacttttagtagaggcagggtttcaccatgttggccaggctggtgtcgaactcctgacctcatgatccgcccaccttgacctcccaaagggctgggattacaggcatgagccaccgtgcctggccaggaaattatatttttatgagaaatattctgttgtttaaattctggcacctcgttcttttttttttttttttttgagacgaagtttcactcttgtcgcccagtctggagtgcagtggcatgatctcagctcactgcagcctctgccttctaggttcaagtagttctcctggctcagcctcccgagtagctgggattacaggtgcctgccaccacgcctggctaatttttgtatatttagttgagatgggggtttcaccatgttggccaggctggtcttgaacacctgacctcaggtgatttgcccgccttggcctcccaaagtgctgggattacaggcgtgagccatggcgcccggccctagttcacaaaatatatatggccaaacaaaacatgtctggggctagacttggacagggggccccattgtgcaacctcttatatagcaaattagagtttaccaggaagtttctgcccttcaggccctctgctctcacagaaactctatgaaggagaggtcatcttgtctatgtttgtaagaagtcacattgagagaaatgacatcttagctcctcttatgtgccaagtagtttgtctgcgttatcttcttagattggctccatctctcaggtgaggaaacagacttggaaaggtgaagtgacttgcccacctagttagaagcacatcatcttctgattcctgtctcatttcatttcaccgcttgtttgccctctctgtggtcttgcccacggacttgtagtccctgatgtacgccaggcctctcacagtgtggcccccgggattcccttttatgaaaaaaagttgagcatgagctgtaagttagagtaggttttaattctgtcctaccacggagtctgttttatatgagaacaagttatttaactcctctgagtgttaatttcctcatttttttcctttctttcttttttttttttttaaagggccagtccccattctcacagggtgtttggaaggagtaactgaaggggggtatataaagccgctggcagccaggcatggtggctcacgcctgtaatcccagcactttgggagcctgaggcaggcagattgcttgagtctaggagttcaagaccagcctgggcaaacatggtgaaaccctgtctctataaaacatgcaaaaattagccaggcatagtggtgcatgcttgtaatcccagctacttgggtggctaaggtgagaggattacttgagccagggaggttgagactgcaatgagctgtgattgcgccactgcactccagtttgggtgatgcagtgagatcccatctctaaataaaaaaaaaataaataawgcccctagcatggtgcctggcacatggtaggccctcaaaagatgaccctccaaagtggccaggactcaccatgcattcagggaatatggattcttttggtggcagcaggctgcatttttgcctggctgaatgcctgcaagcatgggaacttttgatgcaacagtaatccttggggtctgaaaggccccaaatctcccgccagatctctgaggttaacatccagtcaaccttttgcttttcattcttggcctctttcctcctcacctccaccagtgtgacagtcatatcctctctatgtttctggtaagttctggccttgagggctggtcttatgactgacaagtgaagagcagtgccaccctctactccacattctcagaagcgtctctaggttccatactttaaggcaggctagcttccaaggcatactgacagacatccctgtgcagtcctgggggcacgagggtcccattccaccctggggcttcagggtcaggtgaggaaggtagatccctgaagttgggtccagaaaaggccactgggctagcctgtctctcgttctggtcactgacctcaggatccagcaggacgctgctagcttgcttggctcagctctgcgagtgctgggagcaataagcagtgctgaaaacgcgatgcatttcaacccaaagcactctgatccctttccaggctttgggagaatgttttttccagctcggttacttgctggcatgcataggtcaatatacaaggtgttctcagagaagccggagctgaatgttgacttttgtgctccctggggtgtgttctggggaggaagtgggttttcaggttgtggtgcgtgtaggatgtggtctgggatgattagtatcacacactgtggataaagttaacacgcattgtggagcttttttcctcttttgtacttttgggcgaaggtgcctcaaaagcagctttgtttatcaaggaggtgcccttgattctgtatgcatttttaacatctgaatagaagttagacgcacacataattgctttacttgatgcagtaaatacgtttcagccagataatccataagaccctagttcagatcctgactttgatccctcttagttgtgtgagctctcaccagtttacttgacctcactctctgagcgtcagattcctgagtgtaaaataggtacaaaaactcagattgttgtaaggtttcagtgagttgttgcgtgtaaagcatttagtatacagttcttgtcacaatgtttagtaatggcagctattatcttaactattagagcggcagtttggcgtggcactaataatgatgatggtgacagtttcactgagtgcttactacctcagctattcttccaagtactttgcatcacttagctcatttaaccctcacaataaagcgataaggtaggtgctgttctaatctctgttttacagatgctaaaactcggcagccaggtgtggtggctcatgcccgtaatcccagcactttgggaggccgaggtaggcggatcatctgaggtcaggagttcgagactagcctggccaaaatggtgaaaccccgtctctactaaaatacaaaagaattagctgggtgtagtggtgcatgcctataatcccagctactcaggagacagaggcaggagaatcgcttgamtccgggaggaggaggttgcagtgagccgagattgtgctatagcactccattctgggcgacaagagcgaaactctgtctcaaaacaaaacaaaacaaaactcaggcacagagaggttaagtaacttgcccaaggtaacccagctcataaatatgaaaagagcagggactttagagtcagaagacctgggtggcacgcttgcatgccgtgtcctggtggtgtggcctaccgcagagtgactgactctgattgccttcccaactgtaaaatggtgctaatgatacagaccgccccccattgcctggtgtggtgcgcggctgtgagtgcttaataataggtgcttaggcatcatttgctaattaactgactgtgttaggttattaggaagttccagtgggctaataaaagctctgggtaaacgttagttgttcttttaaatgtcctgaggtgcttatgattggagtttaaacagcacacctgtttttcagatttcggaaccacttaagagaggcacagtgtaaagaaggtggagatgagaatatcacctttactcctgatacagtcttggagaatgcagcttagttgtggggcagcattagctttctgatatgaagctgagattaggtggatgtaccaggccagtcacgggcagccttgggtacccagaggccttctcacgtgggtcgaggcaggtggtggaggtggtggcagcggtagcccccataatacttctaggtggaagaacagaccacctgagtgagagaaatcactcctgagccctgggggagaactgtgtggaggggcagatgggagcctggagttttgagggaaaaaaaactttccttttggaagccagacgtagggaagaagcatattgatcacaatgactattaaagaaagctccccaacaccccagcaaaacacccacaaaacaagaaactacttctgccaatggttctagccagttttcttcaccacagttcatgactgcttcatccttttaggtgatcacacccaaaacttttgggtcttcctgcctttttttttttttcttttgagaccaagtcttgctctgtcacccaggctggagtgcaatggcacgatctcggctcgctgcagcctccgcctcccgggttcaagtgattctcctgcctcagcctcccgagtagctgggattacaggcatgtgccaccatgcctggctaatttttgtatttttagtagagataggctttcaccatgttgaccaggctggtcttcaactactggcctcaagtgacccacctgcctctgactcccaaagtgctaggattacaggcatgagctaccacacccagcctttttttaaaacaaaaccaaaaccaaaagagacagggtctctggtgtgcagtggtgtgatcatagctcactgcaccttgacctcttgggctcaagcaatcctcctgcctccacctcctgaatagctgggactacagatgtgtaccatcacactcatctaattaaaacaattttttttttggtagagatgggatctcgctatgttgcccaggttggtcttgagaactcctggcctcaagcgatcctcctgccttggcctgctaaagtgctaggattacgggtgtgagccactttacccagccttgggtcttccttgactcctgactctcaaacctcatattcagtccatctgccagtctgtgggttcaatcttcaaagcaaacccagaaccttactacttctcacctctccccagccaccgctctggtccaagccaccatcgtctctcacctggattagtgcggggctctcttcctggtctccccacttctgcccttgtccctcttcagtctatttctatgaggccaccagaattatcttttttaaaaactgaagtcagatcatgttgctcctctgctcaaagccccgcagtgattccctggcacgccgaggggaaaaggcaagatcctcccaaaggcctgtacgatctgcccccggcagctccctggcctcttcattttgtgcctcctctgccccctctgcagagccacactggccctggtagtttctagaacacgtcacgttcatgcctgcctctgggctttgcatgggccttcttcccaggcacaacgtggggctctccccacttcttccaccctacagagaggccggccctgatcagctgttttataatagctcctcccgatcagtactcctgatcgctccctactgtgctgtgccttttttttttttttttttttttttttgaggcagagtctcactctgtccattgcccaggctgtagagcaatggcgtgatctcagctcactgcaacctctgcctcccgggttcaagcaattctcctgcctcagcctcccgagtagctagaacacaggtgcccgccaccacatccggctaattttttgtatttttagtagaggtggggtttcatcatgttggccaggctggtctggaactcctgacctcaggtgatccacctgccttggcctcccaaagtgctgggattacaggcgtgagccactgcgcctggctgctctgctttttacccatagctctggctctaatatatgacactgcccctccctgaattagaatggaggctacagggggatgctggtctgttagttgactgatgcatcttcagcacttaagacagtgtctggcacagagtaggaacagaatatggtcctgtaacaaatactgaaggttgtgctctgtgcacctgggatagagcaggagcaagacacatcattcctgccctcacagggttatggtctcctaggtgacaaggtagtgcacacttccatagstcttactctgggacaagtactgtgccaaatgcttcctcccagccgcctgatgaggtagctactgttagttatcaagtctgatttacaggtgaggcaaagaaaggataagtaattgacccaaggtcacacctagcaggtggtgaagctgagccatgggtcttggcttcaagaatctgtgctcttacccaccatacctgctgctgccggattcaaacccgaattgcattaaggaatcatcataacctgtttgattgaagctataagggaactttgagcatggtgaatggggcgctctatggaaaaggggttctgggaagcctctgtggaagggaggttttgttaagtgaactcccctggtaaacggagtgattggcccccaattagcttgctgttcggattaactgtartacatcacactttcgaaagtgaagatatgcctattttttcccctctaggtctataaagtagatttttgccattagtaaaatttaaagtgattgggggctatggttactgagaattcaagaggtagattgacgaaataatatttgaatgcaattttattttttgaaaaatgttttcgagatgtcctgtttttagccaggaagcaaactccaggaaaactctcttttccattaaagtgtggatggtgtactgtaaacaaagactagctctcttgagctgccacgtttctataacttatagaaacagaagctgttttttttttctaaagatccaaactcatgttgccacacaaacaacaaaataaaccagtgtgttccaaaaacaagcatttgctctacccacacgcacagttggaaagatgcaggtttgattgaagaagtcggaagccagtgaggtaatggcagattcttttaggggctcctgttaattttagtaagcttggaagaagcttctaggttgtttagtgtttctattagaaccatcacctcaacgaatttgttattgtagagattgattaggggatctgcttcctttgagcagccaggatcccccagctccagcttctagcctgcttttcttcctcatctctactctttcagaataatgcatggctttcaagtcctgtgtgataggtggcttcttagcgggcctctgaaggggctgagatttgttcctggggctgagactttgttcctttgagggtgcagaggctgctacctgctcaggctgcccccaaattgctcttgtgtgcagtgtgctgcttggggaccagtcctggctctgccaccatggcggacactactggcttcctcttaatctcaatctcttcttctcctttctttcttttttttggagacggagttttgctcttgttgcccaggctggagtgcaatggcgctatcaatcgttcaagcgattcttctgcctcagcctcccaagtagctgggattacaggcatgtaccaccacacctggctaattttgtatttttagtagagacaggatttcactatgttggccagtctgatctcgaactcctgacctcaggtgatccgcctacctcggcctcccaaaatgctgggattacaggcatgagccactgtgcctggccctcttctcctttctaacacaagcctgcttctcagtttcacgcacacataggagtggccacctgaccctgtgttggcaaatgattgcaggctgttgtcaccggtggggctcctggaaaagccctctatgggggattgactctggcatgactggggtgtggatgctgtgctcagaggtgctgcagtaatggttctgctgctgctgatagtaacacaggcagtgctgtgtcatgcacagtaatcctgtaagggagatactatcatgatctctgttcggtggatgaggaaacagtctgaggaaaggcacctgacctgttcaggccacacactaagtacagagctgggatcctggcaccagcatttgctctcaccacctctctgttatgtacctctcacacaggtgcgagtcccaccccagaggggccttgagaggctgcaagtgtcctgggtgggctgcctgcttcaggaggacttattattggggaaaaatacccccmctacttattactaagggccgaatgctttatgttcacacaacaactccatgttgtgtgactttggacatgttccttaactttctttatcttggtcttctcatctctgtaaaattgggatcataatggcaccaacttatagttttttttttttttttwtttcttttgagtcaggatctcaccctgttgcccagactggagtgcagtggtgtgatcttggctcagcccttgggctcaaacgatccccccacctcagcctcctgagtagctaggactacagacatacaccaccatgcctggctaattttttttttttttggtgggttttgctatgtttcccaggctggtttctaactcctggactcaagtgatctgcctgcctcggcctcacaaagtgctgggactacaggcatgaactaccatgcccggccaaacttctaggtttcttaaaaaagtgcctggcaggccaggcgcggtggctcatgcctgtaatcccagcactttgggaggccgaggcgggcggatcatgaggtcaggagatcgagaccatcctggctaaaacggtgaaaccccgtctctactaaaaatacaaataattagctgggcgtagtggcgggcgcctgtagtaccagctacttgggaggctgaggcaggagaatggcgtgaacccaggaggcggagcttgcagtgagctgagatcatgccactgcactccagcctgggcgacagagygagactccatctcaaaaaaaaaaccaaaaaaaacagtgcttgttgttcttttgttgttattgttaaaggatcattatctcattatcaacaacattggcaggtaattgagcaactgtttgtctccttgtcaatgtggagatagaaaattgcctacgaggttggacaaggtgctggagcagcgtcaaggaagagagatcgaacaagaagactgctttgcccttggacagctttgtttctgaagcactttctcatattctcccatttaatcatcccctccctgccaacttttccaacaggtgcatacttaggtagagctattctttatcagcctggggctaagatttgttcctgggcaggttatctttgtctctgcctggatagaggcaggggcagtagagttgtcatgcattccagactactagctatgcagaagcaggagcaaggtaagagcagatttgtatgaatgagggtgtcagggaatatcttagatgtccatttagttgttaaaaaagagaactgatgcctatatttcaaaacccaactttgatctggatgcagtggctcatgcctgtaatcccagcactttgggaggccgaggtgggtggatcacctgaggtcgggagtttgagaccagcctggccaatgtggtgaaaccttgtctctattaaaaatataaaaattagctgggcgtggtggcacacgtctgtaatcccagctacttgggaggctgaggcaggagaatcgcttgaatttgggaggtggaggttgcagtgagctgagattgcaccaatgcactccaggctgggcaacagagcaagactccatctcaaaaacaacaacaacaagaacaacaagaacaaaagaaaaaacccctaactttggagaggttatctcctgaaaaggagggttttggtctctttctcgcactgctctaaaatagtgactggcacatagtaggtagtcagtaaatatttgttgaatgaatgaatgaatgaaaggtaattggccttccctgctcagttctcattaaaaattctggttttcacatatatgggcagtgtcccaacaggctgctggggggtggccgtttgtgatggcctcaccagtctttcccagagagggaagtgcacatttttargctacttttgctctgactgatacacttggctgcctaacaaaaagccagagaagaactaagatttttagcatcattcaaaatgcttgccattccttttgctttgtgaaatcatgagctagttattttgagttcacataaaggtcagaacttgatctggggaaggaggttccccttggtttatgtgaggggaactttttcgcccttctgtttattttatccaaaggcttctgtttttctcccaagctaaaatctggcatttgttgtagaaagttctcagcttatgtgtgtgtgtgtgtgtgtgtgtgtgtttttaaaaagagctcatattttggctttagttttgattctcagtgattttttttttctgcctgagagttgattttctgcttcttcaaagtccagctctcaagtgggtgcctaaagttgtttcgttttagaggtgacttaatcattttttaggcctttaagtgctgctcccagcttgtgtttccttctgtttttagtttttatgtggggcagggtctccaaagtacacgggctcttttccccacccctctaccctcattttaactgtgcatcaaatgggtcctgtttcttcttcatgtataattttgtgagtcagggaaggtggtgaaggcccttgaaccctggctttgtcatggcccttccttaaggacctgaaggtctcttctcctaagggctaggttggttcagaaagtgagaagggctggaccttttgtggggagaggatacagcagggtccraacagctgggctgayaccgggcagcagcccagcagcagtcggagctgcagggtcagctcaccatgggctgaacttgggcattgcctgtttaggcagagtctgcccgagcctttcctgctccctgagaatcctcagcatgttttcctgctgagcaaggagtgaggaatgaagcccactacgaagcccgagctgcaaatgtatttatttatttatttatttagagacagagtcttactctgtcgcccaggctagagtgcagtggtgagatctcagttcactgcaaccaccgcctcctgggttcaagcaattctcctgcctcagcctcctgagtagctgggattacaggcgcccaccacgggcccgagaactgagtctcgcccatctaatttttgtatttttagtagagacagggttttgccatgttggtcaggatggtctcgaactcctgacctcaggtgattcacccaccttgaccttccaaagtgctaggattacaggcgtgagccactgcgcccggctctgagctgcaaatttaatagggaaactgaaggaagaggttctccacagcaccagtggggctgagacctgttttcctcaactacctttttttttttttttttttttttttttgagacagagcttcactcttgttgcccaggctggagtgcaatggtgcgatctcatcttactgcaacctcttcttcccaggttcaaacgattctcctgcctcagcctcccgagtagctgggactacaggcatgcaccaccatgcctggctaattttgtatttttagtggaaaagcggtttctccatgttggtcaggctggtctcgaactcccgacctcaggtgatctgcctgcctctgcctcccaaagtgatgggattacagatgtgagtcactgcgcctggccaactgctttggtttctgagtcctccctcctctaagcccgctcagtgtgtgtcattcctgggaggcggtggctctcccaggaccccatgccgaaatctgccttcttcttgtcttcattcccccacctggggtacccctcagtgttttcccattacacagattcacgtttacatgttctagaaacatctgtaagtctttttcctgtttgtaaattgtatatcctctgttagattaaaaaacttttaaaagtaagtgtctttctctgtggtgacctatttgtgtggcatagtataggttacaaagcccttttcatgcattgttttacttataagtaatgtttatagatgataccgaggtagaccctatggggtgcttactatgccaggtctgttctaagaatgttatacacattaccttactaacccaccccaaccatccattgtgttattgtcacccctgttacagggtggagagaagaaggcagagagaagtggaatgacactcctgaggctaggcatttgccaagtgaggtctgggatttgaacccaggcagctgaacttcagaatcctggtgtttaaccactataccatgctggccttcatgttattgagcaggataaggaattgtcactcttgacttgtttttgaaacatgaaaacccttctcttaaattcaaaagtaatacatagctgggcacggtggtgtgcacctgtagtcccagctacttaggaggctggggaagaggatagtttgagtccagaaatttgagactgcagtgagctctatagtcatgccactgcactctagcctgggtggcagagtgagaccctgtcaaaacaaagcaataacaaaaaaaaccaaagtaatgcgtattgcagcaagtacttaaataatgtagatgcataaaagcaaaaagtgagaatccccactcctcctccagtgctctgagatagactgaagtaactcttcagggatgagtgtaaacacaagggatgtcctcgaagactttccacttggaaagcttgtgtattttatacattaagtatcataaatatgtagttaccctaatgggtccccgccattgctctgcaggcagtgggctgaggttcaggagttaagtcagccccagggcacagggtggtgcaacagaagagcctgagtcgaatccagatctcccctctccactgtgactgtttcctgggaaactagtcaggggctggttttataggaattatccagtcgtattattattattattattattattattattattattattattattgagactgagtctcgctgtgtcgcccaggctggagtgcggtggtgccatcttggctcactgcaacctccgcctcccaggttcaagcaattctcctgcctcagcctcccaagtagctaggattacaggcttgagccactatgtccaactaatttttttatttgtagtagagatggtgtttcaccatgttggccaggctcatctggaactcctgacctcaggtgatccgcctgcctcggcctcccaaagtgctgggattacaggcgtgagccaccgcccccagccttccagtcgtattcttgacaaatggttttccatgaagttgtggacaccttccagggtcacaattaaatggttaaatgagtcacgattaaataatgattgtgggtacctcccagagtttcaatgaaaaagggaattaactttggacacagacagaataatgcaaatcttcagttttggtttagaaaatctgaaacctgcagtggggaatacagaaaagaaggaagtagaaggagtctgtccccaaccccgccccttccttttttctctcctctggagagagaagggattaggaggcctcctggaaaggagtccctttcctgtgatcaaactcaccccttccctccaccagagcaattacagagcctccggcctggaaccttcctcaccggcctggaggagacaccattctgcggacaatggggggaaggaaaggaaagcaatgccgctgccaatggtgcggatgacttcctcaatgccagacttgcttgcactttcaaagtccctcctcggaggtcccctggtaggacctggagataggatgtgctttcactctttacagactattgtccaggaaagaaagtttcagactttcttaggcagggaagggccctctgactgtgaatttatttggaaatttgaaagagaagagagtcttatcctaggaagtgttctttttctttccccctggatttgacaggccaggcaacagcaattatccaaaccactgctctgcaccaagaggcaaaccacaggaaaaagaaacccgaacaagcaaggagaatagaagttccccaaagcatgccttcttgtttttctcagaggacagtcttttcattcatgttttacagattggtccaacaagtgcagttcttctagtctcctatctagataagcaggatattagaaggaataggagaggcctgcaaaaagctatgatagggtggaaataggataggagaaactgaaaaaaggggaggcgtgcgctccaacacctccatagcccttggggacgggcttagtttctaatgagaatacagaaggcccatgtctcaataggccccgaaaaatattaatccagcccaatatgaacagtctgctaattatatgactgggcctgcttaggagatcagggcaatattacattcagagtactcagtttaggaagatgacacagtgtaatacatacagatttccatcatttcttttattcctcatttggagaggcaacagggctgagatagacatgttagcgatggctagattgattgatttattgactgaatgaatggcctgctttaggcagcgggaacactgaatgaacattttaaaatcagctggtataggtcaggaactgtgcaggttgctgggaatgggtagatgaaaagacattgctatggtttggctgtgtccccacctaaatttcaccttgaattgtaatccccatgtttcaagggtgggaccaggtggagataattgaatgggggggtggtttctcccatactattctggtggtagtgaataagtctcacgagagctgatggttttataaatgggagttcccctgcacaagccctcttgcctgccaccatgtaagatgtgactttgcgcctccttccccttccaccgtgattgtgaggcctcgccagccatgtggaactgtgagtcaattaagcctctttcctttataaattacccagtctcaggtatgtcttcatttgcagcatgagaacagactaatacagacatggaccttggctgtagggagtttgcactgtagtgacggcaagagctcacgtgatccattttaagatagaagagcgagctcaggcagaggaacacagagccaggatggtccatgcacggaatctggccctgcccttactttctccaggagcatgggctgggtccctctcctccctaatcctcactttgctcatgtgtgaaatgtagatcaagtaagttctacactcagaggtctcttgtgaagattaaatgagaaaaggcatggaaactgcctttgcacacagcctggtatatcctgatgtctgctgatactcttatttttatgttccttgacattccaaatctgccccagggagaattccaggacagctctggagaggaagtgatctttgaatccaaccttgaaatcaccctaggagatgcaaagaaggtgacaccagttaagaataagatgtgtacccattttcaaatgttcttttttttttttttcagatggagtctcgctctgatgcctaggctggagtgcagtggggtgatctcggctaattgcaacctccgcctcccgggataaagcgattctcctgcctcagcctcccgagtagctgggattacaggcgcctgccaccatgcccagctaatttttgtgtttttagtagagatgggatttcaccatgttggccagactggtcttgaactcctgacctcaagaatccacctgccttggcctcccaaagtgctgagattacaggcatgaggcactgcacctggcccaaatcttctcagttctaaatggctgtgataaaaactacattgacaatttttttttttttttttttttggagatggagtctcgctctggtgcccaggctgaagtgcaatggcgcaatcttggctcactgcaagctccgcctcctgggttcacgccattctcctgcctcagcctcccgagtagatggggctacaggcgcctgccaccacccccggctaattttttttgtatttttagtagagacggggtttcaccatgttagccaggatggtcttgatctcctgacctcgtgatccgcccacctcagcctcccaaagtgctgggattacaggcctctgcgcctggccttgcatkgacaattaatttgtttatggaaagccagttatccaatgatggtgaacaaatgcaacttgactgtataatacttattttggttttggaccaaagtcaccattaaatatgccaagttcttgttcaaggaaacagctaatgtcgtggacttgcatctcatttgtagttggttctccctgaaaagtcagtggtgtgggagaaatgatacttagtcaaaatcatcagtgaaaatcattgcttggatcatcccaaaatataatgaacaaaagtgatatttatctgccacattgagaaacattcaccatatctcaataagctctcctcagccagttggtccttttgtggttgaaaaaagtgccatatctttggttgggcatccaataaaatayggtatttaggggctacctgtatggaaaatccatatccttaaaggttagctcaccaggaggatgttgagaaatggcacagggggctgggcgcggtggctcatgcctgtaatcccagcattttggggaggctgaggtgggtggatcacttgaggtcacgagttcgagaccagcctggccaacatggtgaaagcccatgtctactaaaaatataaaaattagccaggtgtggtggtgggcgcctgtaatcccagctactagggaggctgggcaggagaactgctggaacscaggaggcggaggttgcagtgagctgagattgcaccactgcattccagcctgggtgacaggcaagactctgtctccaaaaaaaaaaaaaaaaaaaggcacacaggaattgggttgggactcagtagatcagtagatttagatctcccagcttagtctcatctccatagtgtgggtggagtagtactcacactatttaaattatttttatttcactacctgaatcccctcagcaagtatagtttaattcacctgagtaatacgcttatgcgaggggatttctccatgggccttttgtttttgctcctgctggtgatctgattttaaatgtgaacgtgccattgctaagagtttttgttctatgtattattctgtgtggaaaatttcttaaatgggattattgaagtatacttcattatttatcttctggcaatttatcaacaacagcaaatatcattcattattgtttggaggacagaactatttttatattctttaattaaaaatggctttgacattttcaaattcagagggaagttgataatttagtgctgtatgataggacctttagttggtctgaatgtcacataattgtacaaattgctgttaaagtatattattacttattttctgagaggtagagggacttggttatcctgggattgcataattattggttcactagaactacagatgagtgaaaagaagggttagatactctctagttcacttttcttccagtgcagggaacattctatggggttccgaacagatataataagctcataataacagtggccattgattgaactctttctatcaaacaatgtgaaaaacattagtagaggtgatatcttagtctgcttttgctgctgtaacagaatacctgagactgagtaattttttttttttgagatggagtctcactcttctgcccaggctggagtgcagtggcgctatcttggctcactgcaccctccgcctcccgggttcacgccattctcctgtgtcagcctcccgagtagctgggactacaggctcctgccaccacgcccggctaattttttgtatttttagtagagacggggtttcaccgtgttagccaggatggtctcgacctcgtgatcctcccgcctcggcctcccaaagtgctgggattacaggtgtgagccaccgcacccagcctttttttttttttttttttttgagatggagtctcgctctgttgtgcaggctggagtgcagtggcgccatcttggctcactgcaacctccacctcccgggttcaagcaattctcctgcctcagcctctccagtagctgggactacagatgcatcacgcccagctaatttttgtattttcagtagagacggggtttcaccatgttgtccaggatggtctcgatctcttgacctcatgatctacctgcctcagcctcccaaagtgctgggattacaggtgtgagctaccaygcctggccattttttttttttttttttttttgagacagagtctcactctgtcacccaggctggagtgcagtggcatgatcttggctcactgcaacctccgtctcccgggttcaagcggttcttctgcttcagccttttgagtacttgggattacaggcacctgccatcatgcctggctaatttttgtatttttgtacagacggggtttcaccatgttggccaggctggtcttgagctcctgacctcaggtgatccactcacctcatcctcccaaactgctgggattacaggtgtaagccactgtgcccagccccaagactgagtaaggggtgagcagaaattcactggttcacagttctggaggctgggaagtctcgtatcaaggtgccagcatctggccagggccttcttgctgtgctatcccatggcagaagtacagaagggcaaagaaagagggctgaacttgcccttttataatggcaccaaccccacccatgagggtggagtcctaatggcctaatcagctctctgagatcccatctgttaatactgttacaatggcaaytaaatttcaacatgagttttggaggggacagacattcaaaccatggcaggtggcaagaagtatcaaactactagatccttgggattgtgctttgtactggggtgtattttttccaacaatcctaaaaatcatttgaatagagatagcaatatatatcttacccatttggaaatgcacagagattcaggagtgttcacatagaaacagaagatcattggcttttgtccattcccaacgccagtgatctgtttttcttgactctttttgatctgtgtttctgaatgtgttgatatactgcgctactggtgtgcaggatgattttaaatgttgcacagatgaacattaatagtcatctattttaatatgtattaggaaaaagcccataaaacaatgaagcccattaaaaccccatggtttcttggatagtattacatagggtgaagctaattttatttcagtaaaaaatatgcaggtcaatttaaataaaaaaatagataatagtataaatgkcttgtggctacagtaaaaatgatgatggtacttgaatgtccaaattaatttaagtgatatatgtgttcatagataccatttcattttaacgtggttctgctggtcagaacagtcttacgatgggggtggtctccaggcttcaccttgtgcccactggctctgtttggttcctctgggctcacacacagggagctacgtatgtctctctcatttcctttggtatgttctctgggttaaatgtccccagctrtctgatctgttccctgcgggccttggccattcctgtcctggcctttactggcagtctctattctaaaatgtgggcatcccacatgaggtccagcttctcctgagatcccyggaggtgcagctgctgtgatggtgaccttgtttagcagatgctccctgcagtccaaactcccacccatcgtcctgccctttgatccatttcccatgaactgcttacctcagttttctcatctgtaagatggagagataactgtaagtgcttagcacagtgtttactagcacagactactgctattactgtcaagtcacttttcctttgctgccaataggtcattttctgtttatggcttcttcagtatgaactgatcaactgtaacttgaaaatttccagacttaggacttttggactcatagtgaaaggatcctttcccaattcccttgatcggtttttcctttaaaaaaaaaaaagatatttgacatcttttcactttcaagttcagtttctcttctcctttttttctgggtgatggtttattatttaaaaaatttctatgtatatgtgatttaaaagtaaacccacgtagctgaaaatgtctcataggtttttcttgcattttcagttgacccattcactttgcaaatctttagagtattatatttaagacagcttgcagctgttttcttatatatattttacatgacaaaattatatttaaaacatattaaactttaaaaaaccatagtttataatttataagccatgtagcatatttctrtttttgagacaggatcttactctgtcacccaggctggagtgcagtggctcgatcatggctcactgcagccttgacctcctgggctcaagtaatcctcctgcctcagcctcccaagtagttgggactacaggcacatgccaccatgcccagctaatttttatattttttgtagagatggggtttcaccacgttgctcaggctgtaatttttaaaaactaaaaaaagaaaaaaaagtgtttacaggactttaaattgagaaacttaaatatctttacatattctgtgttcctaatttatttttgcagcagtaattatttcagctgtctttagtattgacatgttggaacctcggattaatttgtgcatggatatatttagagccttttacttgacaagaatcatgtatatcatgactgaatttgtaatttcccagcatgagacccaaattaatagacagtatttagattctaggcaacgatgcattatataaaccagcatcatttagggagtggcaaagactctctccccaccagttctgtgaacttgggcaaggtgtgtaatctttctgagccttaatctaattagaccctttctcctgtaacccagagggggtgttagtaaagttggtgtgaaaaaagtcaattattgtactgatgcaatttgggtgaaactgtgaagttcagtgttcacatgatggttgtggagacactgaaccttaatccttaggccagggattcaaagttttttttgactctcatgttgaacgttgtctaaagtgcagtgtgccctagtttttaggtaattctgagaattctaaggcccttgctggaataattaatgagaatatgagatttcagcaaattagggccaggagtcagtgctctcagcatggaagaatctcacctccaaaaattttatgtgggttttacacattaagcaagcataggtgaggtgcagtgaaggggaagtgatggctgtcagtcgtttggccaggttcctttgcatacaggggagctagtgggtgtataccagctgagacagctgaaggaggagaacatgaagaatagttggaaactattgaacctccaagatttttctgtctttgttaacaactagcagttacatgctagcattatttatttatttatttagttagttagttagttcttgagatggagtctcactctgtcacccacgctggagtgcagtggcatgatctcagctcactrcaacctctgcctcctgggttcaggtgattttcctgcctcagcctcctgagtagctgggattacaggggcccgctaccacgcccagctaatttttgtattttgagcatgttggccaggctggtcttgaactcctgaccttgtgatccccctgcctcggcctcccaragtgctgggattacaggtgtgagccactgtgcctggccttatttatttatttttgagacagggtctcactctatcacccaggctggagtgcagtggtgcagtcatagctcactgcagcttggaactcttgggctgaagtgattcttcttccttagcctccccagtagctaggactatagtgccaccatgcctggctaatttaaattttttttktgtgtgtgtgtgtggtggagatgggttctcactgtgttgctcaggctggtcttgaactcttgggcttaagcgatcttcccatcttggcctcccagagtgctgcgattacaggcgtgggccaccacacctgtcctgtgctaggctcttaacgtccttcccagatgttatgtcccttcccttggtggctgctgctttctgccacattttaccttgccgttccgcaccttctaccatgtctccttttccagcctcattccctgagatgtagccggagttccagttcagccaacctgcccgttgttttctctcctggarctgggtgtttgagyctcctgcatggagtgttcttccttcccagctaaagtcctggtcatcccatttccatctgaaaggcccccttgttcatgaagcctctcatggtccttccccctaccccagccaggtatactttctctcctcttggaattaycctataggaagaacatggtggcttgacctgggttccagtctcacccatctgtttacctggggagtgatcttgagtgggtcaatttatgttctcagtgccttacaaaatggggcagaggatacctaacccccaggagctggtgtggctggggtaccttacacagggcctgactgtagtagcttctctccaagcattggtgtcttacctcttctgtttctctaatggtgttttgcacattcattgttgtattagagtttgtttttttgtcttaccttgttttaataaattataatcttatgggagatgacactgtcttttctttgtttcrtatataaaaagtgttttgctgatatacgtagaatcaagttggtctggagttactctggataagggatgaaatcagggagctcttgtgttcaaaggggccttcttcccttttttggttctttctcctcattttttagcttccatttttacttcctttagtattgagaaagtaccaggctcacttcaaagagttgacttcaaagctcccaccagctcagamatacttgcsactgaagcctgtaggaattggcatcaatggaagaccctgtggcggttgcatttaagattttttttgggacttctatttttataattcttttaaatggtaaaggrggagggttacaaaatatctgcgcctttaagatatcaaacataagccagtgaagttccaaaaaaaaaaaaaaagatgtcttagagaaatgaaaaggattttacaattggtagaaaagaacaactcttttttctttttctttttctttttttgtttttgagatggagtttcgctcttgttgtacaggctggagtgcaatggcgccatctcagctcacygcaacctccacctccccagttcaagtgattctcctgcctcagcctcccgagtagctgggattacaggcacgggccactatgcccggctaattttgtattttagtagagacggggtttctccatgttggtcaggctggtcttgaactcccgacctcaggtgatccacctggcttggcctcccaaagtggtaggattataggcatgaaccactgtgcctggccaagtcttttttctttaaaaaaaaaaaggttacttttactgttttgtcctagttacaagatcttaggacagaaataaagccttaacttgtatgtaacattttccaagatggctaagtggagttgcaggttacatagcagaaaacagaggcttgggcctgttgagacctcacacccagttcttcttggagctgtgggtgtgggctgaaagagaagacagggagattaaagaccagtgatttccctccatggaccctttgatgctcttgtttgttgactttttgaggcttggagtgaccgactcttccaggaatgagaaatggaatccctcccagttttgatggtcgtcccaggacatatttcctgaaggcctactctgtgtctcagcaccattccaggactccccccgacagccttacggagcgtgctacagtcttcctgatccaatatcctgccacctgcccactcattcaccctcggccctaccccatgcctttgcacgaatctttccagcctgagcagcctgagatgggtctttttccctgctccgaaatcctgacctcataatggctcatgaatccctattcaaccttcaagacctggttcaagggttaaatcctttaaggagacttctcctgatttttccccagctggttgctttgttctccagcgatttgtaaccttgtgaacaaatattctactcattttattctactggaatgatctatttacacttatctccctgcaaattgtatcctgcccttcaatggctaagtgaatggcataaacagatgctataggaattgagactaagttggagctgggtgatcagggaaggttttaaggaagagatctgggacaaatagctaaagatggattcagtgttttttttttctttttctttttttttttttgaggcggagtcttgctctgtttcccaggctggagtgcaatggtgcgatctyggctcactgcaacctctgccgcccagattcaagcaattttcctgcctcagcctcccaggtagctgggatgacaggagcccaccaccacgcttggctaattttgtgtttttagtagagacaggttttcaccatgttggccaggctggtcttgaactcctgacctcaggtgatccacccaccatggcctcccaaagggctgagattacaggcatgagccaccgtgcccggcctgatggattcagtttatgtgcaaaatttaagaggatgggtttcggcagttcaggttgttaggagacaagggtggaaaggtgtcctggagccctacagagatgggcttcaagtgccagccaaggtgtttgaccatttttagaagaggaatgagatgattaaagtggaacttttaggaagagtaggagtgagcgggatggatttaaaaggcggagtgagaggcatcaggaaggctgggtaggagagcattgctacagtctaggagggaggtggcaggggtgtagaccagggatcacaaagcaatggcttgccatctgcttctgtatacccagagagctaagaatggtttgtaccttattaaatggttgaaaaaatcaaaagaatatatgctgtgatatgtggaaattctgtgaaattcaaatgtcagtgtctgtaaatagttttttttttttttttttttttttgtggaacacagccatacttttcatttatgcattgtttgtggttgctttcacacaatcatgccagccctgagtagttgctgcagagaccatatggcctgcaaagactaaaatatgtacttatgtactatctggctctttccagaaaaaatcagcagaccccaggtgtagaccaaccagggtgaatgagtgtatgactggaaatgcaaagacgggcaggatcaagggacagtttagagcaggggtgtccaatcttttggtttccytgggccacactggaagaagaattgtcttgggccccacataaaatacaccaacactaacaatagctgatgagctaaaaaaaaaaaaatcacaaaaaatctcaaaatgttttaagaaagtttatgaatttgtgttggtctgcattcaaagccatggtgggctgcatgcgggccatgggttggccaagcttggtttagaggcggaygcagtacgggagagttttcccttctcttctgatgtaactccatgtcttggtggcggtgttctagatgtaggcatctttaggcaggggagtgtgcgtggaagggtgaaagggttgtgccttcatgacgctcgtgtgtgtgtgtgtgtttgtgtgtgtgagtgatgctgagctagtcttagagtaaatgcagacactggatggtagcgagttcagtgcagtttttatggagggacagcttgctgcctgctgatgaagccggacaagactgggtagtgaagtcaaaggcccacacctaactctgaggctcttgggggcaactgtgttgtgcagagaaggtaggagggcagaggaagaggaggagcggcccctgggagaatgccttctacccagctgcagcttctcaagggtgtgtttgcgtctgacctaaggtgttggagctctttgtttctggctgtgttcaggctttcccccgcttgcctttaggggaagctgatgactgctttagcgtaaagagagggccaggaggtcaacttccctacagtcccgtgcctgcttctgggttggggctggggagagtgctgcccactgaactctctaaatgttaaaagatacaaagaggaagcacagagtgaaaagggagaccccagaggacagcagaacatcccgaagcatatcccccatcagagaagaggcatgattttcacctggcttgcaggtgcaggatgggcatctcagatgctgtgagtctgagggcagatgcccatcagtccaggacagttcctggggacaaaagcctcttctcacctttagagaaattaagtcwtattggtagaaaatattttagagaggttctggtctaagcctctcattttgcagatgagaaacyacccaaggcccaagatggatggatttatcaaagccggttggtrctggaacttggatttaatttcaggtcttttattattactatggaacaaatcttaactttttcaagtgcataccatgtgcccggctatgtgctggatgtagatgctttatctgcaggtttaatcttcactacaactatgggaagtagctattgtctctcttttgcaagtgtgaagagtgaggcttagaaaggccaacttgcctgtgatcgggtaactcaagagggaaattggatcagagtccatctgagactgactccagagccaatgttcttagccaataggggcacataaaactgttctgagtggcttcctagctcctgtttccagtgtccaatccattctcggtttctgttcattcatcagatgtgcactgagtacctgcaagaagtcagaagggtgttgggttggtgaggacagattgtataccatcttggctttggccgagccaaacagaatgccaaagatcggcaaagatagggaatgattgttcttggcctcagctccacgctcccctcctctgtaaaactgcccctgacaccccggcaggattgaattcctccacctttaagctcccagagtacctcagctctgtctttagcacttcacactgtgtcatgcctccccttgggccctaaggccaagagcatgtgccatttatttttgtattcctacttctatagcccagtgcatattgggggcactcaggaattgttgagcgaataaaagaatgaatgaatacagacccagattgtcaatgattctcaaaccttattttacaaaagaatcacttgaaaagctggttaaagatcaaaactcctgagccctactcctggtgattgactcctaggtttggggtgggaccccagaatctgaatttcccggaagcgcccaggtgtttctgatgcgggtggtctgcaaaccacacttgcagcaaccctggcacaggtgcccagccttctggaataaagacaggaactaagcattaaaaatagcacgccattcatttgcttgtgccgagccgccaagtgccccctcctgcyggcgacaggtccggatgtgggccagttctcagcccagggaaaatgaacagtgtcttctccrtggtgcccagaacagtctgagtcagtggaatgtgctggccagtcaggcagaagggaacttccacttcttttttaaaaccttggtggaaactgtgctggcaaggcaaacagggaggagaggaagctccatgtggggcttgggcttggcggacgacttggggctggccggactttgggtggccgccgaggaccattgctaaatatgcccctttcgtcctgaaatagtcacttccccggctggcttttgtgttggtcggtcgccacaaatgtgtggctgttgttcaaggaggcctcctgggatataaaaagagagaatggggccaggctgcggccagggctgtgtaggaagacaggagagctgccttttctcctgtcccaccacggactcattgtaagattcagagggagtggcttctgggccctgggtttacttttccatctgtaaaatgggtggggggaaggggcagcatcataaagcttctttcttctcctgaaagggatgttttaaggcccatgtcaagattgaacacagggctctgttgttgggctgatgctactgatgaagtctcaggaagctcgaagtttgtagttaactctttcagggtagatgtggtgaatagtctcttggtattgtgttgatggtggcccactagaacagaaggtcccagagggcaagggcttggtctttcttcttcctctctgtatccccactgtttagaactgggctgggtgcagagtagtctccataaatgtttatggggccaatatctccaaatattggcacctactaagcgtcagtcccatctctcttttgtcttcttcacaggtttaacttgctgtttgagaagaggcgatatgaggagcagggcatttttggaggaagaaactttacctctgttttcaacgtttcatccagtttctcttctttttacttatttggagacatggtcttactttgttgtccaggctggaggctgaagtgcagtggcacaattatagctcactgcagcctcaaaacacctggcctcaagtgatcctcctgctttagcctcctgagtagctgggaccacaggcttacaccaccatacctggcaaattttttttttttttttttttggagaggcagagtcttgctccgttgtccaggctggagtgcagtggtgtagtcatggctcgctgcagcctctgtctcctgggcttaagccattctcctgcctcaccctttgagcctccttaattttttatttatttattttttttttgtagagacagggtctcattatgttgtccagcctgatatkgctatttttttttttttaatggcgatgtagtaatcttgctttgttgcccaggctgttctggaactcctggcttcaggtgtgtgccactgtgcctggcccagttgctctttacatggtggaatatcagaggttaaagacttggtaaaaattcatgcggtgcaataaaccatgtattacataataggggtgacacttgttaacttctcccaggctcagtttcctcatgtgtaaaataggtgaatagtatctaccctccaggagttgtacaaggctcatgtatacatagtgtatgtgaatgtgctgtatgggtgcaaggggttgcagaagtgataatgtgtgtaaacagatggtgtggttggctcattggaggggtggaggccctaagtgggatgacctctgaggtttactcttcctagagtagttggaaagcaattcagcctcagtggtaagctctcagctcttctagggcaggtccctcttccaccaccctgtgtctgcaagcattttggtattaagttgtttttctaaggctgggtgcggtggctcacgcctgtaatcccagcacttttggaggccgaggtgggtggatcacctgagatcaggagttcgagaccagcctgaccaacatggtgaaaccatatctctactaaaaataaaaaattagctgagcgtggtggtgtgcgcctgtaatcccagccagctacttgggaggctgaggctggagaatcgcttgaacccgggaggcgaaggttgcagtgagctgacatcatgtcattgcactccagcctgggcaacaagagtgaaactctgtctcaaataaaaaatattatttttctaaaaagctcttattttattgtgaaacacttaaattagcaaatctcaggcttgctgaataaggcttcccaggcaaaccacatcccacatgtgcaaatgtctggtgacacagtgcttcatttttttccactagtacttactactacctgacattatagtgtaagtttacttgtctatttgtgtatggtctgcctctcctatgagaatgtgagctgcatgaggtcaggacattgttttgttcactcatgaattcccagcacccaggacagtgtctggcatgtagtgagtacccagtaaatatttgtggaatgaatgaatgaatacttaagtgggtgggaagttcttggaccttagtctagacccatggttctcaaagagtggtcctgggactcttggggattcctgagatccttttagggatctgtgaggtctgtgaggtcaaagtatttttataataatagtaaactatttgtcctttcactctcattccctcatgtatgcaaatctcagtgaactgatattttccaaataaccaatgcataaggccacaaagccatgcagggtaaaaagagctatgaacaaaagttttctagagaagaatttggaggaaagagagtttattctagtgaacagatcgcaaactgggagatgctgcgttggtgtaaaatgaaggtgcattccagagagcaaagagagaatctagttttttgttgttgttgttgttttgttttttaaattttgagatggagtcttgctctgtttcccaggctggagtgcagtggagtggcgtgatcttggcttattgcaacctctgcctccgggttcaagcgattctcctgcttcagcatcccgagtagctgggactacaggcacttgccaccacgcccacacaccctactaatttttgtatttttagcagagacggggttttaccatgctggccaggcttgtctcgaactcctgacctcaagtgatctacccgcctcagcctcccaaagtgctgggattacaggcatggcagaatctaggtttttatagcaaaatttctggcccatgtccccaatcaggtttgattatgcaaatgaagggggcgggtcaaacttgcttagttctgattggctgacacagctgagttctgattggtgatacagctgagccctgattggttgatacagctgagctctgattggctgaagcagacgagctctgactgcttggttcatgtgagctctgaaagtcccaagtcaaaagggtgtggggttttgggaaactcggagtacgtagtgtgacctctagtcagcaaatggccacttggctgtattttaaatttaggtacactttgctgcttggggtccatcttgaggggattgcctttttyaggttcatgtttgttcacagagccattcaaagtgcagtggatacattataaattgtacaattatttgtaattaaaaaaagaacaacagcaaaaaacccaaagtgcartggatgcaaagaccaatggattttcatgtaacagaatatgaaaagttcaccgacacagtttcacattccacgatgcagagaagtttttaataactgccatccacatgttgagttttggtgtaacagcaaagaaaaatatccacaactactgaaaaggctgagaaaatactccctttctcaactgcatgtttttgtgtgagtccagaatttctttacattattgtaacagagtgaacgcagaagcaaatatgagaatccagctgtttcttactaagcagacattaaagagatttgcaaatatctaaaataatgctatctctctcacttttttttttttgtattggaaacatcattttccatacaatgtcatttatgttaacaggtgacagatttatttatttttattttttatttttttgaaacggagtttcactgtgtcacccagccacccaggctggagtgcaatggtacaatcttggctcactgcaamctccgcctcccgggttcaaaggattctcctgcctcagcctcctgagtagctgggattacaggcacccgccaccacacttggctaatttttgtatttttagtagagacggggtttcaccatgttggccaggctggtctcgaactcctgacctcaggtgatccacccgtctcagcctcccaaagtgctgggattgcgggctgggattgcgggcatgagccaccatgcycaacaacagatttattataagcaaaagctctttggggtcctcaataattttaagagcataaaggagaccaaaaagtttaagatgtgctggtcaagacagagccctgtggactatggaagggattgaagccattctgtggatcctataggcttcttttctaagcgaatgattagtgtttattcagtarccctatgtcaggtggtttctgtatgaatgagaggtttgcctttccagctgcggcggggctttgggcaagttgctgtctctgtgctccttcgtttgctcatgtgttaaaaactggcccaggggtctgggggtggggtggtaagaaaatgggttgagtctccttcatctctaacattttcatgtttaattcttggaacctccacttgttagctctgttcactcctctgaaagagattggtgagaattgaaacagtgaaagaagattttagagaaaaggtgacatgtaaagctgaacaagggttgcctgtgaggcaggcaaaaaggacatttattatatttaaaaaaaattttttttttgagacggagtctctgtcgcccaggctggagtgcagtggcatgatctcggctcattgcaacctctgcctcccggttcagcgattctcctgcctcagcttcccgagtagctgggattataggcacacaccaccatgcctggttgatttttgtagttttagtagagacggggtttcaccatgttgaccaggctggtctggaactcctggcctcaggtgatccactcgcttcggcctcccaaagtgttgggattacaggcgtgagccaccgtgcccagcccagaaaggacatttatatgtggggaccactgcatcttgcagatgggtaaactgaggtagcgacaggtgaaggctcagttacattcatcctgggtcccagactgtctccaacctgtagcctgaagctttgtttccttcctccctagcccaggatgacagcagtgaccttccatgggatcttttcctgggatttattgagccactgaggtcattggcctcaggccacctgcgtctctcgactgaccagttattcttcaaggaagacactgtgtgtgtgtgtgttttagttgctcttctataacttccgggtgctcttctcagagcagcagtgctttaaaaaatgtctgtgtgtgtatttccccactttgagccatgaaatatgttcagtctgttttttttctagtccaaagtatttccatatcattgtgcacctgaggaaatgcatactttgatagaaaatggacaaaaaagttgtattggtagaattaaatgaactaatgcatgtcaagcactgagcactttgactcaatagtamtaataataataataacacaatgtatcattatgatagtgttatatctctttagcaatcttgatagttgacttgtataattcacagtacagaagcttattctaaaactaaaatgctttggttctcctgtgtgccaggaacagcagtaaactttatgtcctaagattagtatggttggaaatgcatgtggcagtggttcccaaacactggtgtgyagatggaacacagcccgtgaagttttcagcggtccttgttaaaaagagataaaggaaagagataaaggataaagtgctgagattctcgtgaagctaaatgaagctaaataaacatccttcaatgagaatatgtccttcctatagtttttggaggaaaatatttccttttgtgagacaaaagtgttagtaggtggtaagtactttttatttagcatagtacaaagttgtggccctctgtcaacccttcacattttggtgtgtgtaatgtttgaaactgcattggtctgtaaaatcccaaacccaggtagataaaaccaagaagtgacagggctggaagggatcttaggaattagttcataaagaacttcaggctcagagaagrcatgtgagttgcctaaggtcacacagcaaatctgaagcaaatcagggctagaaacccatagacgatggtcatgagcactggttttgagtcatccatttgaacacacctgtgttcagattctacctctgttacttatgagctgatttcttacctgtgaaagtgggatacctacccaaggggttcacgggaggatttaataagatgatttggattaggaaaaactgacaaatttccccttccttcttctccctgccttcccctcacctgttaataaatagatccttgtgaaaggtcagtgagcagcatcagccagaagggctttgttttcagcaaggtccctgcatgtatgattacaatcctaagtaatatcagctgttgcttgcgttggtttctcagctctctcttggtgatctctctctttagctgttgaatgagttcaaagatctgggaagagctttgaaacccctctagcagcatttctgtctccagtcccagcacaggtctttggaggatgagataaaaagggttttgcccagggtcaaatgctgtgtacacgcttggtcactcttccctttcttgagatgacatgtccccttcttggagacccaagatgattgacaacaataacattcctttacaacrttttcttctcatctagagcactgggaggctgccttttaacagagatatcacagagtagcaagcatgcagacattctcatgacatcctggcagatatcaagaccaaagaacatcccatgttccctcttgaaggcttgtaataactgccataaattrtcttgtgggaatggagtggccctggcctaagctgtgctgtaccggactctcctggtgacagttttagtggctgcatatgtttgcagaagaaggaagcgtggtaacttggcaaacagctccaaacgctcctggcttgctgccacaggattgtccttgagacttgggcacagtgatgtgtgaaaaatgcccacctttgctcttggtgtccagtgggccttctatgggccctctatagaggtcatcacctggggattcctgactctggccaggtcctgaggtctttccatgttactctccatgttacttgagtaacataagagcttcttatggctcttatgttctgcaggacggatgaactaggtacccaggacaggtctgtttgtgcacaaggctgtctccttctccccctccttggtttytctactgaggctttgttgtgcttggctcagggtgatgttagcaaatgcactctccaccctgctgtgccacattaaggaaacgcatgttgtattggcttctgccaagtcagctcacatgctttgttttagtgactctgtgaagagctcatcatctattatttattcaggtaacacacttctatctcctaatttcggtgctactcccatttttcatccccggttagcgtgctgtgcggccaggagggctgcctgttgtctttaagaaccactttgaacatttttgctttggttatttattcataccaacatgttgttgttaaatgacgtgaaataaaaccccattttaaaaagaaattgtaaaaggaagctatgtcctgtgtggaaatcatgacaagcccagaaacatgttacaaaaacattaaccaggagcggtggctcacgcctataatcccagaactttgggaggccaaggtgggcagatcacttgagaccaagagtttgagactagcccggggaacatggtgaagcccatctcaactaaaaatacgaaaactatccaggcataatggtgcaggcctgtgattccagctactcaggaggctgaggcaggaaaattgcttgaacccgggaggcagaggttacagtgagccgatattgtgccactgtactctagcctgggcaacggagcgagactccatctcaaaaaaaaaaaaaaaacaaaaaaaccccacacacaacaaaaaataaatattgcctgtacctatcacctgaggagcccattgttaatggttgtgtgtctttttagtcttttaaaaaatgtgttaaaaaatgtagttgtcataatgtccgtatataaatttttaagtggagttgatagatttcatttgaagggctgctgtgtcataaatgtaaaatgcttagcaaggtgcttggcacctggagctgttcacagtaaatggaaggaatttttatggagggtgtaaggtagagtgggctcctgagccagactgccctgttccaggcctggctctgctatatctggctgctagagcctcgagccagccattgaagtgcagtgccttcatttccccacctgtaaaatgggggtaattatcatataccccaaagtgctgtcataaggatttaatgaaatatcccatgtaagatccttagagcactgctgccggatggtcatctcatagtaggtattggttgttattattcaggaaaatgttggaaaacacatttttaaacaaagctggtgttcagtcccctccctccccccaaccaaggaaactctctttaattcccagtctgctgtgattcagtgctggcctgggagcagccctcgagggcagacacagcacttgtcccctacccagcacagcacctgcctgtgcatccttagctgatgaatgaggctcacagccccaggcgccctgcatccttcccttctttctggtaccctcttttgtctcctccaaacacttgctactcaggcttcagggaggaagtaggaagtaggaggtggtttctccctcccagacccccagctcacactggtcttgaagggcgtggcatctgacagagcccggtggctggttttcacgtgtctcctgaagccacccctaaggagaaggcttcgatgtcatcttctggtcagagccgagcacagtggtcctcttcagagacagatccrtgcagcaggatggcacctctgttgtcctcccagactagcagtaggtacacgtgggcttcgcaggctgttttctgccctggaatgctgctgttttttagacccagcatacctcagtgtcagagaaggctggtttgtttgaaacggtcagaatgtcataaataccttatgat[450 bp omitted]cgaggaggaaggcggggcaatgttaggagcctctgtgccttggagctgcaggcgagttgtctggtcttgggtgattcccttcctatgtttgcatctcaattttccctcttgtaaaatggagctgagagcatcccttatatcacaggaatgtcattaggattacttaaggtgttggaatgtttcctggcctaggggaagagctcagtagaagcttgctattgccctaatatcattactatcccagatatgcattttcttgttatttccctgttaggcgttaagtgtgtgaaagtgtgtgtgtatatttaaaaggtcaaagtaaaattctttagaaccttagggcaggatagctcttgtttagttaggggtgtttggtgactgctggagaagtcacctacccagctgatcttacaattactgtctgcttaaaggcagctcttgacttggccttctctaggggaaaaacatgtagtttatgcaacttttcttttccctttctgctctggatttgaccttttgttccttcaggtgattgaaaaaattcgraaagtcacctgtttcctcagaattgctttaagacaagactaagtgaaccaacaagaatgaagtcagctttttggaaatacctcccaagaggccttgctctttatgcaggactgttatttcaaaggatggtgtcccctccccaaccataagaacgatccaaacctgttttctggggcccagagtttgctgaggataggmctgggctgaagctttcattgctggtctgtggggtagaggtaagcctcccctgtgaagctggtaggttacatgctttggcaacatgaattgttatttctggagtcccctgggtgctgtttagaaatgcaggtaggtggctgggtgcggtggctcatgcctgtaatcccagcattttgggaggccaaggcaggcagattacttgagctcaggagttcgagaccagcctgggcaatatagtgaaaccccaactctacaaaaatacaaaaattagccagggatggtggtgcatgcctgtaatcccagctactcagtaggctgaggcaaaagaattgcttgaacctgggaggcgggggttgcagtgagccgacatcgcgccactgcactccagcctgggccacagagcaagatttcatctcaaaaaaaaaaaaaaaaaaaaaaagaaaaagaawaaaagaaatgcaggtaggtgcttctagctactgctgtgggatagcaaggtagttaccaaactgataagggtagcatcttacttactgctgaaaaattcagtgtcttttttctttttttttgagacagagtcttgctctgttgcccaggctggagtgcagtggcgagatcttggctcactgcaacttctgcctcttgggctcaagatattctcttgcttcagcctcccaaggagctgggattataggcactcgctaccacacccggctaatttttgtatttttagtagagacagggtttcaccatgttggctaggctggtctcaaactcctgacctcaggtgatccacccacctcagcctcccaaagtgctgggattacaggcgtgaactactgcgccgggcttgagtttgactttttgaaaatattccacctataagtgaagttgtgcagtgtttgtctttatgtgtttagcatatttcactcagcataatgtcctccaggctctgatgggcacttggcttgtttccatgtcttggctattgtgaatagtgccgcaatgaacatgggcaaattgccgtgttgagttaaggaagctcttttccagtctgagtttgcaaatagcttttcatatatgagcgttgaatattatcaaatgcttttctgcattcactgagatgactttatgtatttaaaaaaatctgatggcctatattttctatttctaaactactcgtgtattcctggtataaatcaactcagtgtgttactctcgtttttatacatagctggattcgttttcactaatattttgtttgagatttttgcctcagtgatcatgtatgtgattgctctgtaacttttcattcacattttgtccttgtctgtcctggtatcaaagttatattggcttcatagaatgagggaaatgtttatccttctaaaaatatttagtagagtggtctaagatgagagtgtaagtgagtaaactttctcaatcaaatattttgtgatatgtttcaggaatttcattacatgtttggttcaatttttaaagcatttctttttattatttaaaacttttagcattggtgaccatccatgtgctgcttttattgccagcttaacttgtttttatgacatcttcaggaagaaaacctctgctgtctatttaatggagatgaattgttaaacttttaccatttgcaactayacgtctctatgagtcagacttttattgatcgtgtacaactaaatgaaacccggaaatgaaggaaatgtaacaagcgattttatgtattttttgtttgctcaaattgcctttataaaatagattgatactctataataagcaaatgttgtgaatttggaattttcaaattgaggcttactaataatgttawctattttatccgagtttatttgggtttcttataaaatgtaatttctcaagaagattttgctgccctaaaaaaaaaaaaaagaaaaagaaaaagacaaaaagggaagccactggttgctaatggctcctgcggctctgacgatcctcgatgaagtgttctttgattaagtgtcaagatgagtggtgcagacctttgacagacacatgattgtggttggagaaagcccagcattaactgctgaccttgccatctgtgagcaggtgttgaatgagctcagttccctcccagcccttctttttccctggtgggtcattggctcctgagtargatagatgcatgcaatagaagagctgttaatagcatttactctttcttaatccttattaatcccattcatatttcagtgtctgaaacttggcaggatgtcaagaagccacagtgcaagtagggaaattgaacagcaaggaccaagtacaatgttcccctgatatttaatttgctaaaacatgtaagaagaagaaagttcttacattgttaggtcccaaagagagtgccacyaagcaaccttgccaaaaccaccttgctggagcttcttattatctttttttagcgaatggcaataaagtcattttgtcaagctaaccaagtaccataatgagatctttgtggcataaattaaccgagtggggaaataactttgacaggggttgatgtccgaaatgaagtgttgtttgtctgatgtcaagcctgtggggaatttgaaccttgcactctttcctgataagacattaacctctgcatgggcttgctggcccaaccttttgattaactggacctattttcttgtagatctaatacaaggatttggagaaccccagtaaaatgctggagggacttagactctgatctctattgggatgtgtcaaattggagatttggtgggcttttctgccgtgtttactgcgatgggtgtgtgtatttgaagtctgtatgtggcctttaaggatgtgtttggggcgcagaagttctgggtaacagagaggctctcaaacgttagattttggattagactttgggtcaacttcagggtagcaagaggatggatacccgagaacatgttttctccgacttcctggcccctgtcttctaagttctgggtagtgatgggtctttggaggggcagccctttctgccatgtgaatctttgcccagccctgagggggtgagggctggccaagggagccgggccatggtcggagagaaggctgaggctccttgagaagcatttggagtttgagtcagttgtgtcttttaaaaaaattacccattttggacttgcctgtggaagcaattagagagatcacaggaccgtttctgattcccaattctgtccagtgtctattcagaaaaatagaaaacagtcaactggaacaggggattatttgagcacacacagagtcctgttgtctcagcagcgtgccctcagacaatttgccttttagtgaagtttaagcccatgaaaggaaataaaaagtgttttattagatggcaaagaaagatggactggacttatgagactttgagaatttttgctttttctttgttaatgcaaactttggaagagagcaactctttctgtaatgcaatttatttgtacaatgtggtagttattgttaatagctaataatgatcttcaactgggtaaaataccattgtgtgtttgagagggagagagagagagaagggtaggaggagagggagaatatcttttgttcaaagccaaatgttgctacttctgaagacgagtgcaccttatgggtatagccagctataatgtttatcaaacatatactttttttttttttttttgagatggagtttttgctctgtcacccaggctggagtgcagtggcatgatctcagctcactgcaacctccacctcccaggttcaagtgatttctcctgcctcagcctccctcgtagctgggattgcaggtgcacgccaccacacccagctaatttttgtatttttagtagagacagggttttgccatgttggccaggctggtcttgaactcctgacctcaggtgatccacccacctcggcctctgaaagtgctgggattataggcatgagccaccatgccctgcctcaagcatctattttgtgcaagagcttgcagaagttctttcctgcyacagccgtggttggccacattgctcccccatgaatatgtggaaactgacacttcaggagaattggtggctcacccatggcattcagctagtgggttatggggcagagactcaaactcagccctgactcccacagcattgttctttttctgtaaattgctgacttactcagttgatcacagttcattgccgtttacagaatttgtctgcacccattgtgccttttaagtgtcgattttctttcctgaaagcacacaaagcaaagcacggctctgcagtgtgacccaccgtgtgctgtgtggacagatgatgctggtcagcaggcaggaaaacgatctgcyaggcgctgggggtggggcagaggattgttcttcctgaccttggtatgaaaaccgtrtggagttcttagtgaggaaaatcactcttagcccaaattcctgcgaaggccgatgggattgtttttaagatttgttggattgctggatttgttgaagggagaactggaagaagctatcagaagtttacagggcatcggagggagacactccctttggccactttctccgccaaaactatcctggttttagcccaacagtttcccacgcccgcccccacccccacaaccttgtttgtttaaagaccattaaagaacgtcttcaatttattctggattgagttttcctcaaaccaaaccacccctcagttcaccccccagagctgttsaggcccttcctgggggcttgtggctgtggctgcctcagatcagagcagaccctgggctgcatcatccttccacattgtctctctaaagtacctgaagccagtagttctcaaactttggagagggttttgagtcacctcgagagctgataagaacagaggcccagattgaagttgaatagtgctgggcctttgtttttaccaagttccctggatggttctgctacctcctagcctgtgagaactactcctttgtgatttcttgccattgaaattttttctcaccttcttcttggcttgagtgctcttctgggttccttccggctgtccaaatcaaatttaattttcacacccagaccttgtccctgctctcatccttcagcccaccctcctgttccccattcagcyagaccccctgccagtcagttcaagtgctaggcatggggtatcgagtctcaggccggtccacagacattccagcacctggtggtaagaggtgagtgctgcgtggacccactgaggaaggctctggctgtgctgggggaggggagtttatgctcrtcctcatagaaggataagcaggaattaagtgggcaaaggagggagtgaggaagctctcactttctaggtagtaggaccagcatgaaccaaggtaggggatgacaacatggctcattcagggaatttgaggtatgttgatacatggaaaaatgtacctgaaatgtgagtcctgcttttgtgactcaccctttcctttacataagcattgatttacatctgttgttttttaagatagkgtgtatgttgaaaagttcagaacaagatcaagtggagacataaaatggtaagatgtgaaaagttgttcttgccagattaaatggttccacctgaagaaaattttttttttttttgagatggagtctcactttgttgcatgggctggagtgtagtggcgtgatctcagctcactgcaacctccgcctcccgggttcaagcaattctcctgcctcagcctcccgagtagctgggactacaggtatacactgccaagcccggctaagtttttgtattttagtagagacggggtttcaccgtgttgccccaggctagtctcaaactcctgagctcaggcaatccccagcctcagccccccaaagtgctaggattacaggcatgagccaccgcacccggcctgaatttttttttgttttgtttatttatttcttggttttgctggcctttaagcaacccaagactagggggctttcactccgtccttagagagctcaaagggcctgacttaggggacacagtcagtgaaggggatgaatgaatgagtttcagatccaggtgttctggataagtcactttacctttctgggcctttttcctcaactccaaacagaggatgtcggtatagacaatccctaggatcttgtcccctttatgactgatcacacagttccactgcttgcccttgaggctttggtgtccrcgcatgcctattcagtctgacccacaagaggccaggccagctctgttccaggysctgaaaatcccattaaaactccactcactagcctgttccctgggggtgctgaatcagcatttaatggggaaggccacgagctaggctctggtgggtaggaagtgtgtgacttctcttacctcaacagtttctactgtaactagcgggataaggtaaatctatggaaatgcaaggcttatgccgaggctcacagagtgggccaggctgcataagtcctggacaccacagggcctgctttgagaaggcagctgtggtcccacagccttgaccaccaggcaccatcctctgttgccagtggacccacatttcaaatcattttatctcttaaataacctgtattcatttgttccttcccatgtcttatccaccaaaaatctccaattggaaattcagacaaggattgagaccctgtgttcttaaattgggttgattgaaatctagaaacaatgatagtaataacagagttatcttctctcgaacatctgcctcctgcctgatgttatttcgcttaattctctcaagggcttgaggagagtcctgccataatccttcctttcagaggggaagatcgaaatttagctcagatctcaagctagtaatcatcagaaccaggatatagaatcaggactagaccacatggtccctgctctgagctgctgcgggtccatccctgtggctctgtccagggtaaatggatgattcaggggaagggtcagcaaactatagcccatgggccaaatgcagccactgcttgtttttgggtggcccaagagccaagaatagtttccacatttttaaatgggtggagaaaacaaaatctacaaagaataatgtttcatgacacatgaaaattatgtaaaatatacatttaacgcttgtaartaaagttctgttggaactcagctacagtcgttagtttacatatcatcgatggctggtttcgcagtacaagggcacagtttaaagcctgccaggcctaaaatgtttactgtctggcctattacagaagacgtttgctgacccctgatttagggcattcatgaggcttgatgagatgttgaaaatcagctgtctcctcccgycactctcttctgattgtgggtaggctctggtgcaccagctctccagtgatctcctatctgatgctcagagttctttttccattgcatggatgtcaaataaaagtgtctgctttgtggcatttctggcttgagagtacctgcccaatgtgatttgccaaggtgccattttatcaaaagtcttaggatgactggatgggtttgccttgaatttgttttgcctttgctgatggttgtatttaggttatcattgaaagaggattgcagaacagcggcagtttcctgtgctgtctggattgaagttgaataatgccctaacttttaattgaaagggactgttgtaggcgggagactgtctaagagctgacctgtcaccaccacctgagatgtctgagcccacccttggactttcttggcacgtggggaagagggggcctgggtcctgggctcccacctaaactcagcagaccccactggcaggtgtgtgttgtgggggtgatggaggctttttggagggcattgagctccttgggtggaggtggggtggctgccttgggggctcagtgcagctctggccatgatggacagaaggagacaagaatgtagcttcttgttctgagaacttcagcccaagttcctcctttcatgcagcagaatccaagacactgacttgcccctctctgctgttgaggcttctgtgttgcagagataccttctggccctgctttatcctagtgaggcagctcacctctcccgtgtttcactgctcgaactctccttcccaaggctgtgctagtggtagtgatgacaataatagctactatttattgtgtgcccctcgtatgctaagtgcttcacgtagattatataatttaatacttgtcacaacagtcttatgaggtaaatactgtatatatatttaaaaagactatttttagagcagttttaggttcacagcaaaatgtagaggaagtttcacagagatatcccaagcaccccttgccattttctcttagttatgaaaatgatcaaatgggctgggtgtggtcccagcactttgggaggccaaggcgggtggatcaccggaggtcaggagtttgagaccagcctagccaacatggtgaaaccctgtctctactaaatacaaaaaattagctgggtgtagtggcacatgcctataatcccagctatttgggaggctgaggcaggagaattgtttgaacctgggaggtggaggttgcagtgagccgagattgcgccattgcactacagcctaggcaacaagagcaaaactctgtctcaaaaagaaaaaaaaaaaaaaaaagatcaaatagacttccaagtgcccatgtctcaggttcagtactgatcagcattttaccctcctttgcttcagctccctcctgtcattgctcattgctgagagtgggtaaggggctttctcaggttcctgtagctggtaggatcccgctgtcctcaaagttcctgcactcagtggctgacggtgccaggtgactcccccttttggggtccatgacatttgctgctgtttctaaagcccctactgtgtgctgctaatcccctcaccaagcttgcagagcggatggtaactgacaggtgaaaaaatgcaagaagttaggtcacgggtccggggacatcctgctaataggtggtggtgccaggcttcaaactcaggcctgacttcaagtcccgcagcttctctgccccaccctgtctctgtcctcctcacctctgtagtgtggtgggactcggtggggtggtcgtttgactgtgggaacttctgtttgcaaagccttggaaggacccaggtgactgcagatagttccgtgagaagcatctgggactgttgacctcactgctgatcttccttgtgagcctgtgatagggctaacccttggctttctggccagagtgtagacagagacccgattagcattttgtggtcagtcagaggcagtttgtgaacctggaacttggaagctggtttcctcctctgggagggatgtggagcctggggagccaggaaggcatggactgaatatacacccagctgggcagtggggaagggaggattccgtggggagctagccctgaacacagcaagcatttggtaaatggtgcctgttagctgtttttatccgtattctaaggtggacgagcggcgcaggagagaactggtaggattaatggagtggtttcattattcagatttaagtgcatgcagccagaagtcttcaactgaagaattgaaactctctgctcttttttgggggtcatggtggcagtgtgaggggctggttcatgagtgaggagaaaaggtagtggcaggcagaatggtacattttatattcatattgtgcacattattcacacctgacatgggccagaaatcctctcctaagagagacacttggaaagtaaacagtttgttaatcatttcaacccgtggactttggttgcagggtgcattttgatcaagggttacaaacaccaatgtcttcagggacatttggggacataaataaagggaatggacaaaaagatggaaaagcatactgcctctcagtctttcgcatgctcatgtttgatagagaaaatcaacatcgtgggggcagtgttgcttggcaactgccatttgtcctcagcgttggggtgacattactagggaatggctgtgaactccaagcacttccccccgggaagcgaggctgacactcagatccaattcatgtctttaatgtggccaaatgagaaagccagatgtatttctgagaagccaaaaaacaagatttaaaaaatgctatctccctaatttttttttttgagacagagttttgctcttgttgcccaggctggaggacagtggtgcgatcttggctcactgcaacctctgcctcccaggttcaagcgattctcctgcgtcagcctcccgagtagctaggattacaggccaccatgcccagctaatttttgtatatatatttttttcagtagagacggggtttcaccatgttacaggccaggctggtcttgaactcccttgaactcaggtgatccacctgcctcagcctctaaaagtgctgggattacaagtgtgagccactgcacctggcttctatctccctaatttttaaatacttaagattttaagaaacatcacaggtcaagcaatgcatggcagtgggctagattcagacaggggagcctcaatttaggacccccagatttatcatacaaggtggaggaagggttcagatagggacttggggattgccaactctgaccctctcttcagatgaagagattagccctgtggaggagtccaggatttgtattttagtcttggtactgggtgttctgggttgagttgctagaccattctgggacaagttgctagaccattctgggacttactttcttcctccataaagtcaaagggtaggtagatcacacatttttaaagtgtgctccttgaggtgtgtcaggggttccataagcatttgctttcagttttattaaaagcagcctgtactctcaaatttgagtatatttgaaattgtaatgagagcagttgctcaggatggagtgtggtggctcatgcctgccccacactttggaaacctgaggtggaggaaaccttcaggccaggagtttgagaccagccagggaagtatagggagaccccatttctacaaaaaacaaaaatattagctgggtatagtgggacacatgtgtagtttgaactactcggaaggctgaggctgggggatcgcttgagcccaggagtttaaggctgcagtgagctatgattgtgccattgtactctggcctgggccacagagtgagatcctgtctcaaaaaaacaaaaaacaaaacaaaaacaaattaaaaaacaaaacaaaccaaaaaaaccaaccaacacatttgcccaaatagtgaatcacatcaaattttaaaattcgctggaaactatctgcttcttaatttgattatacatcaattatgttcaaagtaaaaaacaaggtaatttgaaacagctgcttttatccaggtgtatacacggtgtatacatacacagatatgtatgaaatgtggaactctatacccgtatgtatggagttcctcmtaagagtctttttgagaaaatagttccattgctaaaaatacccaatggaaacttctggcctgggatttccaagttcaccctcggctgtgcrtctcaaagtccacacagcctcaccaaaatagcccttctgggtacttttttctgtgtgttcttggaggaggccatcgtgcctccagctccctaaggcggaagatgagccagcggggatctttgcagggtggttggttctcgttccttccaccgaagccttccatggcatttttgggacctggaattgtgaattattctgcctcttccccacagtccctgatgacagcatgaagttcagagagtttatttgcagatgaggcagggaagccggcctgttctcatcttgctgtgcctgatgccttgtgcttggggcactgttcactgtgctgcctgctggcctgcttgtctctgccttttggaygggagataggccaccccacagtgccacacctgccttcagggaagcttttgggtgttccttgtctggcttctgggttcagtgggagggcccacccagcctgtcattttaatgatttaccttagaggagccagttttatagggagttgttggataatcttcacaaggcagataaatgggagagcaggaagaatgatggcctttcagagttgaaatctgtgctgctccaaatcccataaactgctatttgattttaaacattgcttgaagcggttcacattttggttaattacgtcagtgggtaaaaataactattgtcatatggtgtgtgggcttggctttagaaggataaagagtctattgttacccattgtgctattcagtcacttattacccatccttaaaagcccaacgtggataacagaaaacctggagagctttgtcacttgctgaaatccaagctgccctgtgaatttatccccaaacactgctccttttgagaaacttgtacaagctgccttaattyagtcaattcaaatgggttgatgggggctgttcccaaggcccaggacaggcaggggtttgtgacctgcagccctggaactgcctttgggtttcatggtctcagttgagacctgcccagggttgaaccagcttagtgctccctgggggtggttaagttcaaggacttcagggtccgattgaccttgggctgaatcttgacctggggctgtaagatgctcggtcaggaccttaacttttccaaggctcggtgtctacatctggaaaatggggataaacacagttcctccctgctgggattattgtaaggcttgaatgagatgataaatacaacatctgacttgcgactggacggtagcaaagggtttagttaatattataataagtagaatggaacagcattagattctcacacagggtcactatgttgttttctcccattctacccctgcatattaccctgaagcacccccaagcctctccctccccatccctcaagcccctccctccccatcccccaagctcaccaggtcctggcgcacccagatctttcactgcttttcttgcctgtgagctcttggggagtcaggaccaccttaagcaccctctgcatctttggcacctaacctggggcctggggccctgcagggccacaattagcagcatggacaacagcatggacggagagggtctcagagcctggagagctcctaggggctggagcagtcacaggaagtcaccaagtgaattgaagggtggtggctttggaggttcagtgaggcaagaagaaggctgttaggctgggaattaaggaaccttgtgttgttcgagtctcaggacaactcagatatggggtctgtattgcaaatgcccctgcgtcattttacaactgatgaaaacaatggctccacgagaccctcaagtgccagagctcatgagtgacagtggaagttgaactaaccttttaaccaccctagtccacacctgtcaggctgacgggctttcagtggtgatgtgttgggagctctgtgccgcagatctctgtgtgctcctgagactctgcccgcctgtctctaccctgctgtgcccactaggaggaggctgacctttatgttctacaccagtgggtgcccttggtctccagcttccagtgggccagtctggcgagagaccctagctggagatgaggggaggtagccttggcctctctccttgcccttcctcrctgctgctaccccaggattcttgcccatcccttactggttttccttaaccccaccctcacccttgaaaacagactctttaaaactctcctcactcaccctcattgagtgtgtcatctgctccagctaggatattggctaataccgcatgtttcagaaagaaaaattcgcagttctatttatttttttactgtggattgaagggagaggcaaccaggtatatggatgaaggagtagggcctggctgtcaccactggtgttcacaaaaggctcccgtttaagtcctcttatattccaaatgaggggttataggtcgagtcagggcgttgctctaacagaagcaaaaccaaaaatacacggccgtagatacaaccctgttctggtacttcctaattttgtgtgtacatgtgtgcacctggagcttcaagaaatgaaaatggaaatggcctgagtgtttctcagccctaggatgaggctgtttctgtgatttagggctggaggttatgaagacttggtttacaatatgcacagtacagaagcggggaagtcaaggtgtgctgggcaaggaaacatctttatgtgacccacaaagagtgaagcagagggaagaaccagaagttattctggtttgcagactgggagacaggtttaatgacacagtcatgtcagagagaggggaagaggagaatacgtagggggtctgttttgatgtgtawgtacatgtaggattttcatgtagaggagttggggaaaattttagaagttttaggtgtaaatgcagctggtaagatccttatgacttagtttctttyttttcttcttttcttttctttctttctttctttyttyttttttttttttttttaagacagagtctcactctgttgcccaggctggagtgcagtggcgcgatctcagctcactgcaacctccgtctccccagttcaagcaattctcctgcctcagcctcccagagtgctgggattacaggtgcatgcaaccacacctggctaatttttgtatttttagtagagttggggtttcaccatgttggccaggctggtctggaactcctgacctcaggtgatccacctgccttggcctcacaaagtgctgggattacaagtgtgagccactgctcccggccttagtttttgagtgggaagaatctagtgttcagagtggaccactgatgtcatagctgcaggtttggctgaattgggatggtgcagaaagccgtgttaaccatttctttttctctgaggcctggaggaggakccttgtgactggaaccacagttgggactggcagtggtttttcctgctggcaaggaaaaaaaaaaagagaaaagaaagagttcgacttatcagcacaaagaaaggaggatgtgaaactagaaccatctctagggcagttctagcaatgaacaaggctggaaggctcaccggcgaggggtttcccctcaggaaaggggacagagaagcttccacctcctgggtagcattgggtgttcctgggcacatctgggtgactaacgggttttctgccacacaactggggtatatagggaagtctttggccagaactgtgggccgtactgcattcttcccgtgtctgtcactgctgagtcgtgagcttgatctcttttcttagtgtttgctccttttgtccagctatgggggccagcagaagctttgggtcatctgtaccagtgactttgctgtgaagatgtaagggagagtggttgaggtcaagatctgggttctggttcttgtgcctcctctctggctgtgtgtccttcaacaagctgcttactgtctctgggcctcygtgccctctgcaactgggttgttggtctatttaaatacttggagaaaaaagctgggcatggtggctcatgcctgtaatcccagcactttgggaagccaaggtgggaggattgcttgagcccaggagcttctgaccaatctgggcaacaaagtgagatgctgtccccatacagaaataaaaaaattagctgggcatggtggtgcatgcctgtagtcccagctacttgggaggcttaggtgagaggatcgcttgagcatgtgggatcaaggatgcagtgagctgtgattgcaccactgcactccagcctgtgacagagtgagaccttgtctcttaagaaaaaagttattcaaaaaatactttggaaaacaatgctggggagagtatgagcttcagattgcacattggtttctatcaggaggatctgagcctcggtggtgttacctgtaaaatggggataaaaatacctcacagggttgcagtgaagatgtaaggatgatgatgatgacaacagcagctcaaatagatcatttaacttaattctcgccaaagcaaggcagrtacaaagatcatcctgttggcagatacagacagggagggacagagaggttaattaagcaagctacctgcccgcagttacatggccagmagcagtggcactgaacgacttccttcaggcggtctgagtccaggtctcagctcttagccatcactccatggttctgtgctgagacaagggatgtagaaagcccagcacagtgtctgttacatagtaggtgcttagtaagttagacttcctttttatcctcagaatgcgtttgcaagtatagcctcccacagtgcttttactttaatctttccccttactgggcaaaaaaatgtttgctgccctgtgcgacttgcctagctattgacttctcttttttctgcctctctcctatgatccatcctagactgtggattgaggctcagcctagattaaagggcaggggctggaggaggaagatgagctgaaaaagggtaggcctgaggcgcgaaggagttgatggtagggtggaaggtgggaatgggaagtttgagaattggaggacctgggggcaagactttccccctctgggctcgttctttccttcctgtgccgtttattgagtgcctactgggtccaccattctaggcatggggcacagacaagatctctgttctcatggagcacacagtgtggttggaggagtcagtgatggacagagagtgaggggtgttggtttccatggctgctcggagaaggacttgctgaggaggtggcgttttgggcaggccatgaaaaggtctgggcagagtgtgtttgtgggagggaataaatatgtaaaggctctaggggagaatcagtttcgagaatgtgagggggcagtgagaccagaggggctagtgggctgtggctgagtttgaattttattctaagtgtcatggaaagtaggaggacggttttttccaccagggtcctttttgattattttattcttcgtgacgatcctacttaaaaaaaaaaatcttattcaccaaaaaggtgtgtttgtgaaacaatagagtgtacaaccttgaatcactttagatttttaaagtatagggaaacaattatggatcacaatgaatatccttgagggctgctcccctccccagctgacactgtcagctaaacctttaaggcctcttgtgtgtcaagcattaattcttcccaaagctgcttgacatgtgattaaaaatttttactgccacctactgatggaaagaagaagatgaatttttgtacaatgaaaatcccaaacacagtggatttctggtttccactgtgctgtcaggactgggaaatgggtctggggaaggggtgtgctgggcttggtatcccccccacccaaccccctttttttggccctgacaatctggtctctgcttctgtgtccttctgcttcagctcatcgcacagtgggtggagggaggtgctgacctggggagttgctccggggagagggctggaggtggggggatgtgtctggggagaaacactgggcactgggagtcagcagccgccagcccccacataacccagttaatcctttgtaattgaccccgaggttgcaatgattccctgtgtttaatgtcccaagacggcctaaccctgaccagcagacctttgcttaatgtgcttcttaccaccccacccccattattaaatcctcaactgctttatttctgatttgcattttccatggctgaatgaatctgctgacttccgttttctttttctgtttcagatcytgtgcgcaggtggcagtgagtacccttttcctctctattcttgtgttgttcgctactgccccctaatggacacacagcaacattaacagcaatgtgaaatgctaatttattaaaacctgctcggtttccaatttttctttttctttttcttttctttttttttgagttggagcctcgctctgtagcccaggctggagtgcagtggtgccatctcggctcactgcaacctccgcctcccgggttcaagtgattctcctgcctcagcctagcaagtagctgggattacaggcacgtgccaccatgtccggctaattttttgtatttttagtagagacggggcttccccatgttggtcttgaactcctgacctcaggtgatccgcccgccttggcctcccaaagcgctgggattacaggcgcgagccaccacgcccggccccaatttttctttagaagtaggagtgagggtggaaacaacaaatgaaagaaaaaattttaattaattgtgcaatcatgatgaaaatttatattttctgtaatttttttctagcctcatctgtgggcgatttaacttagttgaaattrtaatacattatttgtatattgtttatgtgctgttatcctttaagtattttcttgtgttgctacattgcccttttgttgctacattgctacatttaaagaatggggtggaagatcgtcataacctttggaaaatgagacctggactcccgcatgttttgctttcatgcacagggctgagtcccaactgctgacagtgctggttcattccctggtaataaaatgagaaaaataaggatatgactagaagttttttaaggaagcttaaatatattcagttgaaagcaccatccatccctggattatgtccttactaattttttggtcataaaacatttctataagaattgaaggccgggcctggtggctcatgcctgtaatcccagcactttgggaggctgaggcaggtggatcacctgaattcaggagttcgagaccagcttggccaacatggtgaaacaccatctgtactaaaaataccaaaaaaattagccaggtgtggtggcatgcacctgtaatcccagctacttgggaggytgaggcaggagaatcgcttgagcctgagaggtggaggctgcagtgagccgagatcactccattgcactccagcctgggcaacaagagtgaaactccatctcaaaaaaaaaaaaaaaaaaaaaaattaaaaataatagtagttggtagtttttaaaaaaatgtaccttttaggaaaaaaaaaaaaaccatggtttttgtttctccccaaaatttgggaactttttttttcctgattggtaaaatctcagtttgtgagataaaataattagattgtactcatggaagcatatatgggcagatcttgctgaaatcttctaataaagcaaatctcaattaataatggtaattagagcctgtgcaaacaatgggaagagtactgccgttggtttttcttcctgttaattagtttaataaataaactggtgggtaccttgtacaggcttgaatcactgctgcagaagaacacttctattcaaacatctaccgtaggtagtagaattgcgggaaacagaaatcatgagctattttaactgaaaggatttaccctgggaagtgagagtttacagagtcattggaagggccgctgtattagtttgccagggctgctgtaataagatcaaggtcttgggggttaggacttcaacatatgaatttgggggtggcrgagcacaagtcagctcataacagctggggaggaggctttaggcctggccctgagaaattactcccagactaaggctgcagaactgaccccctagagagtcaccaccttggtcatagacagcaagcagaragggaggaatcaggaagtccctgctgtagttgctggatccagcggtgaatgttctgagctgtgatcctgggatcaggaagctgcagccactgccacagtgttggttctagagccaggcagcatgagatccagtcatcgcatccacactacagctataagaaggaggaagggcagaaggttgtgctccaccctttaaggacacttgctagaagtcagacagaacgtctggtcacactctgtttgacagaagttagtcacatgcaacatctagctgcatgggaggctgggaaatgtggtctttgttcccaacagctatgcatatacagggccaaaaatctccaggagtatgatgaagggaaaatgggggaatggagtttgggggtcaagagtggtctctgctgcacctccctgaacagagactctaggagactagtaatgaattcaagataaagcagccagtgtggccaaggttctccttcagtgcctgagctcttggccataggagctcacgcctcctctcctttcctgtgaatgactgtgtgcagtgtaagcatggagcttctgcactctcgtggccaggtactctccatgtggccagaaatggcagtttctgaggggctcatgttgtaggtgatgatacaaagaagagaaagagagggatcagtttttccaagtgtgsatttcatttcagtgtaaatattktgtgaggtggggcatccctgtctcctggagaartatatttttaatctaattgtttactttctttgcatagcccctagtccaattcctgacccttcagtagcaactgttgccacaggggaaaatggcataacgcagatcagcagtacagcagaatcctttcataaacagaatggaactggaacacctcaggtggaaacaaacaccagtgaggatggtgaaagctctggagccaacgatagtttaagaacacctgaacaaggatctaatgggactgatggggcatctcaaaaaactcccagtagcactggtaagcataggcttttctgccagtcatgtttcttaaaggaaatcggtagaatttataaatgtcatgttttccaaatactgttcttcttttaattacctaagaaaatcttttwaaaaatttttataaagatagtaatgcatattcattatataaaacatagacaagaaaagaataacaagtaaatcattaactggagataaccattgatcacttgatatacgagttttataattttaagatatatgcatgcctgtgtgcatatgtatatacatatatatgttttattttgttttacaaatatcaaggtcatcctttacatgtagcttctcaccaatatattacaaatattcttccctgttagtatatacatttctacaggacagttttaatacctgcctggcattctattttctaaatcagggttggcagataataatggtccttgggccaaatatagatcactttctgtttttgtaagtaaagttttattgagtctgcctatggctgctttcatgctagaattgagtagtggcaatggagaatttgtggcttgtaaagcctgaaatatttattctgtggcccttacagaaaaacattgctgatacctgggttagataattgattctaaaactgtggttcagagatctctaggggtctcctagattctttcaaggtatttctgggtattgttttcataatactactaacatgttatttggcttctttactctcattktatcatgagtgtacrgtggagtcttgcagattctatatgatttgggatgacactgtcactcttacagctaatggaatgtatgctttcatattgtttaaaaaactttatcttttttatttctaatacagtatggtaaatattaatcaatataacccatataaacaaaaattctccgggagccttaataatttttaagaagttaaaagggccctgagaccacagtgtttaagaattacttgtctaaaagcattgtaaattatttaactgctcccctgttgttgggaaggtagattatttatttataatttttcataaaaaacattgtgatacaatagttttgttagttctagaagtattgataaaatcacatacacagttaaaataagtcattgaattatttctagggtaatatgagaaacttttagaaattcctaaggggctgggcacagtggctcatgcctgtaatcacagcactttgggaggctaaggtgggtgatcacctgaggtcaggagttcaaggccagcctggccaacatggcaaaaccccgtctctgttaaaaatacaaaaattagccgggtgtggtcatgcatgcctgtaatcccagctactcgggaggctgaggcaggagaattgcttgaacccaggaggcagaggttgcagtgagtggagatggtgccactgcactcccgacagagtgagactctgtctcaaaaaaaaaaaaaaaaaaaaaaaaaaaaagaaaaattcctagcaagcttatgttaattattgttacaaaaatttgggcttagaggttgggaccataccagatggtcttcccagaaatcactggacaggcttactgttgaagggcatttccagaggaagccaatctacaatgattggaataagaacctacttcttcaaatatacagacatcaacacagagtcacaaggatcaagaataatcagggaaacgtgatattaccagagaaacaaaataaagtgcaagtggttgaccataaagagatgggagatgtatgaactgtctgacagagaattcaaaatacatgttttaaggaagcctagcaaactttaagaaaatacagataaagaattcaaagaaatgaggaaaacaataagtgactagattgagatatttaacagagaagcaaacagaaattctgaagctaaaaaatactttgaacaaaatgaaaaatgtaatagagagcaccaagagtagaactgatcaagtagaagaaataatccttgaacttgaagacagattatttgaaaatatacagaggaggaaaaataaaaaagtggataaaaaggaatgaagaatgcctataggatttatgcaacagcatcaaaagacgtggtatttgaattggagttcatctaggggaagagaaagataaagaggtagaaagcttatttaaagaaatagtagcagaaaactctccaaacctggagaaagatataaatatccaggtacaggaaggacaaatgactccaatcagagtcaattcaaacaagactactccagaacataatcacactgtcaaacatcacagacaatggggatttggaaagcaaaaagagaaaagaagcaaataacatgtaagggagctccacttcagctagcagcagacttctcagcagaaacttacaggccaggagagagtgggatgatatattcaccatgctgagggaaaacaacctgccaaccaagattrctatacccagcagaactggccatcaaaaatgaaggcaagataaaagactttaccagagaaacaaaagctgagggagttcatcaccactagacatgtcttataagaaatgctaaagagagtttttaagctgaaagaaaaggacactagtgattaattgaaaacatatgaaaggataagactagtaaaataaatacacagtcaaattcagaatacatgaatactgtaatggtcatacatatctttaatatgaaagttaaaagataatacttaaaaaataataactacaataacttgcaggggggatatgcaatataaaaagatgtaaatggtgacataaacaattcataatatgagtggggaatggactagaagtgtagaggtcaatttgtgtgtgtgatcaaagttgtcatcagcataaaataacctgttataactataagattctttttataagcctcatggtaaccacaaagaagaacctttagtagatacacaaaaaataaaaagcaaggaatcaaaacatactactagagaatatcacttaacctcaaaggaagatagtaagagaggacggaaggaacaaagagtctataaaacaaccaaatggcagtagtaagttcttacctatcaataataaccttgaaagtaaagggtttaaattctccaatcaaaagacatagagtgcgtgaatgggttaaaaaaaaaaaccgatctcaatagtatgctgtctacaagagactcacctcacctgcaaggacatgcctagactgaaagtgaagggatggaaaaagatactccatgctaatggaaatctaaagagtggcaggagtagctatacttatgtcagataaaatagactttaagttcaaaacttttaatggagacaacaaacatcattttataatgataaagggatcaattcatcaagaggtcttaacaattataaatatatatgcacccagcattggaatgcctaaatatataaagcaaatattaatggatctgaatggacagattgactgcaatgcattcatagtagaggacttccaccaccttacttccagcaatggacaatgatccagacaggaaatcaataaggaagcatcagacttaaactacagtttagaccaaatggatgtatcagacatatacagaacattccatccaacagctgtagaatacacacttttcaactgcacctggaacattctccaggtagatcatatgttagaccacaaaacaagtsttaacagatttaagaagtgtgaaatcatatcaagtatcttttctgatgatggcatcaaactagaaataaataacaggaggaacttaagaaaattcacagatatatggaaattaaacaacatgctcctgaataactaatgggttgatgatgaaattaaaagggaaactaaaaaatatcttgagacaaacatcacttcttaagcaattttgttaacatatttctttttcttctttaaaatggtgccataacctccttcatgaaattgctgtgagacataaattagaaaatgcttgtacagcccctggtataggatctgtccccaggtcacttacagcaggtccccagcaggggtcatgctgatcttgccatctcccacagtaactattgttaattgttttgtcacaaatgcccctgaacaatcaatgggtcagtgaagaaattaaaagggacatttaaaaatttcttgaagcaaatgaaaatggaaacacaatatactaaagcctatgggatacaccaaaagcagcccttccaagaaagttgacagcaataaactcctacatcaaaaaagaaagctccctgggcacagtggctcgtgcctgtaatcccagaactttgggaggccgagatgggcggatcacttgaggtcaggagttcgagaccagcctggccaacatggtgaaaccccgtctctactaaaaatacaaaaattagctgggtgtagtgacacacacctgtaatcccagctactaggaaggctgaggcaggagaattgcttgaacccagagggcagagattgcagtgagccgagatcgcaccactgcactccagcctgggcaacagagcaagattctgtctcaaaaaaaaaaaaaaaaaaaaaaaaaaaaaaaaagcaagctcatacctccagcctgggttttgagagcctgtctgaaaaaaacaaaacaaaaccctcaagtaaayaacctaatgtagcacgttaaggaactagaaaaataagaacaaactaatcttcaaattagtaaaaggaacaaaataataaaggtcaaagctgaaataaatgaaataggcactagaaaaacaatagaaaagatcaataaactaagttgtttttttgaaaacaaagaacattgacaaagctttagctagactaagaaaaaagagacgctactcaaataagaaaatcagaaatgagacattataaactgataccacagaaatacaaaggaacaattatgaacaattatatgccaacaaattggataacctagaagaaatggataaattccttgccatataccatttactatgattgaattatgaagaaatagaaaatctgaataatccaataatgagttaggagattgaatcagtaatagaccatctcccatttctatttattactgttgttattctaagagacagtgactccctctgtcacccaggctggagtacagtggtgtgatcatagatcactgtaagttgaactcctgggctgaaatgatccttctgccttagcctctcaagtagctgtggctattggtgtgcaccactacatccagctaacttttaaaatttttttgtagagatggggtctcactgtgttgcccaggctgctcttgaactcccagcctcaagtgacccccaccaccttggcctcccgaagtgctgagattacaggtgtgagccacccagtcctctgccaaacctttaaagaagatctaatgacagttcttctcaattgcttccaaaaattgaggaggagagaatacttccaaactcatttaacaagagcagtattaccttgatacgaaaaccagacaaggatacaacccaaaacactataggccaagatgcaaaaatctttaaccaaatactagcaaacctaatttaacagcatattaaagagatcattcaccatgatcaactgggattcttcctagaaatacaaaaagggttcaacctgtgcaaaacaataaatgtgctacaccatattaacagaatggaggacagaaaccatacaatcatttcagtagatgcagaaaaaacatttgaccaaaaaatattgttaactgtgctttcttttctgaacttaagaacttgcttttccaaaaccttmccagaatccctgtatgaatcaacaaaatttagttcttaacacatttctccttctttaaaatggtgacattagctgggcatgatggtgtgtgcctttaatcccagctacttgggaggctgaggcaggagaatcgcctgaacccgggaggcagaggttgcagtgagccgagatcacgccactacactccagtctgggtgacgagcaagacttcgtctcaaaaaaaaaaaaaaaaaaaaaagaaataatggtgccatacctttctcatgaagttgttgtgaggcataaatgagaacatacttgtacagcatctgggacatggacggcctctcaaaaggagtgctgctgttcttgctacctgcaccactgtaactgatgttgtttcatcatcctcgtcaccatcattgttattgattgtaaatggaagcacagtggtcatcttccaaatatgccactctgactctgtgaacttgtcactttataaagaggaaattcaagcttggaggggccttctggcatgacgtttattgaattgtggggcacaagatrcttccctgcttgttccattttcctttctcttgtttattctcctgccttatttatttattttttcttttgagacagagtcttgctctgttgcccaggctggagtgcagtggtgtgatcttggttcactgcaaactctgcctcctgggttcaagtgattctcctgcctcagcttcccgagtagctgggatcacaggtggctgccaccatgcscaattaatttttgtatttttggtagagacggggtttcaccatgttggccaggctggtgtcgaactcctgacctcaagtgatctgatctgcctgcctcagcctcccaaagtgctgggattacaggcatgagccagtgtgcctrgcttcctgcagtttttttattgattggatgaatgtttgtatatcccatgagccagatgaggcacactgtccatgcacatagcaagatggtaacacttacaccatctttactcttttgggattagtcccaagctccttgagaatgactgccgtatcacctgggttttactcttcggtttctggttgttactcctcagtcttcagctcaattaggatgcatccatttggtagttttacagttagtaaccctgatggcttccactggtttacgatcttgtacatctaagatgatgaaactaaggttcagagaggtgagatgactttgagtaaaattgcatggtgagcaactagcagaattggaccctgaaaccagatttctaatgtccaaatcttgtcccttgtttatcatatcatggtggttcaataataattcttcgtgtttagtgtggtgtactagagctatcaacagagaaacttgagactgagaggtttgaagggactaattctaggtcacacagctaatggatggagcaggtctttaatcccagatctgggttccaagaccagtccttttctctttacgctgctctgyccctgctatctktatgtcagaaaaccactgagcttccttctagatgtcagggtttggcaaaaaagttatcatgtgcttctgcgtcatgcagcgttttctgagaatggggagagggactcattttgcatctttgatctctcttttttattttgagatggagtctcggtcttgtcgcccaggctggagtgcagtggcgcgatcttggctcactgcaacctccacctcccgggttcaagtgattctactgcctcagcctcccgagtagctaggattacaggtgactgccaccacacccagctaatttttttttgttttttttgtttttttagtagaggtggggtttcaccatgttggccagggtggtcttgaactcctgacctcaggtgatccacccgccttgacctcctaaagtttggtctctttttgtatcagcttctatacagacttaaccccatttttaagtcacagccagcatggtcaacttctgtcagttttgcttctgttccaaaggcttctgttttactaacatacacacatacatgtatgcatatggatttaaataaattctggtgcagggaagtctaggaggcaaagagagataaaactctgtgattggaaagtcacttctggaaactagacatatagagcagacctcactcttacatttctttttgaagtgcaataattttttttttttttttaacaatatagggcccagtcctgtgtttgacattaaagctgtttccatcagtccaaccaatgtgatcttaacttggaaaagtaatgacacagctgcttctgagtacaagtatgtagtaaagcataagatggaaaatgagaagacaattactgttgtgcatcaaccatggtgtaacatcacaggcttacgtccagcgacttcatatgtattctccatcactccaggaataggcartgagacttggggagatcccagagtcataaaagtcatcacaggtaagatgactggctcccagggatgatgacaaaccatttcttattatggtgtattctagggccttgtccgttcaagttgcctgttggaaagagaatggttttcataaactagaagaggagaaaaggtgctatgttgtttcaagcctgggatttctggtggccacatcattcagtattaaggccctatgtgttttgggaagttctaactacttctgtttggtttttaaaatcttttgttattgttggttaacacctacctttctgttaagactcaggagtagagacttccttaaaaacgcgtgtcttcatggtaattaccagccttttaagctcccaggaaattgatgctgtgtttatattcccaggagtttctgttgggcaggaaagtttggtgtattttataggggagtgtgtgtttcaaatgaaataagagtttgatgatatttaaattttaattcagatttgacagtttagattttgatttatcttagatgtcaataccgaagccatctattatagctgcaaacttagctttttttttaagctgaaaagaaccaaacattttaaaaaacaggtggagaaacttttttaaggtgaggagaaccaaaaattgaagaaagaggtcctctgttagttttctgatctagggggctggggagtgtgatctcaggggctggagtcggccatgggcgcctgagctcttggagcccacggctggaggtgaacgaggtccagcgtggagcagcaaatatgaaaccagtggcttccgacattttaagtcaggaaactatttctttaaacaaaaccttgcccaggagcccaaaaagtaaaaataaaaaactggagagaaaagagccaaagaaatgggagtcacgggcaccctgacaaaactcctggagctcctcagagcactattttaggggggaamacctgccataaaggtttgctctgttacattgtgaaagagagggaaaggagagcacagagagatgacagaagagaagagaatgagagaaaagagcatagaacttggaaatggtcatgaggacaaggtgaccccgagggggtggctgtgggaaaggggatgcggaggtgcaggaagcaccggtagaggggctgagtgtccttatctagcttaaagccctgagcacagggctgcatgggagcaggtccatcagctgctgcgtattgagcacggcacatgtgcctctctgtccttaatgttattttgtcctcacagtaaccctgggggctgcagcagaagacactgtaatgtggagaagttaagtttcttccggtgtctcagagttactgagtatcaagtggtggggctggaacccggagtctaactctagaccactgtggtgcagtgatgttcataacagctatccacagtcaccgagctrggaatttattggttctgcattacttaataaaacaaaaagacgcatgactgacctgatttagaactctttgcatgagagacatgtgctgtgaagaatcatcttaccgtttcggagctggacrgtgccttagaatcatctaggccgatgtctttaccttcaggcccctgcagccctcaggaggggttttgctctatctgcagcactacctgtgcttttctgtacatgaagctgcagccctgggttctcctgtccccactgctaccaggagtgtgtgttcttgagcaagcccccctgcctctctgggtcttcgtgttcttattggaaaagtgaggggagtgcatgtcattttgggtgaagtggtttgacttatgtcaccatcaaccaaataacgcgatgggaggaaggtccaggatatagtggagatggaacgtcttctgaaaaatccccttggtgctgggatattgaatgtgctgcttacttgaaatgtcttggtaatttaaaatgatattatttgcattatcttgaattgagacctttagattagtaaacagtcactttatttgaggctttgttcctgatatctaaaacacatacaattaaatgctaccatttaaaagggacagtttagaagagtgtccagtcactattggggttaatcttggagaacagtgtggatcctaaacaatttcagttttaaggtttttttcttctcttccgtgttattattttctcccccagccctgctgtgaaatgatggaaatgcattgggctctgatagaaaggaagtatttttagtgagtcacattgggacatcagtgacctcagtcattctttctttttttcttttaaaacccgctcccagcactgaaccccagtcattcttaatgaaggtgactgcatatatcttgttccattaatgcatgttgtatttttaaaatagarccgatcccagtttctgatctccgtgttgccctcacgggtgtgaggaaggctgctctctcctggagcaatggcaatggcacygcctcctgccgggttcttcttgaaagcattggaagccatgaggagttgactcaagactcaagacttcaggtcaatatctcgggcctgaagccaggggttcaatacaacatcaacccgtatcttctacmatcaaataagacaaagggagaccccttgggcacagaaggtggcttgggtgagttacaaagggtaccttcygtctcccttactggttcttactttcagtaactaaatgttctaaaaaataaattgctcttccatgtgtatggagatttagaatttataaagggcttttcctccacattttagtttgatcccccacctgcatgaggaaggaaggaaacgtgttctgattttacaggggaacacaytggggctgagaacagcaataggaattgaaactttttagagtctggcacccaggaaagttagaggcccctttagctttctatctaacagctgtgtcaacccaagttgggccttcagaggaacttatcacgtctgctggttgatgttggcgttgtcatttgcaggtttcatagcatttgcagaggatccccaggataactccatgaggaggacaggcacttaatctgcattttatacttaagaaaacagagctacagagtgggtgtcaggatccttgcttgcgagtgacagaaaccagactttggatagctcagacagaaggaacaatttattggctcatgtggattttcctgctagcgggaggccttagagaaagagatgaggcaattctcatccctccctcttgcttctttctgttcatcagcttcattctcagagcagctccctctgcacacttaaggagcccagctgctccygtttcacaccctgcagctgccycaccagccagctgccccaccaaccagggtctggtccagggaaacgtgtcttgagtggggtctgattagcaaagtctgcttcacagagctgtccctggaaatccatgctgggacaggagaagataacaacccaaagaagggagaatgacctgaaataagcagagtttgaaagagaagcaccagatatctgtggtgctactggaataacagtacaaatggagatggagctatcaggcctttttatggggctgcctctctctctggaggaggaagggagcagatattgatggagcaccaactgtggccactgtctgatggccatctgatgggrttggggctccgaaggaaaatgggggatgtgtccctcttgtggttgatgtctttttgtctcctgtgcttgaaacagatrccagcaatacagagagaagccgggcagggagccccaccgcccctgtgcatgatgagtccctcgtgggacctgtggacccatcctccggccagcagtcccragacacggaagtcctgcttgtcgggttagagcctggcacccgatacaatgccaccgtttattcccaagcagcgaatggcacagaaggacagccccaggccatagagttcaggacaagtaggttgaactttgtaaaatggtggcagccagagtttcctagcacaatgttctgtctcctgtgattctgattctgagtgatttcttgcataacagctagttttgatgtcagagggagcttcctggaggagattttggacagagcagatctgctcagtttcttcttaactccatgggcagtgcacatctctcattaagtgaaatcaaatacatggagcagcccctgtgtgcgggcaccaggcactgcctcacgccatctttcacagctttgcgtggtggctgatgagacaaactggcatcatactttcctcttaaaaacaaataatcattgcttgtttttcctttgctttgagttaagaaagttatgaaagtgagtttcattttttcacccgccttgtaattcataccgatctttctgttgaaatgcttgttgacatgcacattgctgcttcctcgctataatttatcagcactttcactctgtaagttcaccaatatttggaggctttggtgaaaagagcgggaggtgaacacatttgggaatacttagaggtagttactggccaggctgtgttacttgtacagggctagaagttttggcaagacattggtgagaagccattctgtaaggaatgacagtttttcctggtatccatgttgaaggagggtccatttgtgtccttccttccctttgtacttgttttgctaatgtgggagtgggtggggaggatgcggccgtaggacaggctgcctgacctcatggggcctgcagtgacctggcaggagtggcaggtgggaggctctcgggtgaggagggcttggattccagagggtgggttagttggaggaggaggaaggggctcctatgtgggtgcggttggcagtggtggggtgtcctgcacatggtaagcttgcgtgagagagtgaaaggggctgaaatctggtctgtgtgccctgcatcaagccatgcacccagggctgggtccagccaggggaaggtccctttgactgatttgctaaaaggacttgtagatttgtgtgggcctggggtccctgctttttaaagcagtttgagcaaaagcaaagtagtagtgattacatctcaggctcttggtggtgtgaattcacacacatcctgctttgggttgaactgtcttcatgcttggtaaataatcattatagtagcctttccctctctataaggggcgagtgtgtgtgtatagataagtcttagtcagtttgggctgctgtaacaaatggccatgcactagatggcgtaaacaatgaacatttatttctcagggttctggaggctggaagtctgagactggggtgcagcatgcctgggctccgggtgaaacaccctcttcctcttccaggttgcagactccctgggtcttcacgtggttgaaggggtgagggcgtggtttctctccagcctttttgataagggcactaataccattcaggagggaggtaattcatgatctaattacctcccaaaagccccgcctcctaaaagcatcacatcaggggttacaatttcaacataggaattttatggggacagaaacattcagtctgttgcaacacacacacacacacacacacacacacacacacacacacacatacagataaacaaacacacatttccacccaccccagagcaccctgcacttttcaagtgactagttaggtggggcagggttaaggagaccatcagaggacattgttgaggcacccaagacacgacagaaagccacctctagggctgaagggctagaggaggacagggtgtttctggagcccagtgagagctggggcagtggtggacacagctgtgtcaggacaggaggcccagagcaggaggygatggaggaaggcactgactcctttctcctgtggcccttcaggggcctgcccattggctcatagtggaacccggtcacagcccatgtggcaagaccccccatgatgccttgcacaaggtcagcctcctgggcccagagcaggtgagggaagggcagtggatatgtcgggaggrtggagtgggcaggtggtgaataactggcactcgggttatcttttcttgaggttaggattgctctccagttttataggtgaggaagctgagctcaagtggttttcctgtggcccacctgggtgtcatagcagagtgagccctggaayccaggcctgcctcrtcctgacttctgtgatctcgggcgatcacatagatcgcagtgttcgctcttgcatcatgtgtgtttgacaacttttctgggtgcccctggccctagggtaagacatgcatagagtccaagtcatcatttaggtcaaatctctaaagtcaacttacaaaaaggaacaaagaataaccctgcaggtgccattggccaggttgtttcttcaccgcccaatgatgcctgactttggctgggaccgtcatgctttcctagccacggttgatggtgcagaggaggaaggaacactcccccaggagagtttgctgggcttgacagcatgccctgatgacctctccctccctctgccttggccgttctggttattttgaactcctcttgtgttctcacagatgctattcaggtttttgacrtcaccgctgtgaacatcagtgccacaagcctgaccctgatctggaaagtcagcgataacgagtcgtcatctaactatacctacaagatacatgtggcgggggagacagattcttccaatctcaacgtcagtgagcctcrcgctgtcatccccggactccgctccagcaccttctacaacatcacagtgtgtcctgtcctaggtgacatcgagggcacgccgggcttcctccaagtgcrcacccgtgagttcatgcctggctctcaccaccctttcctgctgtcctgctccgtgccaggcccagacacaggatgcatgatgtagtaatggtgactgttggctgaccacacgccaagcttcgtgtgacatgctttccttgcactggcacattgtatgctcacaayagccctgtgatgtggttggaagtagccttattttatagataggaagccaaggctgagagagktgctagacaggtatcacagctggaaagtggcagaggtgagattaagcctctggtatttctcacctggagcctgcgcttgtaactctctttccagtgtggaggagacctagagtgaattgatacagggagacaaaaatgacctggtattcatatccccttgtgtcttgggtgctgacattataacgaatcactggcacagctgtatctcatctttgtttgtttaaatgtcccttaaaaataagattttatgcagcaaataaaaagctttaggtttcaaagaaggtccgataatgtaaaataaaacagtaatggtgcactagtagtacagtggtataatattgattatatactattaaacaatagtagtgacaccagcactgcattttgcactgtgccatgagatttatagacactgtagtggcctccgaggtaggtattggggtccccttttacagatgaggaaatgacaccctgatggctgaacagtttgcccaaagccacagagctagtgagtagcagagcaggacttgaactcaggggtgtgtggctctggacccaggcttatcccacaagaatgtccattccttcgcaggaagcacaccttagcattcttatagatgtattttggactggatctttgggaaaatgaaatatgcttgcatttctttaccttttactcttttactatttattagttaggattaggttcagccacgaataacaccaccaaaaacaacaacaacaaaacccaagtatccrtggcttaaacaagacaggggtttatttctctctcctgtaacagaagcccagtgctaggcaggatggggatgatagaggttatccaaggctcagttgtatgaaacagaaactgtgagctattttaaccaaaagggacttatcctgggaattgaggttttgcagaatcattggaagagctggtgtattagtttgctagggctaccagaacaagtaccaaaggctgtgtggcttgaacagaaatatactttctcatagttctggaggctgaaggtcaaagattaaggcaacggcaggtgtggtttcttctgaggcctccctcttggcttatagatgactgtcttctccctcacatggttgtccttagtctgcgtgtgcctatgccctcatctccctttataaggacaccagtcttgctggattagggcctaccttcatgacctcacattaacttaattacctctttgaagaccctgtctccaaagacagccacattctgaggtcttgggggttaggacataaacatacacatttgggggtgagggagcacaagtcagctcataacagttgaggagcaggctttaggcctcgccccaagaaatgactcctggactaagtctgcagaactgaccccctggagagtcaccaccttggtcacagacagcagagggaggaatcaggaagtctctgctgtagttgcgggatccaggggtstatgttctgagctgtgatcctgggatcaggaagctgcagccaccgctgaggttttggttctagagccaggcagcgtgagctccagtcattgcatccacactacaggtataagaaggaggaagggcagaaggttgtgccccacccttaaaggacacttcctagaagtcacccagtacctctgctcatgcttcgttgagcaaaacttaktcacattgcaacatctagctccatgggagctgggaaatgtggtctttgtttccaacaggtatgcacacacagggctaaaaatctgggtgggtatgatgaagggaaaatgggggaatggattttgggggtcaagactggtctctctctgctgtccctccctgaacagaggctctgggaggctagtaatgcattcgagataaagcagccagtgtggccaaggttctcctccagagcctgagcccttgaccacaggagctcacgcctcctctcatttcctgtgaatgattgtgtgcaatgtaagcacagagcttctgcactctcatgatmaagtgctctctccatggccagaaacagcagtttctgaggggctcatgttgtaggtgatgatacaaagaagacagagagagggatcaggtgtcctaagtgtacatttcatctcagtattttctgaggtggggcatccctgtctcctggagaagtatatttttaatctagttgtttactttctttgcatagcccctgttccagtttctgacttccgagtgacagtggtcagcacgacggagatcggcttrgcatggagcagccatgatgcagaatcatttcagatgcatatcacacaggagggagctggcaattctcgggtagaaataaccaccaaccaaagtattatcattggtggcttgttccctggaaccaagtattgctttgaaatagttccaaaaggaccaaatgggactgaaggggcatctcggacagtttgcaatagaactggtaagcaaataggcttttctgttaaaccatcatgtttcttaaaggaaatcagtataattaataaacataatgtttccaaatattgtttttsttttaattatctaagaaaaaactttaaaaattttcataacactaatgcttatttattatatgaaatacagacaagtaagtagaaaaaacttacatggaaaccatcaagcagagataatcacttttgatgtatgacattttacaatttttaaacatatacatatagatacacaaatatatgtgtgagtatacatatatttaatacatatatatttaatatttaatacacacacacacacacacacayatatatatatatatatatwtttttttttttttttttttttttgagacagtcttaccctgtcacccaggctggagtgcagtggcatgatcttggctcactgcaacctccatctcctgggttcaagtgaagcgattcttgtgcctcagcctcctgagtaattggaattacaggtgtgcaccaccatgcctggctaatttttatagttttagtagagacagggtttcgccatattggccaggctggtcttgatctcctgatctcaaatgatctgcccacctcagcctcccaaagtgcttggattacaggtgtgcgccactgcacccagcccacaaatatatatttatttctttcacaaacattgaggccatctgtacatgtggttttgtaatctgccttttccccaacttgccaattaattatgaatattctttcctcttaataaaatatttctacaggatgatttgaacacctgcctggaattccatcatctgaaacagagttggcagataagaatggcccctatgccaaatttggctcattgtctgtttttgtaaataaagttttattggatcacagccatgttcatttgcttatgtactgtctatggctactttggtgctagaattgagtagtggcagcagagaacgtgtggcttgtgaagcctgagatatttattttctggccattacagagaatgtttgctgacctctgggctagatcagtggttttcaaattgtggtccagggctctctagggatccctaggttctttcaaggggtctccaaggtagtattatcataacaatactaaaatgttatttggctttttcattctcattctcttttggagttttccaactttgatccgatatgggatgacattgtctctcaggtctaatggaatatatgctgtggattcttacattttaaaaatttcttcattttaaatccctgatatagtaaatattaataaatataacctatgtaaatacaaattctctgagagccttaataacttttaagatggtaaagaagtcctgagagcaaaaagtttaagaacctctggtcaagatgtgttagaaattaactactgtgctgtgttgggcaggtggactgttcacagtctttcctaaacaacactgtgatgagatactttgttagttctagaaggctaattgaaattgataaaatcattttatagtcagctacggtggcctgcacccatcgtcccagctacttgagaggctgcggcaggaggattgcttggcccaacagttgcagactagcaccagcctgggagaccctgtctcaaaaaaaaatttttttttatagaaacagtttaaattattaaattrtttctaggcctacaggagaaacttctgggaaatcctagagagtaatgttcattattgttgttttaaaattttgaaataattgttttttggaaaggttgaaaaacatacagtcttccttgatctaagattcaagatagttgaaatcttttatacagagggtagaataaagatatacctaatgtaaatgatgagttaatgggtgcagcacaccaacatggcacatgtatacatatgtaacaaacctgcacgttgtgcacatgtaccctagaacttaaagtrtaataaaaacatatatatatatataaaagaaatgggacagattccttgaaacacacatgaaatgagttacgcttttgagattctccttgaagaagcttcttcaactgtgctggttgggttaagcaccgatagtcactcagaggatctgcttctgaaataagggatctactaaaatgcatccctcagatgaaatgcagtattccctttgcaaatctgcatttcagactgttgacatgacgtcttaacgtcaacatgtttcttctgtcttttaaggatgtggataatggtaagaggatcaccactgagggagatgcatgatgttgtgctacttgctattgcccagaacttactgtaacaataatataatatgctgggggtctgcgaagtgctgagtgctctcatactgcattttacatttttaacacaacttcatggagcaggtattattatcatttctgtcttacagagtaagaaatgggggctctgcaaacttaagtaactggcccagagtgacaaggtggcaaactgacctgtgtctgctgtctaagaccaagtgcttaaccaccatgtagattgacactttgatgtggtacagcagtaaagtttagtattagtgaggagagggcatctcttttactatagtttattgtgaatattctttcctcttaatatcagtatttctacagggtaattttaacacctgcctggaattgcattgtctcaaaggacccgtttcattcaatggtcccattgaatgaaagtcaagaaggcttgctataagatctaaactcttaggggggttacctttctattatcaaataacctttattgttattggaaaaagtcagcttaacagcattaaaagcaatttcaaaaaaaggaaacgaataccatatgatccagtaattccagtcctatgtatatctccaaaagaattgaaaacaggcccctggacagttatttgtacatcagtgttcatagtagtagcattgttcacagtagccaaaggtggacccaagatcccatcaacaaatgaatggatagataaaatgtggttcatccatacaacaaaatactattcagccataagaaagaaagaaattctgatttatggtacaacatggatggatcttgaggacattatgctaagtgaagccagacacagaaggacaaatactggatgattccacttacatgagtacctagattaggcaacttaatattctacagaaattagaatagaggttaccaggggctgttcagaggagggagtgggcattattgtttaatggctacagtttatgctggggataatgacagtgttttgggtacaggtagtggtgatagttacacaacattgtgaatattgatgataccgaattgtacactgacaaatggttaagatgataaatattatggtatgtatgttttaccacaataaaaatgaaaaggaacaaatatctctatttttctaacccaactgaattccttttctctctgtgtccacagtcatacattttgcttgtatactgtaattattatacaaatacttttattttgtatttgaatttctttttactcagtctataccacaactttcccctatagttagcatggccttcatatttttagtggctaaagagtatttcatcatgcagccagatcacagtgcccacagccctccccatgttattgaatatttaggttgtttctaggtttttatgtttatagacaaaggctgcctttcatgggcttttgtctgtggaatccctttgacatcaggaatctgctggtaggaaacaaaggctcctcccagtggcttctctgtaaggagaatccacttaaaattaaaaaaaaaattaattttggagtagatagtacgtaaacatgrcacaattttttttgttttttggacaaggtgtttgcagtgaaagcatttcccttttttgtcccctacctgcccatttcctctccctggaggtgacgtttgttgccaggtaaagagagacagggttgaaagccgcggtagaaaataggcccagcctccgcggttacttccgggcctctatgtaggcatccctggtgcaggtggctgagtgggcagcgggagatgatcggaggatgggctcctgtgggagattccatttctgactctgctctgaaggtgcagggtgtgcctgttttcttcccttcctcatccgtcctcaaatgctgcaacttagtaaaggtcagctctccatttcagttttcctctttggtatgtaaggctgtgtcacgggaagatgtttccttctgagtgactgatttaaaaaacacaacaaaacaaaaaaacctctttattgagatataatatacataccgaaaagggatgtatcctcagcacatagcttcatgaacttttacaaactgaacacatcttgttaccagcacccatataaaaaaactgaatgtgatttccacttcagatgaccccttgaagggctttttttttttttttttttttgagatggagtttcgctcttgttgcccaggctggagtgcgatggcgcgatcttggctcactgcaacctctgccttccgggttcaagtgattctcctgcctcagcctcccaagtagctgggactacaggcatgcaccaccacgcccggctaattttgtactttttttgatagagacggggtttctccatgctggtcaggctggtctcaaactcccgacttcaggtgatccgcctgccttggctgcccaaagtgctgggattacaggcgtgatccaccgcgcctggcctttttttttttttttttttttttgagacaaaccctcattctgtcgcccaggctggagtgcagtggtgtgatatcggctcactgcaacctctgccttctgggttcaagcgactcttgtgccccagcctcccgagtagctgggattacaggcgtgtaccaccacacccaactaatttttgtatttttagtagagatgggttttcaccatgttggccaggctagtctcgaacctctgacctcaagtgatccatctcggcttcccaaaatgttgggattacaggcatgagccattgcacccagcctaagggctcatttttaagacaacaacaaaaaactggagaactggtaagataaactgggaagttcatgtgcgtcacagaagagctgaaattcttgagagcactgagtgtgtgcatttctcagctcgattttggagtgtgccttttgtgaactcattagaaagcgtaatggcaaaagagcaggtcctctcgacagcacttggagaggaagctgggcgtcatgatagtaacagttttcccttctccttcctttcttctgagcagttcccagtgcagtgtttgacatccacgtggtctacgtcaccaccacggagatgtggctggactggaagagccctgacggtgcttccgagtatgtctaccatttagtcatagagtccaagcatggctctaaccacacaagcacgtatgacaaagcgattactctccagggcctgattccgggcaccttatataacatcaccatctctccagaagtggaccacgtctggggggaccccaactccactgcacagtacacacgtaagtctcttaggatgcccytctaaggaacagcctctctaactgtctcttggaggaggcactggttaaatgatggccagtgtgcttctgggatccaggttgactctgaaactgctgaagttgaaaacattggtctcagcaatggttctgctgtcaccatggggcactgttcttcaagctatgtgaacttagaattgtcattagaaggaagaaatgattccttgggaatggtgactgaaatggttctagtcattccttgagaatacagagtagagaagggtcaccttgtcatgttggtattggaagatactgcccagatgaggagcttcgcctgcaacagttagggaggtgttttgcgaayatttgaattaaatacatggtaaagatgttagtttgtaatatgtttttagtatatttttctccatctattagatttaaaaaacagattagaaattaaatgttaaaaatatrtttgaaataaacttgaagtattaaaagaagcctaaattaaacttcttttgagacttaatctgtataattattttcttgatgtgtttttgggaagttttccatcttttgagccagcaaatactagttttattcattctttctaaaacgagccaggctatttttggatatagtaaatagtcctggaattctacttaatctgtgcttttacatgaattgccttttttttaaaatcaagggcccagcaatgtgtccaacattgatgtaagtaccaacaccacagcagcaactttaagttggcagaactttgatgacgcctctcccacgtactcctactgccttcttattgagaaggctggaaattccagcaacgcaacacaagtagtcacggacattggaattactgacgctacagtcactgaattaatacctggctcatcatacacagtggagatctttgcacaagtaggggatgggatcaagtcactggaacctggccggaagtcattctgtacaggtgagtgtagccccarctgcctcttggactcctccctgagtggtgctgaccttgcaggtcagtcctcccaagtctgtagtttgtctggttttgtgtgatgtgcagtgatggacattgagctttccgaggcatcctgttagcttatcggtgctgtctcgatgccctcatcatttctgcattcaataaatatttattgagcatataccatatgccagtcaagtccttgccttcttggaacttttcgaaggaggaagtgggatgtttacctagagtgctcaggaaaggcctcaatgacaaggtgacttttgagcaaagatctgaatgaagggaaggagccagccatgtggatatcagggcatgagaacattacaggcagaggcctgtgcagaggggcctgtgcagcatcaccactgtatctggaggctggaggaagagcaggaggcaagggtgggaggagtggacccgcaggaacaggaggatataggtgggaggtgaggcctgagtggggctgagccaggatgtggatgatatctggcattggtttgtcttttgtgctggagaagatgaaaagtttattgaaatgatgcccagcctttgcatccttcttgatcctcacctatctcacaactgaaaatgtgtgataaagagaagagccctctgtgtaattgaggatgctttcagggcagcccaggaaaggctttgcagacagtggtgggcacttctgctcacagtgctgactgtggcacctttatcactcagcacccgtgcactactcattttctgcccttctcgctcctacctcttccctttttagcccaggccattcagatatgttcaggctgatttggaagtgatggtctcatgggatcagcctccctggtagtataggagctccagccttgatggcctctggcttttcagtggtgagtggggtggccacagaaatccctgcagctttgggtcacttctgctccatcccacctggtctagacacccatctttgatatttgggtgcctttcattgctgatatttatcttagctatagttatttgtagcctatagcaagagaaaaactgtatctgagcatttatgactgggtgtgggtggaacaggagctgtaaaagtgggtgcagtgttcaggttacctttccaggccctgggtggcaaatgtgggtgttgcactaggtgccttggtagagcttctcctgctctaaaattctgtgacattcaattaatgataatactgtcctccagttgtaatatggagttttctatttacatcagtttgatgttagtcctcagtaaaaatctaatggccctcagatagagacaaataacactctattttgaagatgaggaaactgatgcatcatcaatggatgatgcagtatgttatgtgagtagagagtgtcttgaacttagacttagaaaacctgggatctagttttggcttcaccacctgccatgtcatcatcagccaattacttaacctctctgagcctctgtggatttatctgcagatgggacagtataggcctcacctgtctcagaagtatcatcaagagggccttggctgggctggtggctcacacctgtaatcccagcactttgggaggccaaggtgggtggatcaggaggtcaaaagatcgagaccatcctggctaacatggtgaaaccccatgtctactaaaaatacaaaaatcaactgggtatggtggtgcatgcctgtagtcccagcgacttgggaggctgacacaggagaattgtttgaacccgggaggtggacgttgcggtgagctgagattgcgccattgcactccagcctggtcgacagagcgagactccgtctcaaaaaaaaaagggggtcctcatgatgagatggtgcaagtgaggaggttgctacttctcacaggatgatacagctgactctcatggagccctggtctcttccaggcgtctttcttggtgcctgacatcattgttcaatttactcttcaaagagtcctgcagctgaggctcagagcagttgggtgactgacccaagctcacacagtttggtgttgcccaatttagggtcagcccctgcctcttccaccacatcacccacccaccttctcatccccaggattctgctactccctatttccatgtttgcaaaggcaaaagtcccggaatctcatgctgtgctgtacttgctttgcagatcctgcgtccatggcctccttcgactgcgaagtggtccccaaagagccagccctggttctcaaatggacctgccctcctggcgccaatgcaggctttgagctggaggtcagcagtggagcctggaacaatgcgacccacctggagagctgctcctctgagartggcactgagtatagaacggaagtcacgtatttgaatttttctacctcgtacaacatcagcatcaccactgtgtcctgtggaaagatggcagcccccacccggaacacctgcactactggcatcacaggtgggctacaaggcaggggctggtcagttggcactgtgatcactcctggagcggctgacccacagtgggtctgcacgtgtggactagaaatctgtttttgtttttttatttcccctaaaatatttgcttttactgacatagactggtttctcattctatagaaatcaatctaaaaaagcagagtaagaggggctcattttttacattctaaaagattccttttctttacagcataactcattgcctcattgccatgttttcttttatatttttttgagatggagtcttgctcttgtcacccaggctggaatgcagtgacgcaatctcagctcactgcaacctctgcttcctgggttcaagtgattttggtgcctcagcctcctgagtagctgggactacagacacatgtcaccacgcctggctaatttttgtatttagagatggggtttcaccatgttggccaggctggtcttgaactcctgacctcaagtgatccacccgccttggcctcctaaagtgttgggattacccacgtgagccactgcgcctggtcgtcttttarcccacatctgttggtggcttactgtgtgctatggtgagggatactatggtgagtaggggcgacagggcccctggagcataggactgagaagagcattgagagggagaggatttccaggtctggtggtgggtgagctagcatgctgctgccarttttgcagcaaggacctggggatggaccttctctggccagctacagggtatagagctggtgggaaatgcaggagcctgtgctagcagttgaccattaacatgggaaygccacctcccagcgggcactgctgccgcatacttgcgaggttgctgaagcttgtagttyagagcaggaccatcccactagatgtgcaatgtgagcctcaggtataatttaaagttttctagaagccacactgaaaaaaaagtgaaaaggaatagcygaaattggtattaatagcattttacttaacttagtatattaaaagtattatttcaacatgtaatttctgtgaagtattaatgagttattttatgtcttcttttgtactaagtctttgatatctagtctgtattgtgtgcttgtagcayatctgaatgcaaactggtcacctctcaggggcttggcagcygcatgtggctagagggctgctgtatcagcacaggtttagacaattatgttgtggttgttttggagttcagatttctgtctccttgaatcttgaatatatataataatgagaacaggctgggcgtggtggcttatgcctgtaatcccagcactttgggaggctgaggtgggaggattgcttgagccaggagtttgaaaccagcctgggcaacatagcgagatcccatctcatttattttttaaaaatatataaaaaaaatgggaataacccaaactgtatgtgtgagatgaatttaggtagagagagagagtgtgtggagtggatcatctttaattcagtgtgttctttcttttgtgttagttcagagagtggctccataccctggcttggaaagggggggtgtgcacaatcatggaggccatccatggagggtcctgtgggggcttttctggtttctgggaagaggatctgttgggtttctctaggtggtatttgagaccaactctgggaaaaatgtggggactgtttatgaagaacacagagaagtgctgtgcccaggtctcagcagaaagtgtgttctctcccacctcatctgtgattcttctccttggacatttgctccgtctttgctctcagctgaccagctgatcctggggccaagccaagtccatgtggtgtcattgtgcagctcccaaggccacaccttagagttccaccacagtctctttctcactctccttcttccaccccagatctcaggataatgaacccggctcatcttgagtcatatgggactgggggagaggacaagggcaggttagcttcctcatgcaaggatactagcttcttactctaatgatggtttcttttactgtgcaaaaccttttcagtttgatttaatcttgcttgtcaatttttgcttttgttgctgtgctttttgtgtggtatccaagcaaccattgtaaatactatgtcaagaagctcttccccaatgtgtttttttttttttttaaacaaattttacagtgtacagctttaggtctaatgtttaaggcttgaatctattcagagtttatttttgtgtctggtgtaagatagaggtccagttttattattttgctcacggatacacagttttcccagcaccatttgttgaagaggctgtcttttccccattgtgtcttcttgacatccttgttgaagataagttgactgtatatgtgagagtttaattctgggctcagtattctgttctatgggttgatgtctgtctttatgcctttaatatactgttttaattactgtagctttgaataaatatatcttgaaatcaggaagtgtgaggcctccagctttattctttctcaacgctactttggctattcctggtctttgattgttccatgtgaactttaggattttttttttatattctgtaaaaattgccattgggattttgatggagcattgaatttatagatcgctttgagtagtgtcaagtcttccaacaatgtgaagtcttccaatccatgagcatgggatgtctttgcatgtatttgtgtatttgtatcttctttattttatcgatgttttgtggttttcactctacaagtctttcatctccttgattgtattctaattatatttcaatcaatctgttaaaaaataaaataaaagcatgtactgttcaaaacaacaatagcaaaaccaaacaaggctgctgggtgcctgccctggggatttggctggatgccctgaaggggtcattgtgagctaggtgggtttcccaggatctgctgtctctgctcctcaccagtttccttccctgccttttgcttctggatttgctgttttgcacgagcccagcatgtagcttccagagtaagatcttgaggaggttgctgaagcatgttctctacctaatgtgttgctttggttttcaatattgggtgatcatgttttgttttgttttgttttagatccccctcctccagatggatcccctaatattacatctgtcagtcacaattcagtaaaggtcaagttcagtggatttgaagccagccacggacccatcaaagcctatgctgtcattctcaccaccggggaaggtaaggagaggcctccgtgggttaaacagcccatgagtgatgcagtgaccagagctttctctgtgcccactgaggcatgtgagtaatgcagacacacgcctgtcttctcactgcagccyatgctgtgtactcagacagagaaggagggtgaggtatttgcctgatggttgacaaactttctggaaagggccagattgccaatattttaagctttgcaggtggtatagagtctgttgcaagcattygactctgccattgtagtgtgcaagcagtcacagaagatacagaaggaatgagtgggaccattcccactagatgttatttaccatggcaggtggatttggtttgtggcccataacttgctgatctgtgatctaggtttttcttctcttttacctcactgggccttttaggtggtagaatattagttttaaccaactctgtctctctctctcactctacacacgtacacacatgccatcctcagaggatgactttcctttgaaagaaaatagaaaaagatttgcatttgctagtgggaatttgcagagtatctccttagctgagagaagaggtggattaaaagctgcttttccttaaagggctctgttacattcttttgtggtaggaaaggaatcattcgagagtctcttcggtagctgtgtttgagtgcttgcataaggcctagatttaaaagcccaagttttgttgggggggttccctcctccccctcccctcctccccctcccctatcatcatcgtcccattgtcctccaccctcccctctcctcctcctccccttctccccttctccccttctccttcccttccccttccctctttctttcttttagagacaagatctcaccatgttgcccaggctggtcttgaactcctggactcaagtaatcctcccaccttggccttccaaagtgctgggactagactacaggcatgagcctctgtgcctggtctgggagattctttatgcatgaataatgcagtgtttcctctgcccactctctcctactgtggtgctgtcctcatgtccttgaggaggatagagaccaaacacactgtcggggttagggatctgggaggatagaaatttgctggtgccataacctgtggcaaaatttcaaaaagtgaggttgaaatctctatcttttaattttgggtctgtttccagctcttagtcattttgctgtgatgcttgtcagcaagtcccattgaggaaggccatgttgcatagcagccagactgaccagtgctggcctgtgattagatgaaaccttgggctctgagcccgatgccctggattgggaacccaactctacctcataggcagtgtgaccttgtgcctggtcctgttagccttttgtaccttcgttttcttgtctgtaaaatggagacaataagcttatgtgatgggattcatggggatgaagtgagttactgtaggtgaaacccttagaattcaatgtaagtcaaacctggcacagagagatacttgagagatggttgctgatcactatcacccaacatcaccaccatgtagatatgcaggagaagaaatctctctgccatcactttcttatgattctccttctgtgtacctttcttagctggtcacccttctgcagatgtcctgaaatacacgtatgasgatttcaaaaagggagcctcagatacttatgtgacatacctcataagaacagaagaaaagggacgttctcagagcttgtctgaagttttgaaatatgaaattgacgttgggaatgagtcaaccacacttggttattacaatgggaagctggaacctctgggctcctaccggtaatgtcttctggttcttactctttgggggctgagcctcatgagcataaagctctacatgcctgcggtcagacacgtctcagggacctctttttgctctttgttatcccacagggcttgtgtggctggcttcaccaacattaccttccaccctcaaaacaaggggctcattgatggggytgagagctatgtgtccttcagtcgytactcagatgctgtttccttgccccaggatccaggtagggagaagacaacagtcctggcactggttcagtggcattttgctccacgtgtccatagaaggccagctgtgtacatgcctccctcagaccttcaggagggttggtgtgcccagctctcccctcccagaggttgagatgtcactgggtcaccgggcttactgggcttcctcctccgaggtcccacagcctggaccccacactctcccttctctaagtgccagttgttcttccaatctgcaaagattattgactccccttatctatgtgtggtcacttgtgggcccatatgccaggtgcacagtttgacacattgcattgaatccttaaatagtagaatcagaggaagccacataaattgtcttgttcaatcctctgtttatttttcttcataattttaattatgtttattgatttgtttattttattttatgttttttttttttttttttcagacagagtcttgctctgtcacccaggctggagtgcagtggcacgatatctgctcactgcaacctctgccttctgggttcaagcaattcttctgcctcagcctcctgagtagctgggattacaggtgcctgctaccatgcccagctaatttttgtatttttagtggcgacggggttttgctctgttggccaggctggtctcgaactcctgacctcaggtgatctgcccacctcggcttcccaaagtgctgggattataggcgtgagccaccatgtccagcctatttattttatttttgagacggagtgttgctctgttgcccaggagtacagtggcatgatcatagctcactgtaactttgaattcctgggctcaagggatcctcctgcctcagcctcccaggtgggaccacagttgcttaccaccatgcctggctaattttttgtagagatggggtcttgctatgttgcccaggctggtcctgaactcctggcctcaagcctccttccaccttcttccaaagctctggggttacaggtgtgagccactgtgctctgcctgctttttggaagtgagacttttaaggcctagagaggggaagtaacttgtccagggttacacgatggctttagaggcaggcctgaaattctggtcttggacccttgttaagtgcttctaccctttatcacatagacctaagtgatacaggagcttcagggatccaagaggggtgcatcccctaccttcaagccagaggctaatggactggctggtttgttagtttgtctgcttttctttcctagttggtggttgttgggcgcaggaaagaatgcctgccccagaagcaaagtttagggagtccccacatccttccccggtaaacaaatgggtttcctgtcacctgagcatggatgctgctgtaggtacctctgctcatatgtgggtgctagtctcaaaatgtcagaggtggcaggaaaaatatctgaaaatccagcccagttccctaaatttgcagttgaggagacagacctggagaggaacagtaactttctcaagaccatccaggtagtagtggattgggaacaggaacctggcttctgcatgcatagactagttttaggtccaaagctatttaactcccttgtgtgtgtgtgcgcctgtgtgtgtgtgtgcatgcatgtgtgtgtatggtatacacactttaactctctggtgttagggtcccaggccagtttttagcacattgtgtggtctgcatgaacacctcttgaagtgtctcccatttggacttttctcaggtgtcatctgtggagcggtttttggctgtatctttggtgccctggttattgtgactgtgggaggcttcatcttctggagaaagaagaggtgatattgcttatgctaataataatactctggtatttaaggaagctttctattaaggaacatttcaaactttgacagattcagaaggaatgatatgatgagcgccatgttcccttcacccatagtgttctgcatttggccagtcctakttcctctgcgcccccagctgggcgatgttaatgtgctcccagctgtcacatcaggccactgatagacgccacagtgtgggatgctactttcaaatgatatgttcttgtttacaagtcagtttcatagtattatgatgttaagagatttcatttcagaggtagctaagtttgaacaccagctctgtctttgaccagctgtttaggaagcttagccttaatgtcctcatctatgataggaggataatcattgtgcctaacttgtgaagctgaggaggattgaataaataaggcacttctcagtgtcttgtgccttgtatgctattactattattttatctgtacaactaccctgtgaggtcattaaatggtaaaagtagcagccctgttttgagtgctcaccgtgtgcctgcatctgtgctttctgtgaattatcgcatgcatgaggctctgcgaggcaggtccagtaagtcccttccaaggatgcagaagctgagtcaggaagtgtggaaatagaacttgaacctggtccttgcacttcatggcacgccctcttgtctgtgtagtgtgtgaagcctgtgtgtgttagttgggatttctttgctgtaaggtgctgccaaccagggaatctccatcctgccttaggggtcttcatgcggcccaggccggttccttgtgctgccaccctgccctgttggagtgacaggcagagctcatgctccagcttttaggttaggttctgtttttttttttttgagatggagtctggctctgtcccccaggctggagtacagtggcatgatctcagctcactgcaacctctgcctcctggttcaagtgattctgctgcctcagcctcttgagtagctgggattacaggcaccgccaccacacccagctaatttttgtatttttagtagagacggagtttcaccatgttggccaggctggtctcgaactcctgacctcaagggatctgcccgcctcagcctcctgaagtgttgggatcacaggcgtgagcccctgtgcctggccagattaggttctgattttggrgggggaaatggatcagtcagtggctggataaaacagttttattgtttcttgttaaaaataagagtaatacatgcttatggcaaaaaatatagaaaagaagagcaaaaataaataggaaatctgcaatcgcagaacccacacaaaactactcttaacattttgatgtgaccaaactcacacacaaatgtgtgcacacacatggaatcatgttacatgttagaatcaagcctgctttattcagcttagacattgttggcagcttcatttcatcacaattttttttttttttgagacagagtttcgttcttgttgtccaggctggagtgcaatggcgtggtcttggctcactgcaacctctgcctcctgggttcaagcgattctcctgcctcagcctcccaagtagctgggattacaggtgcccgccaccatgcctggctattttttttgtatttttagtagagatggagttttgccatgttggctggtcttaaactcctgacctcaggtgatccacccgcctcggcctcttaaagtgctgggattacaggcatcagccaccgtgcctggctcatttcatcatcattttaagtggctacagagtattcaactgtatgacagtaccatgatctagttaaccaatttcctaggtgtttccaagttttttttcttggccacagttacttatccttgtgcctaaatctttgggcacattcacgattatttccttaggctaaattccaagctaggcaagtgctgggtcagtgggtatgcgtgctttcagttttgatacatactgccaaattaccttccagaaagtttttcttaaataccaatgcagagttgagtcaacagtgcaggagtgtrcagatgcctcaccaacttgccagttccggatctgatatgttttttggtttattgcattcatttatcagaaaagctttctcaaaaacaaagtatgaaataacaagtcttgctttacattaaagtaatgccactgctatatatttgcaaggaagttcttaaaagtgacttggatatgatttttttcattcttttagatagtacaaaagaaaataacttcacaaatttgtaattagcatttgcagcttgggtcattaagtttagtattagggggcaggatttggtgtcagckgtgaactaatgcctgaggaaaaggtgtaacacctttatttcatagatgacatcaactccagatacacaagggaaaagcacaggaaggaatccttttttgtctaatgggtctcttttctcttaaaacaggaaagatgcaaagaataatgaagtgtccttttctcaaattaagtaagtctctcaaattatgagctttattttaaatcctccaatctgttcggtgactatctataaataatttttgatggaacttgctgtcatttttcctgattgrcacattttgaccatgaccatctggaagtttttgctagctctgttttctgcaaggaatctatgttttattagtctcctgaagytggcttccttgtcatgttctactcttctaccaataaatacggatttcttgattaaaaaaacgtcaaataggttatcaagatccaggggagagaagaacttacttaaagtcacaaaaccaattagttacaaagtagggtctagaaatcagatttcctgaatcatattktagtgttttgtgaataatagtactctgaccccctcttgccaaattatrccctgggttttgttgttttgggaagattgtttactrtcatttctagagtatgaatgagtctttctaattgcatattttttctttccctttctatcrtgaagacctaaaaagtgagtaatctctttattttttttaataacttgtacttttctattgaatatggacttcactgaatgtaaaaaatcctgataagttttgttttcttagatctaagttaatcagagtggagaattttgaggcctacttcaagaagcagcaagctgactccaactgtgggttcgcagaggaatacgaagtatgttgctgtaaatactgtttttaattgtgtcaggttccaacccaagctgggatcygaggggagttggtggatgggtggcaggtagctgaaagaacactcgagggactgtaggcagttgggacatggctttattctctctcctacagagtcagcagtgcagttatattactcacagacaatagtggctcaaagccaggtatgaactcacacaaacaggttacattaaatggctatataacgcaaggggttgttgcgctccaaaccctttgcgtcatactgtcctggatgtctacctyggactactcctgactgaagcacagccactttccttagaaattggcttgtttttcctgaaagttagaaaactgttaacagaaactaggaattcaagtcagggaactgttagccacaatacttaggaagctatatgagctggaaagaaaccaaatgggcatgtagaggtctggggcttgatggcagtgtggcctaggatggcttgtgaggctcacttctgaagccctgcacaaggamtttcttggccagtgtctgcctttcagttccccatgctgtgctccaaccagcccaggaaccagccctgctcagagtgaccatgcacactcgtcctcctgtgctgccctgtccagcatctctgcctttgctctcttgaaatcctgctcagcactcagcacagtgcacatgctgcttcctccatgggcattctgggatcccattaggaggacttgagttctgtgtgctcagactgccttgtttcccctgttgcttgttaccaatattcagcatttctttaattctgcctttttgtaatgttagttttttctgtgtacagtacacctctcctccaggttgcaactgcttgaaggcaagggttatcctttttcctatattctaacctttgtattagttctctaggctgccataaaaaagcaccacaaactgggaggctgaaaacaacagaaatttactgtctagaggccacaagtcccaaattaaggtgtgggcagggtcacactcccttctaaacctctgggcagcgcccttccttgcctccgcagcttctgggagccccaggcgtcccttggttttgtggcagcaacactctgatgtctgcctctgtgttcacatggccatctcccctcatgtgtctatgtctctttgtctcttttcctcctataaggacactagtcatatgggattcagggcccactctaatctagtatgatctcattttaatttgtttacatttgtaaagagccttttttttttatactttaagttctaggatacatgagcacaacatgcaggtttgttacatatgtgtacatgtgccatgttggtgtgctgcacccattaactcatcatttacattaggtatatctcctaatgctatccctccccccaccccatgacaggccccggtgtgtgatgttcccctccctgtgtccaagtgttctcattgttcaattcccacctatgagtaagaacatgcggtgtttggttttctgtccttgcgatcgtttgctgagaatgatggtttccagcttcatccatgtccctacaaaggacctgaactcatccttttatggctgcatagtattccatggtgaatgtgtgccacatttttcttagtccagtctatcattgatgkgcatttcrgttggttccaagtctttgctattgtgaatagtgctgcaataaacatacatgtgcatgtgtctttatagcagcatgatttataatcctttgggtatatacccagtaatgggatggctgggtcaaatggtatttctagtttcatatccttgaggaatcaccacattgtcttccacaatggttgaactagtttacagtcccaacaacagtgtaaaagtgttgctatttctccacatcctctccagcacctgttgtttcctgactttttaatgattgccattctaactggtgtgagatgctatctcattgtggttttgatttgcatttctctgatggccagtgatgatgagcattttttcatgtgtcttttggctgcataaatgtcttcttttgagaagtgtctgttcatatccttcgcccactttttgatggggttgtttgattttttcttgtaaatttgtttaagttctttgtagtttctggatattagccctttgtcagatgggtagattgcaaaaattttctcccattctgtaggttgcctgttcactctgatggtagtttcttttgctgtgcagaagctctttagtttaattagatcccatttgtcaattttgtcttttgttgccattgcttttggtgttttagacgtaaagtccttgcccatgcctatgtcctgaatagtattgcctaggttttcttctagggtttttatggttttaggtctgacatttaagtctttaatccatcttgaattaatttttgtcagtttcagctttctacatatggctagccagttttcccagcaccatttattaaattgggaatcctttccccattgcttgtttttgtcaggtttgtcaaagatcagatggttgtagatgtgtggtattatttctgagggctctgttctgttccattggtctatatctctgttttggtaccagtgccatgctcttttggttactgtagccttgtagtatagtttgacgtcagctagcatgatgcttccagctttgttcttttggcttaggattgtcttggcagtgcaggcttgtaaagagcctatttctaaataagatcccactcataggtattgggggtgagaaatccaacatatctttttggggcacagtttaacccatatcacctctacatttccactttgttcttttgctaccaaaacaccacgggtttggtctaggtcctgctcctcacctttacagaaagccaatcactgagatgacaaatattgccggggaagaaagctttaatcgggtgctgcagccaaggagatgggagctgaatctcaaatccatctcgctgactgactaaaaccaggggtttatacagcaggaaagaaatgtaacaatgtgtaagaaaacaggaactaggggctgggcatggtggctcacgcctgtaatcccagcactttgggaggccaaggtgggtggatcacgaggtcaggagatcgagaccatcctggctaacatggtgaaaccccgtctctactaaaaatacaaaaaattagccaggcgtggtggtgggcgtctgtagtcccagctactcgggaggctgaggcaggagaccgcgccactgcactccagcctgggygacagagcgagactctgtctcaaaaaaaaaaaaaaaaaaaaaaaaaagaaaacaggaagtagggaggggcaaggaggcatctggtgcagtgatctgactagtttcagttctttgttactccctgaaggycctttcctgagaaaggaactcagataaaacaaatacaagtttcaggctttaatagcagaagggtaaatttctatgtttattcaaaaacaacttgtctatgggactgttgggctggtttcactgtcatatgctatgctaaatatgaataatatttgaagactaaataaatgaacacctcatttgttttgttttcaggatctgaagcttgttggaattagtcaacctaaatatgcagcagaactggctgagaatagaggaaagaatcgctataataatgttctgccctgtaagttattttatctacagcatcttctctgtgttccatcagtggccatcacatctctaagtgtagaggggagggaatcagtgatcctaagtaaccacttccacaaccattcattagtcacctacttccacaaccatccattattcacctactatgtgctaagcactatatttaggtgcattctcttaaatcctcacaacagccttatgaagtaggtagtagaatatttgttttgcagatgaggaaaatgcacagagtggttaggtgatctttccaaggttacacaggtagtgacgggaaaactcggctttgtactaggtctgtctgtctcagtaagggaaaaggccagagtctgtgttcttaacccctctgtctcacaactatttatttcarttctataattctggaatgaaagtgagcagagggagacggggagtcacactctctgtgtccagacacatgggctgagtgaattccacagctaagtatgacttatatttagctcatttcctgtttttgagaattaacaatgtctgcatcttagtcaacaggattacagcaaattgagtttaaaataagaattatttattacatcaaaccattagatgaaatgtaaataattctccattgaaagttccttgtaatctctcttttgggtggggattagggcacagagaggagcataagcagattgtagccatgttctgatggagctgaaattgatagactttgcagataatttttacatcaggacgtcatcatctttattcgaagccgtgtttttcattcctggactaaaacattaagttctttttaaattcagcattttctagttcttgggttctttctctccatttatttccttgtacttgacaaggartattggcccatgttctgagggaaatgcttttaaaactaggctgggggtattgcccttgtaagggtaatttgggattattggcccctttttgtgaatgtctgtggagattctcagatctggagtgggagctgggaagtgggtgtttgggtattgttcttattgggaagcctttaggctgagactcaggtcagtactagacttagcattgttatgttattttgtccagaggagggtgaggtagtacaatcagagacrgggaaactgaggtggtgctgcttctggctcakcctgacacttgcagttctaaggttattatttcatctcttaagttgggcaagtttgtgtgtatgcttttgagatgacaataatatttataaaacataattctgtgttttagaccctcctactcatagtagtcttatacattcaatttatacttgaacttggtactctgtttttataacaacttgtttatatgagaatagaggcagagtagaatggttaacctagggacctaccccgtcctagtggaaggggcactagatttgaattttgactgcccctcaccagatatatgaacttggagaagtcacttaatctctgtaaccctcagtttcctcatctgtgaaacagggcagtggcttgtagggtggttttgaggagtaaataaaattgtttagcatattccctcatggtagacacctgaggatgctaatagtaacaggttcattttatgtgagaaggcatctggtgtggttaagatcttgggtcctggtgtcaggctgcaggttcaaatcctggccctgccactcattagctctgctctggtgatcatgtgacttctctgtgccacggtcatatagagtgaccatgaggattaaatgaggtggtctatatgaaatgccacactgtgcatcttcaaagacacaagtcccagttttgccattttgaatttcatttttttttctgttttgtgtccaactttactaaaacatttgcttataatggggaccttttttcttttaatgtcacagatgatatttcccgtgtcaaactttcggtccagacccattcaacggatgactacatcaatgccaactacatgcctgtaagttgggggacggtctcacagcactggactgtttcgatgaaatcttcagtgtgctttgcttctttctgtttctttgaggttgactatgtgctgtttcccatttttagggctaccactccaagaaagattttattgccacacaaggacctttaccgaacactttgaaagatttttggcgtatggtttgggagaaaaatgtatatgccatcattatgttgactaaatgtgttgaacagggaagagtaagtatcttttttagtttttaaaatttaaaattacattaattgctttttattgtggcagaagggtatcttaaaaaccatttgtttctttaaaaaaactcaaacattagcactttattcttataaacttgttttctgtctttttttccccrtaagagaaatgtttaaaaacattctttaaacaattctattttgtcattatcttttttttggacaaatatcagtgtcttctgtttattacgttgctgctggagttagtaaatagcaaaatctcccaggcctagtgcaagatgctgttcacggtgtggctctgttcttcattggccccatgaacacggacaagcccatcatgtctctaagcaaccggtgtcttcatctgtgagatgagggttttcatcagctccatgattttcaaatttaggttgagcactgaacccctcctgcctccaccccaggtttttttttttttttttttgagacagggtctcctctgtcagccagcctggagtgcagtggtgcgatcatggctcactacagctttgaattcctgggctccctcccacttcagcctcctgtgtagctgggactacaggcgtgcaccacatgcctggataattttttttatttttagtggaggcaaggtctcactgtgttgcccaggctggtgtcaaactcctgacctcaagtgatcctgcttccttggcctcccaaagtgttgggattacaggcgtgagccatcacacctggcctggaaccatttctttaagcaaaatctcagacttatccctggataagcctcagcagcctcctctctcctgcaacgtcctgaaatccctcttctgcttccatcaaagataagattttttttttttagatggagtctcactctgtcgccaggctggagtgccgtggtgtgatcttggcttttgcaacctccgactccctggttcaagcgattctcctgcctcagcctcccaagtagctgggattacaggcaggcgccaccatgcccagctactttttgtatttttagtagagacagggtttcactatgttggccaggatggtctcaatctcctgaccttgtggtccacctgccttggcctcccaaagtgctggattgcagatgtgagccaccgcccctggccaatattttttatagtaataaaattctgcatttccatgaattgatgtgaagagaactgaaaaacacatgctaatctaaaaaaatgctgtgccttaggaatgggacttaatgttgctttatgagttgtttttaagtgtaggttcattgcttgaggaataggattcgattccttaagccagtggatctcaaactttagcatccatcagcatcaccaggagggtggttctaccctcagagtttctaattcggaattgcgtttctgccagtttctgggtgatyctactgctgtggcaccagggtgcacacttggagtggtactgtccccaggatagtgggagcccttcaggcatcatttcttttattgttctttaattcatggtaagctagcagatgtttatccagcccctggtatatgtaagatcctgtgctaggggctgaggatggaggagggaaagataacagagcagtaagagatgacgcccatcctcatgttgcttgtgatagagggtgggctccttaccctcttgttgaatcaggagaataggctgtaatagaaataaaagcgtttttaaaatgaatgctgataggctgggtgcagtggctyacagctgtaatcccagcactttggaaggccatggtgggcagaccacctgaggtcaggagtttgagaccagcctggccaacatggcgaaacccatctctactaaaaacacaaaaattagccaggcgtggtggtgcatgcctgtaatcccagctacttgggaggctgaggcaggagaatggcctgaacccaggaggcggaggttgcagtgagccaagattgcaccactgcactccagcctaggcaacagagcaagactctgtctcaaaacaaaacaaaacaaaaaaagaagaatgcaaataagctttttaatactgttgagcccagggccttatacatgaaacattcttataaatctatctgttagacaaacaaaaatgacataattacattaatggagaacatgaagatgaatttaaatggtcttttgttcatctaaaatcaagattgaagttagtcttagtgaccctgggtgaatggggaagggagtgtattttctgcactagattctccatatatgttattttttttctgtaacaaccctgtgaggtattatgatttcatagatgaggtaactgaggcttggggagtttaagaacttgcccacaaggtaggaacaaaaatatacctggtaagaggctgagctgggaatcaactccatgtcagtgtgtatccagatcctgggttgtttctttggaacctgggtctttaaagaaatacagatcccgcagccagagtcagaatctctggaggtagaacccaggcatctctttttaaacaaaacaaggccaggcacagaggctcaggcatgtaatctcagcactttgggaggccaaggtgagaggatcacttgaggccaggagttcaagaacagcctgggcaacatagtgagacccccatctctacaaaaatacaaaatagctgggtgtggtggcacgtctctgtagtccaaactcctctggaagctgaggtgggaggatcacttgagcctgagaggttgaggctgcagtgagccgtgatcgtgccattgtaccccagcttgtatgacagagtgagactgtctcaaacaaacacacaaacaaaaaacagaaaacaaaacccaaaacaactcaaacttctcaggtgagtcagataatcaattagctttgaaaactaccagcagtagagcacaccttagaatactgagtgtgtgtgcgtgtgtgtgtatgtggggggtgtgtgtgtgtgtgtgtatgtggggggtgtgtgtgtctgtgtgtgtgtgtgtgtgtgtgtgtgtgtgtgtgtgtgtgtagtcatttgccaaatgggtattcagatattcttggagagcaggtgtttcctggttatttctgttcacatctgcccaccaactttatagaaatcaaagaccccagaatgatttaatttgattttctttattggtgtgtgtatttgtattgcaaccgatgtatatctgaaagccttgggaaaaagtcctcatttcttccagctgtctggggttatgggagaagatgaggtcagtgaacagttgtggtggctactctaggggcaaagggagctggatggggactgtgtcctaggtcaagggacagctgctgctctgctctaaatcaattttcatgctgaaagcagggcctrttgtaggcagatctgatttttaaagagaaaataagtctggatttttatgagaaattttaagagttggcaagaattgtaaattaaaaaaagaaaaaacaattccaacaggtgctgtggtgtgcccatagacccagctacttgggaggctgaggcatgaggattgcttgagtgcaggaattggaggtggtagtgtgctatgatctcatttgtgaatagccaccacactccagcctgggcagcatagtgagaccctgtctctataaaataaaataaaaaaattcgaagggtcaaacaaaacccaactagaaggtctgattccatctctgatgccagttttcaatagccagtctcccttgtgaggttttagtgatggcagatggcatgatctgagtcttcttataaaaatgcaattttgttctagaccaaatgtgaggagtattggccctccaagcaggctcaggactatggagacataactgtggcaatgacatcagaaattgttcttccggaatggaccatcagagatttcacagtgaaaaatgtaagtaagaagtcaggatcagttgagctcatgtaattaccatatgttaatttgggggtgatatgttttaggttgatattaactaatatgttttcctatgcagtgagaaatgttttgctkctttcctttcagaacagaacaatccatatgcatgtatactccaaggcaaccccttgacttttctgggaaatttactttcttgggaataacctaagttattkctgaataaaatgaatcttaagagcatggctctacatcaggaactctttcctttctttccacttccaggtgacttgctcatagattttacagaacaaactgtagccttttggattatttggttagaaatatggcatcaggagcggccacttgctgttaggagtaattgataacagttacattaataggattccagggcatatgcacatggcctyccttcccctcaaaatttacaaaagcaaatccaattaaattgtgcaggcattctaggaagtcaagtttatgtgcyttttttctttttcaaggatgctttgaaaatagaggcagtgccatgaagcagcattggtatctgttgatgggtgtgtgcattggcataactctctgctgtttatatcacaggcctaaacattaggcatrtgctggcttgaagtctgagactatcctaaggaaataatctgaaatgcaaccaaaggcttattcagaaagacgagtctcagcattatttataatagaggaaaactttggaaaccatgcagacatggttttgtagcttttgtagcttttgcagaatggataacttaactatgactcgtctgcttataatatcattattcagctattagaaatgatggcccaggtgcggtgattctaacctgtgaggctaaggtgggaggatcgcttgagctcaggtttgagaccagcttgggcaacatgctgaaactccacctctacaaaaacaaaaccaaaccaaacccaaaaattagccaggcatgctggtatacacctgtagtcccagctacttggaaggctgaggtaggaggatggcttgagcccaggaggtcgaggctgcagtgaaccgagattgtgccactgctgcactccagcctgggtgacaaagcaagacccggtctcaaaaaaaaaaaaaaaaaaaaaaaaagataaataagggatgggtagactatataattaccatggggacatggtaggatgtaatgtaagagaaacattctaggagatgaaaatgtatgcatattatgaatagtgcataaaaggaaagccgggaagtatagattcactggagttgaatcttgaatcttttgggtgggttttgggggttgatgggttagggtctagtttatgagattatccttgaagattccacaagtcatggataaagtatagtatattaagtagtaattctttactaattgctgtgtctcaaagggtctggcctcaatatttcagttcctcctctggagatgccatcaaagctgttaccatgatctggccacctaaataatgcagctcacagtagtagaaaaatgtcatgcttatttcttttcttttcttttcttttttttctttttttgagatggagtctctctctgtcatccaggctggagtgcagtagcacaatctcagctcactgcaacctctgcctctcgggtccaagtgattctcctgcctcagcctcctgagtagctgggactacaggcacctgccaccatgcccagctaattttttttgtatttttaatagagatggggtgtcaccatattggccaggctggtcttgaacacctgaccttgtgatccacctgctcggcctccaaaagtgttaggattacaggtgggagtcactgtgcccggcctgtcatgcttatttctatagattttgctcatttgaactgactggcttctccttggttgcctccactgcttggggcttaccttgtggaggggaatttaggatggagttgtccacatcatttttaaaaattgctgttactatgattattattttttattaactaaactccagactttattcagatttcatgtttttccactaaagccttgttttgttcctggctctgatccaggacaccacatggcatttagtaccatgttattttttaattatacaaaatgcctgaatacattttcctttagaaaatcgagaaattacaaacagagctaaagatttcctttgactaccacccctaacctgagcccctttgcccctccacgaagataatactaagtataaccctcctcacttctccctcttcctctccccctccttctccccttgcccgctcccactccctttcctctccctcctccctctccctcctccctctccctccctttttcttcctcttcccccacctccatctctcacagctggtttctgtctttggatcagtacttctggttaaatgtgtgaatgttaactttatctgtgatgaggtcttctagcacctctcccttcactctgtctgtttttcctgttttccaaattttgaatactgcacattcttatcatgaatatacatttcaaaaaatgagtgtcaaagggcagctgtcataatggagatggaaatgcctgcagtgcagatgtaggtcacatgggtacggatgtaggtcacatgggtatggtcattccctggtatgggcataacgagtacagctgagtcagggacaggactcgccccagctggggtgggcttctggtgcttcaaggtatatgctttggtatgaggtagggaaccagtctgtgtaataatgagctctattgtctttcagatgttgaaatggatggttttttgggggagtcctttctcagctctctccaattctaaatatttgcatggtgcttgctagtggcctgtcactttattcacttctctaggggacatagtgaattatgaggccattcttgcctagaaggcactgattatcatggtgtatttgagtaaattatttttggttttattgtcagtgacattcccaggggggctcggggatggggctcatgcagctctaaggaggtgcaggtgtaagaatgtgagttcattattgataggcagctgtggcaggaagggaaggatctgaatgcagaattggaggatgagggacttctgttgcatctgaaatcagtgttgrggaaatgacttcacttctgtgaatctctgctgcctcatctttaaagggggataataaactctccttcttgagcatattgtgagggtttgatgagcaagcactttatcagctgctgtgcaaatgtaaagtttaatttttagtcattacaactcctggttagtactcaggctctgcttgatttcccctgcctttttgatgttgttaggcagcctttctgtctgkatctaaatcattttctgggcttttagatccagacaagtgagagtcaccctctgagacagttccatttcacctcctggccagaccacggtgttcccgacaccactgacctgctcatcaacttccggtacctcgttcgtgactacatgaagcagagtcctcccgaatcgccgaytctggtgcattgcaggtacgcagatggcacgtcacgtgtgacagatttcaaatgtcattatatatttatgagcactttacaaaagcaaagcctaagagggaatgtaataggcatttatgaattcaggaaaggtttggataaggaaccatggacttactccctaagccctgagcttccaaaacaggggttggcaaactgtaacccatggatcaaatctggtcagctgctgtttttgtaaataacattttctaggaacacagcatgcccatttatttatatattgtttatggttgcttttctgctacagtgacagaaagagaccatatggtttgcaaagcttaagatgttaactatctggccctttactgaaaaagtttgccaacccctaacaataagaagttagctttgaagctaaaggaattaatttaggacagaagacaggaggggctctgttgcccagtggggaaaaaatggctaaaatgtgccgccatcctgggttatgggcaacttgaatggaactgagattgaagaagcttgagcaaagggttatatgtgtggcatctgactcaaatgtgagtttgggacttaggccccagtcccaagctagtgctgtctgacttgctgaggcttcaactgagcaaatgtgtactgatcctgtgcattgccctcaaagtgtgacagtgaaggaaagcaagatatatgtacaaatgaggaactctaagagggttgcagtcgagggaacccactgtaataggcttatttctcttttctctcagtgctggggtcggaaggacgggcactttcattgccattgatcgtctcatctaccagatagagaatgagaacaccgtggatgtgtatgggattgtgtatgaccttcgaatgcataggcctttaatggtgcagacagaggtgaggccaagatctgtatttgacattccacccttcccctccatttnnnnnnnnnnnnnnnnnnnntttgacattccacccttcccctccatttttttttttttttttttttttttgagacggagtgcttgctctgtcgcccaggctggagtgcagtggcatgatcttggctcactgcaacctctgcctcctgggttcaagtgattctcctgcctctgcctcccaagtagctgggattacaggcacrcacaccatgcccagctaatttttgtaattttagtagagacggtgtttctccatgttggccaggctggtctcgaactcctgacctcaagtgatctgcctgcctcagtgtcccgaagtgctgggattacaggcatgagccactttgcctggcccttcccctccatttttaaaaggttgcattgtgtcatgcacttgtgttaaaatatgtcacccttccagatctttccagctcttggctgtgaactaacactggatttctttgcagactttaagctgacttggaattaaattacccaatacaagtgacatagtagtactgatgtcagtaatggaactactactgagatagtgtcaggattctttaccttgctgcctctgactcattaaataatcttaggacatctttgaactttggcttccaggttttaaactcataaaactggtattttccagtctttgtttctaagaaggtctgaccatctttaaaataagctaatgaaacaaactcatcaaacattaatgatgtgacrtatcataatgctgcttaaatgttaatacagcaatttatcctcacccagacttgtacattttaaagactatcaattatcatagctacagaagggtggctgaccagcggagaaaaggaacacttaatatcyatggtatagtttctgtactactgctggatttggttttacccaaamtgttactgagaagtgtttttgaggcatgttttcaacagaacatattgcaaagttgctttcctcaaaggggtgaatgttccttgaccaggatgagagcagaatattaattttgtatcaggctatcgtcctgtaccgatttagaactctatgaatatgtgctgtgtttttgagtctagcagggaatgttctagatgcctgggtacattgcrtgctctggggtgagcttggtggttgttgtggaaagagtgaaattcaactcctgtgttggtcaaaagagagattttcttttttctgctataattatataaagtagtatttctcaatcttttatccttttttgagaaacatagaactcttatccctgctactagagtctaatctcttttttatattttgaaaacaatacttattcatatgaaagcatttgacaatatatttttctctcctcttttttttttttttgagacggagacttgctctgtcaccgggctggattgcagtggtgcgatctcggctcactgcaacctctgcctcctgggttcaagcgattcccctgcctcagcctcccaagtagctgggactacaggcgtgtgccaccatgcccagctaattttttttttgtattttagtagagatggggtttcaccatgttggccaggatggtctcgatctcctgacctcatgatccgcccgcctcggcctcccaaattgctgggattacaggtgtgagccaccgtgcctggcctcaatatatttttctctgactcttccttccccaatcctgcttcctggaggtagccaatgtttatagtttggtgtacatctttataagactctttatgtacatctgtaaacacacacacacacacrcrcacacacagtactttgaaaaaattggatgctgttttttttttgagatggagtcttgctctgttgcccaggctggagtgcagtggtgccatctcagctcactgaaacctcaacctcctgggttccagcgattctcctgcctcagcctcctgagtagctgggattacaggtgtgtgccaccacgcccagcaaatttttgtatttttagtagagacggggtttcaccatgttggccaggctgatctcgcactcctaacctgagccgatctacctgtcttggcctccccaaagtgctgggattacagacaggagccaccgcgcctggccagatcctgttttatgtatgttgcttctctgtgattttttttctcctcttataatatcatggatatttttctgtgtcagcttatacccttgtttcctcttttcttcatcactatccacagattctgatatacctacctgaaggatagtcctcatccagctccacctgatcatctccttttaacctcgctcctcggttgagcattacagttgattcttactctgtacagtctcactagccaaggcaatcttgttggacatttgattgttcgaatgtgtgtgtgcattttttcctctacatttcctccttcctttgcccttccctgagactgtggcatttttccttggggaggggaggtgtggagtgtgctcttctggttgagaatcattgaggaaggacatcttgcttctgtgatttcagatttcactgcaatgttgttacctcttgaaacatgttcgcttgaaccgtttgctgttgggtggatggggtttgggagttgggcgggggaatgacctgtttgaaaataattttgggtgctaatttctgggacccatgttcattttctgtctctctctttcgttttyctatcaggaccagtatgttttcctcaatcagtgtgttttggatattgtcagatcccagaaagactcaaaagtagatcttatctaccagaacacaactgcaatgacaatctatgaaaaccttgcrcccgtgaccacatttggaaagaccaatggttacatmgcctaattccaaaggaataacctttctggagtgaaccagaccgtcgcacccacagcgaaggcacatgccccgatgtcgacatgtttttatatgtctaatatcttaattctttgttctgttttgtgagaactaattttgagggcatgaagctgcatatgatagatgacaaattggggctgtcgggggctgtggatgggtggggagcaaatcatctgcattcctgatgaccaatgggatgaggtcactttttttttttttcccccttgaggattgyggaaaaccaggaaaagggakctatgatttttttttccaaaacaatttcttttttaaaaaagactattttatatgattcacatgctaaagccaggattgtgttgggttgaatatattttaagtatcagaggtctatttttacctactgtgtcttggaatctagccgatggaaaatacctaattgtggatgatgattgcgcagggaggggtacgtggcacctcttccgaatgggttttctatttgaacatgtgccttttctgaattatgcttccacaggcaaaactcagtagagatctatatttttgtactgaatctcataattggaatatacggaatatttaaacagtagcttagcatcagaggtttgcttcctcagtaacatttctgttctcatttgatcaggggaggcctctttgccccgrcyccgcttcccctgccccctgtasatttgtgctccattttttcttcccttttccctcccagttttctccaaagactcttctgttggcaacattttcaacccattggttgggtgagaatggcgactcaaatatcaccttgagaatttctgtgggtgggaatgggagaagcagaggaatcctacagtggcagaaatccttttcttgtccctgtattatcctttttctcatgtctgtatttggtatgaaggattatttaaaggtgcaatatgtgaattagtgattcatgatgttctaggtttttagtaacgttttactcaggttggcattttatgtgtctgtgtctgtatgtgtgtgtgtatgttcagaagcgtggcaatctgtgaacacttcagcgtgaattcagtgtcagattaatccctccttccccaaagtccactggctttcgtctctctctgccgtgacacatatcggaatctactgtatatatatatatatatatatatatatatatatatatatatatatatrcactaagctctcaaaaacagtcattcctatgaattgaggtgtacaaagtttgaatttgtatcaaagatgtaattattatttttaaaaccttttcactatactgctgctgtaattactttgatttttaaaatgtagattaattttttttttttgcttcaggtgtgtatccaccaagaatttcaaatttatgtggatttattttattggtacataatctgtaaacttcttaaggcattaacatgaaaagattttttctttttattttatattgtggctcaggttatattttgaagatgttttgagtttatcctccaataggcaatgaagttgacaaggttttatgaaggaataaccaagtccctggagtcctgtggctgttgccacagtaatgygtcctgctgtaaacaggacaggtgtgtcctgttgagaatgtgagcgggctcttccagcctcctggtccctcctgactctgccacgcccctcacctcactggcacttcgataactgactggacgtgttaatgggtcttttagggttctaaagggtgaaccacacttttaaagccccggctgtggttcggagggttagtgctgtatgccttttatttccctttccctttgaggtactgaaaggatgaaaaggtggtgtcatgttttggggagaatcttacttctcaaatggaaattgcactttttgctgaatcctttgcatttttttggtagtaagcagttcattgagtatcaggtcctcaaaggaatgagttggcccggctagggtgggccctcttgacctaacttcagagggggccttggctcagtaggtgtgaatcagggaagccacattgtcctcagggtgctgtatgaagctgggtgtgggcggattcctcccacaccttcacactggcctgcctccaactcatacagatctcggagcggtcggtacttcattcataggtccctgttcaggcagcagttctgtgggctgtggccctctcccctccaatatgtccgaaaccattgtgatgggtggcaaatcccagggagctcctaagccctgctctgcccacatcactgccacagagaagtcagaggaagggacttgttgctaaaaaatcctttaaaaggttaaatactttaaaagattaaagcaacataactgtaaacatatygtataaaaatgaaaaacacaggaaccctcttcccttccgcctggtgtgggcttgggaaatgggcaagcggccccagcaatcatgggaggaactcttgcgggggagcggtctgggattccaaatgggcaggtcacacgaaggtcacgatgcttctctgcatcctgaaaagggctggggacagggccagtgggggtggtaagggtatttatagcacagtgcttgaaaagggaagattaatgtgtaaatataaaggacacacaggctgggggttggtcagaggcaagaggagggtgcctctgagcttcaacccctcccaggaacaatgagctcaaattggaagagtccagtggaatcggggggatggtgtgagcrcccctgttcagtctttgacaattgcatacagaaaagcagctggtatgggtttgggtgtcaatgaaagggccaaagactggtggccagctggtttgggggatttgggccattgatagcatctcccaggaacaacgactttttgcctccaaagttggatctagtgatgatcagcaccagcaggaaatgacatttggtgtctgcccactgcagccatactgtgacctccagccagacttccgcctaattgactccactggatttgtgctctgttgagtcagaggctcccgggggttggggatcgaggggcgggggtcagctatgcagcccatcacgtgtgtttttcatctgggatgaaaaagcctggttctcttttgaaatgcttgattgtacttattgagctaaacaagtcttggtgactgttgttgatttgcctcaaaagttttaagtcctgggttttcagactactgtgtagcagctgtgtgtttaacatactgtagctttttctcccttgggggcacatacaaataggatgtgttgatgtggactctaaactgtaattttcctgtaactattttggaatgatgcatatttctaatgtttgttatacttgtacagagtattgctgttggttgcttttttttttttttaaggaaaaaatggcctgaaaacatttttttaaagacttacaaataccaaatataaaaaaatgtcaatgcattatgcctttgcttctttctttcttcttttttccttcttacaatgtgccaagcagtttactggcctgcattttacttgggcatccttaacaaaaacacatttctctttgggatttccggattgttttagttttctagggctgttgtaacaagtaccaccaactggtggtttaaacagcagagatttacttcctacaattttggtggctgaaatccagatgtgggcagggttggtttcctgtgaggccttttttttttttctttttttgagacagagtctcactctgttgctcagagtggagtgcagaggcgtgatctcagctcacggcaacctctgcctcctgggttcaagcagttctcctgccccagccttcaggcgcctctcttcgtagcttgcagatggctgtcttctccccatgcctccacatggtcttccctctgcttgtctgtgtcctaatctccttcttttttttttttttttgagatggagtcttgttctgtcgcccaggctggagtgcagtggcatgatcttggctcactgcaacctctgcttctcgggctcaagcgattctcctgcctcaacctcccgagtagttgggactacaggtgcctgccaccacacccagctaatttttttgtatttttaatagagacagggtttcaccatgttggtcaggctggtgtcgaactcctgacctcgtgatccacccgccttgtcctcccaaagtgctgggattacaggcgtgagccaccgctcccggctaatcttataaggacacgagtcatactggatcagggcccaccctattgacctaattttaccttaattacctcttcaaagacactccaaatgtagtcaaattctgttttagtgggggttaggacttgaccatatgagttttggaagggacccagttcagcctgtaacacatattcagggcaatttagtgaagaggaggcttggaggaagtggctgtgtgtcttaagattgtgtgtgttcccagaaggttggaggtatgagcctgcaggtggatggatacccagttggttgggggtgtgttatgatatagttagctctcctgggctttctgcttagggacagcgcttgggctgcggataaagtatccatcatcttcctgttttgattcaggccaaagttgtcccagaacttttctgcccacagtgttggtttagaggaggcagggagacactgtattgctgacctgttatctgcatacttaaaaaaaaaaaaaaccaaactaggctaccctgcaaaatagcacagcattctctgctcctagcacttagtttgataaaaactaccttacccaggtatagcctaggaattgagatattgtgggaaagaaaaaccgaatgatcacctgtggttttataaaatgtaaagcttaagtgagaaaacaaattcatagaactataaacagagaacaatcccaataagaattaaataagtgcatagaagaaaagaaacacaactctagaataatataatagtgggattaggagtggattttatttttatattcacctgtttatagtttctaacttctcccaatgaatatggagtacttaagagtaactagtttaaaacttagcacttttccctccttgcctcaaaaaagtgaagctacagtatagttttaaatttactagtcaagttacaaaattctttttttttttttttttttttttttggagacagagtctcgctctgtcacccaggctggagtgcagtggcacgatcttggctcactgcaagctccgcctcccaggttcacgccattctcctgcctcagcctccctagtagctgggattacaggcgcccgccaccatgcccggctaatttttttgtatttttagtagagatggggtttcaccgtgttagccaggatggtctccatctcctgaccttgtgatccgcccgcctcggcctcccaaagtgctgggattacaggcgtgagccacgacgcctggccaagcttccaagttctgatagccatcccatcccttctggggtttcacagctctatttggggctgaacgtggcagatctctggggcctccaacatgagagcttgggctttacattcctgcaggcaggtgaagcctcctgacccaaaaggtgagtagtgggcccctgttggggccagcagttttggatgatgccactagatggcggcagagaactgggctgtggaagcaatccttggctaggctgtggcagggcagtggagcacataggattggaaaagaaaccaggaggtccgtaaggcaaggctaaaaaccagcaacagggcgaaggaagcgcccttgccagcagctggcagctttccgtataatttgttagataatatgttcatggtaaaaaaatttaggaaaagaaggaaaataaaaaaatcctatgttgtcaccattcaacaagatgtcccccaataatcctcccgcctggtattcacatttttgtgtagcccctcctccactgtagcagggttggtctgtgtgactggtagattgcagagaggtgatggcatcccacttctgagataaaactgtgcagtttctctctcgctgtctctctccctccagcccccctcccacggcactctctccaaaaccagctggcatgttctgagcagccttgagagaggcccacgtggtgggcttcttctgaacctcctgccaacagctacatgagtgggcctggaagcagattctcaggtcagcctttggatgacagtagccctggccgacagcttgactgcagcctcctgggagaccccaagccagaacctacccagactccctgacttgcagaaagcatctgagatgataaatgtttactgtttcaaactgctctgttttgggataatttgttacacagcaagagataactaatatgggctaatatatcccaccacataggaaataccactgttaacattttactgtaaataattctgtaacctttagaattctcacaaacaccacacacacacaccccccatatgtgcacacatgcatacatcttcatcttcatgtatttgctttcatctttttgcaaaactggaatcaaacatgttcatatttctttttaagattaacatatttctttgagtaatatttctactgaagcgtaatacagacagaaaaatgcactaatcataggttggctgtttgaataattgtccaaaaatgaacacacccatataaccagcacccaaattaaaaagtatatacgaccagcatgccataagccaccttggtgccccctttcagccacaccctggcaaagctaaccactatcctggctgctaaccttttaagttggttctgtgctcaattttttgaaacttgcttcttttttaaaattaaaaatttttatttttagagacgaggtctcactctgtcatgcaggctgcagtgcagtggcactgtaatggctcaccgtagcctcagactcctggactcaagtgatcctctcacctcagcctcctgagtagctgggactacaggtgcgtgccaccacacctggctaatgaaacttgctttttttttttttgagacagagtttcgctcttgtcacccaggctggagtgcgatggtatgatcttggctcactgcaacctctgccttccgggttcaagcaattcttctgtctcagcctcccaagtacctgggactataggcatgtgccaccatgcctggctaatttttttgtatttttagcaaagacagcgtttcactgtgttggccatgctggtcttgaactcttgacctcaggtgatccgcccacctcagcctcccaaagtgttgggattacaggcctgagccaccgtgcctggctgaaacttgctttttatacttgacatattgtgaactctttctgtgttattaggtattcatcctgttcaccattttaagagctgcataatactccatagtatggacacataccactctcgagttaactactcttttattgattgccattagattatttctgattttactctcctgtgaataaggatgtggcatctatcacagtagccagatctttgcagacatcacaattaatttcttagtaaacttttctataaaattaatgaatcgaaatatataaaaaggtagggctttaggctggtcgtggtggctgatgcctgtaattccagcactttgggaggccaaggcaggtggattgcctgagctcaggagtttgagaccagcctgggcaacaaggcaaaacgtcatctctaccaaaaaatacaaaaaattagccgagtgtggtggcacatgcatgttgtcccagttgcttgggaggctgaagtgggggggatcacttgagcctgggaggcaggttgtgccaagattgtgtcactgcactctaacttgggtgacagagtgagatcctatctcaaaaaagaaaaaaaggtaacgcttagatgaaattctgctaaatttttctctagatagcaatttacactctcattatagtgtgtgagaatgcctgtttctttacagcttcatccacaatgaacattataataatgaacacccygcccccctccttttgtaacttgaataggcaaatgaaaaagaagcaaactgtgctaggcctttcttggattgctgtaaagaaacaccacctgagactgtttaattgataaagaaaagaggttttagtttggctcatggctctgcaggctatacaggaagtgtggtgctggcatctgcttctagtgagggcctcaggaagctacaatcacggaggagggtgaccgggagccagcatgtcacatggcaagggcaggagcaagaaagagagggtgacagatggggggacgtgtcacatgctattaaacaaccagatcttgcgtgaactcggagggaaaactcgcacttcaccaaggggatggctgtgagccattcacaagggattcgtccctatgattggagcacttcccaccaggccccatctccaacactgggaattatatttcttcctttttttttttctttgaggcggagtctccctcttttgcccagcctggagtgctgtggcgcgatctcggctcatcacaacctccgcctcctgggttcaagtgattctcttgcctcagcctcctgagtagctgggattacaggctcccactaccatgcccagctaatttttgtatttttagtagagatggggtttcaccgtgttggccaggctggcctcaaactcccgacctcaagtcatctgcccatcttggcctctcaaagtttgtgattacaggtgtgagccaccatgcccaggaggaattacatttcaacgtgaggtttggaggggacaaacatccaaacaatatcacaaactcaaaacttctgggagcctttatatggagttgggagcaccggttcgagtctcccacttagtgagggccacacatccaggatctaaggaattctgtcctgtgtttccacagctgcagtcttgggtgtgagaccaggtgtcatatcaggagaccaattttgttatgtcaaaattgcatgctcaggggtcatggttgtgtcttggacaacctgatccagactcataggccctgatgctgcagccttggcagtgtgagggtccttctgaggcatttcatgttccctgacatgggccatagactccctagatgggaagaatccgtgaaggccctttcaacaaatccactggtcctatccactccacctagcctggaggcttaattacttccagaacctttagagggagggagatggcatggctctttcttggaaagtctggaaggacaccatgggctagaggggacagacacatgcctcatgtggcctcacaggtcagcctaggacctgtgacagtgacagggagacaggtttggcttaacacaaggaagggccttttgaggagcaaactcccctgaggggtcagccctctcatgggagcagctcaggggagaaggctcagccttggctg

SEQ ID NO: 8767 - DNA, 438429 bp, Homo sapiens
  misc_feature (1)...(438429): n = A,T,C or G, or insertion/deletion polymorphism (see Tables 1-2)
ttggaaggtgaggcaggaggatcgcatgaagccaaaagttgaaaatcagcgtgaaaaacatagggagaccttgtccttacaaaaattcttgaaaattagcctggcatggtggcacttgcctgtagtcccaagatacttgggaggctgaagcagaagagtcccttgaatccaggactttgaggctgaactaagcaatgatggtaccactacactccagaatgggtgacagagtgagaccctgtctcaaaaaaaaaaaagcaaacaacaacaacaacaaaaaaaatcaaaacaaacaaacagtttttttggttgctgttgtttttttttttttttttgtaaaagacaaatgtaagaagtgttggtgcaaatgaagagataagggaacctttgtacgctgttggtgggactgtaaattggtatagccattatggaacagaatatgaaagttcttcaaaaactaaaaatagaactaccatatgttccagcaatcccacttctgggtatatatctgaaggaattaaaattagtatctcaaggagatatctgcactaccatgttcattccagaattgttcacaatagccaagatacggaaccgccctaatgactgtcaacagatgcatggataaagaaaatgtggtatatatgtctacaatggaatattattcagtcttaaaatagaaggaaatcctaccattggcgacatcatgaatgaacctaggggacattttgttaagtgaaataagccagacataaaaagacaaatactgcatgttctcatttgtatgtggaatctaaatcaatcaaactcatcaaaacctgagaatagaatcatgtttgtccagggctagacagtggggaaaatggggggattttggttaaagggtaaaaaccttcagttatatgataaataagttctggagatctaatgtatagcatggtgactattgttaataattatgcactatgtacttgaaattttctaagagagtagatcttttttttttctgagatggagtttcactcttgttgcccaggctggagtacaatggtgcgatctcagctcactgcaccctccgcctcctgggttcaggtgattctcctgccttagcctcctgagtagctgggattacaggcatgagccaccacgcccggctaagttttgcatttttagtagagacggggtttcaccatgttggtcaggctggtctcaaactcctgacctcaggtgttccacctgtcccggcctcccaaagtgctgagattacaggtgtgagccaccatgccctgccctaagagcgtagatcttaactgttcttatcacatgcacaaaattagtaactatgtgaaggtatggatatgctaattagcttaattgttctaattattttacaatgtatatgtatatcaaaacatcatcttgtacatcttaaatatatacaatattgaggcattatttgtcaattatacttcaataaagctacagaaaaagtaaaatgcccatagtttacagcataaaattttattactctctggctaattgaaacaattgtaggaataaacagaattaaataaaatataatacacaaaatgggcttctttgcttccctttctttggaggagtagtaatagctagtaggacttacgatttctgacatttgattttgatttccatgataggtcaaccagcacttacataggctgctcctttgagtatcttgaaaatcatgtgcatagttataaattatgtaaagttcaataaaactccattttgctcatgtgcaggctgctcatgcctgtgtcttttattaggttgactccaagatcctcaaaggtagaatatgtttctgatttatcaccattattcccaatgcctaccacagtgcctgatatacagaatggactccataaatgcctgtcaaatttaaatgaactattttagaattattctgggaagagaatcaatgtttaccaggtgactgatttattcagtgccaggcatgtccaatatattaggccgggcgtggtggctcacgcctgtaatcccagcactttgggaggccgaggcgggtggatcatgaggtcaggagatcgagaccatcctggctaacacagtgaaaccccgtctctactaaaaatacaaaaaattagccgggagcggtggcgggctcctgtagtcccagctacttgagaggctgaggcaggagaatggcgtgaacccaggaggcggagcttgcagtgagccgagatcgcgccactgcactccagcctgggcgacagagccagacgctgtctcaaaaaaatatatatatatatattatctcatttaaggctcactgcgatctcaagaagcaagtgttatccaccaccattgtagggttgagaattttgacgtagacagaagtaacttgttaaagatgaatgaagctcattaaattccaaactctatactctatccagtacaataagagtgccttccccaatgggctgctgtgaaggtcaaatgagttaatatatggaaagcatcagaactgtgtctgaaacataataaacaatatatacatctttgctgttcttattttactgtttctcggggtagatgataaagaaacgttcactgagatttttttcttatgccacacttaatacaaatgacattgttattttaaaaggaacaaaagaaaaaaacccctaattattaggtgacttatttcatgacatgtttagtacaacaacttaaaatgttcctttaagatttggtttagtttaacttgaaagatcattggtgggtatctacatgttatgcccggatttgagaaaagctttgcttgttacccctgttgaatttcagggaaatttgcccagtttccgtggtggacttgattcaacacagagcagagatagagtcttgtatttccattacttggccaagtcagtgtcattaattctcttcaaagtctgtaatcataatgtcaatagaaagccgaacgaagtgaaaggtgggtgaaggcggcaggttttataagtagggccttaagatgcatgtagatggtcttcatgttctaagcctatcctcaaagcattgagaaacttcaatgtttttggcagtcaatgagaatttagacctgtgcctccatcataacagttttttaccctcccttcccctgtttcgaccatgtcttctcagatttgtccctctttcctcagtattgagtttagactcttgagatgtgtcttcatagatgaagaaactgaagttaatcttaattgagttgcctggtaagcctgaacttcctacacagtgtagaagcatatctggtgtcaattgtccccactttctagaactttggaaaacttgtagagacttaggctagtttctctgctccccactcgtagattatctgtcacacctggaagtaggtagaaaccgagtagtatcagggataggacctccctcccacctttttggaaatttcatctgatcaactcttcttgcaagattgcatcctgctatgaccttacaaattgttcttgtctctatgtaaattgctatcttttcaggtgatgcatgacagcctccgtttgctcaggtctccatttgtacggaagctgttattatggaataagtttaatgggtcgtgaattttgtggagaaagggagggtctcttgatgactttgtatgtaccagccctggacctactggctccacaaggagtgcattaggctaaatatttttagcccattgactctggaggtaacaaccctaaatgcttcattaaattttcatgggtgagtgtcagaagctacgagaaaaaaaaacaccccaaaacagaaaagcacaaatccatcacattatctttgttattatacagctggaagacaggagtgtagccccaaaaagagtaacggtaaactttttaaggaagggttgcctgcctcttgctttccttttctgcacctgggtccaacagggtggtttgtgtgctgtgcgaatctacatattatgcacttgatttgattcaccaggctcctctcttctcctgcatttcaggcctctggagacaggtatgccacacaacaggaattttctggagttgaatctagtctcarggtggaagaattttcagaatgacccaatattttctgcgacttggtgtttctaggatctttgtgagctaggaccctaagcaaggagcaactgactgtgtactcgctggagccgcctcccgcacagcttcgaatcggaggattgtttactcccagtcattctaagagccgagtaggggagtcgcggggagtaagccggagttaaccgtggtctgcgtgctctcaggggcacgggtctctcctgaggactgacggaaacktgacacgtgccagccttctccctcccaacttgccgaactttgcctgggaaacctcagtcaaaacaggagccgccgaacctgcactggcggctgggagcgagcgccccctcctgccaaggggcgtgggggcaacatgccctcgcggagactcccctcgtggtttcgcccttcctggcactccatatatttgggtatgcatatgttttcgaggcttggataaaagggtagatcttagagaaaaatgagagaggccaggcggagctgcgtccagtggtggtgatgggggagaaaacactggatactttgtgacaacccccctcccttaccctctccacgctggcgcggctggggcggggacccctcgctctcggctcgtctctcccccttccacgctgggatggagagagagtgcaggggctccagaggcgcgactgcaagccgcggcgcccccgctcgctcgctcgctcgctcgctcgttcttccacctcctcgtcgccaccgccactcggctaagctctcggagcgcgctccggctgcgcagagagcgccccggagggagccgcgaggccggggcgaggggctcacggcccggcggcggcggccggggagctagcaggtgagcggtgccgcggggcgccgggcgggcgcggggggcggcggggcggggggccgcgggaggaggcgggtccgcgcgggtggcggtctcctccccctactctgacgcggggccggtggctcccggggaggatggacccagctcggcgctcgcccgggcttccccgggctgcagagcgcgcctgagtgccgccgcccgccgggcatggggagccgcttcctgggcggctgcggcagcggaggaggatgctctgggctaggcgaggtgaggcgcggcgggggcgcgcggcaacccttgagttcagcgccgcaggtgccccgcgaggacagggcgccggggagccaggaggcttcgctggagccccggggcgcggaggagggctcctgggacgcgccactcagcagtttggctaggggtgctgggaggatggcgactgcagcagtttttcgccttctccctccacttgctgggaggaaaagggcgacttctctttctctgtcctgccccccatccccgcgcccctgtctccctacttccgaccacgcgcgatcctgtctccagacttgtccacccctgacacgcgtctctctccaagaccccctgcgccctctttcctcctgcggtcctggctatatcggacctcgagcctgccttctcccgctgtcctgggctcccgaaactccctccctccctcgctggtggccagacccttttcctcattcggccgaaccccgttctcacttccctactcctccgtagcgctgagattcggcttcgacctctcgaaaaaccgactctatcccagtaatcccagccctttcgcgggcaccgtgagaactggatcccgcgttcctcggaccccggcctttcttcggatcctctgtggactctgttctctgccgctcgtccccctccatccactccccagcaccccctccccccacgcccagctagtcgcctccccagcccgcccctcttccttctctctgctccagactcgacgctctgacttggatgcagagagctcagtttttttttctaccaaggaaactttaaatctctgtggttcggctcataaagcaggcacacaagagggtgtcaaccgccgagagaacccagaggcagggagtccgagatggggggaggtcgtgtcgcggcgtctgaaaggggccactgggtgagtgtacaaagtaaatttcaaaaccagggtggctgctgcagccaggaccctgcctccgctggctgcgtcccgaggagtattattgtgacccctggtgggagggcgcatcttttctctgcactttttaaggcgctttttcttttctctgtttttgttttttggtggtgctggtgggcctgatggggggcagtgggcacaagggatcgctgcctggagaggcggacgccacttggctgctcccagacccgccagactgtgtacgtttcactccgtgtgaactacccccaacccccaactgcatcgcacaaatcctcattgttgggggtctgctggggcacttccgcttaggctgggagagtctgaaggaatggcgtgggggtggggaggccgggggcgcttggctaccgctccgctcttggcggcgggcggagtggagagcgccgcgacgcgggcatctgtgcgctccggtgtgtatgtgtcgccgagtctggggtgcgcgcccgcgtgggtcggtgtctgcgtgtgcgtttggatgtcggcgcacgcctgtgtttagctccattagaaagaggggcgatgtagggcttgcggtagcgagagcgcctttctccgcctgggagctggacgggggcgagcccgggggcgagccctcctgcgagctggatgctccagtgcagctcctagccagccggcrgggaccggggcgagaatccgcgccgtcgtttcttcctccttcctgctcccttcctgctggccggttaaatacactttaacagtgttgatagttttgaataaaggctgtgtgggggttccactacactttacaacacttaacgttttcaagtaatcatatcaattaaattaaaggtggcttacgttcagaaccgcctaattatccagttcacgttggtacatttatgtgccaattataggtctttgggaaatccataaaattacaaaccatccccaccccttgaattagcacccattgtttttgtgatctccgtgatgagtgattctggatggcaccggaactgcgcaggcactaagatagatgggggttcggagatgtcagaaggagtaggcacccccccccgccacccccccccccgccaccccccatctctttcactccctatcctgacaaggcttggtgacaattctgggaactgaaagtgatcaaagattttcttgatttcctattgagaagggcacctaatcaaagctgtataaaagtcaacttctaagcaatcagaaattgtctgctgatgtccttgattgaaaccccagcattcaaatggaatattgaagaactcgcagaaatgtcttttgaagcgctattgttcttttccatacacaaaggctctcttaaaggtttaggaagttcaaaatgcagtggtttgaaaggactgactttgtaactatttggcaacgctgggaggatccgcagggatgagaaaagaggccgaagtgggaagtgcaaatatgttgtgaccatcttcttgggaacggtgctgctatcaagtaggaattcaattctacacatcgagttggcaattaaatctcttcctaaagcagatttagaagatgatttttartagtttttattttttaatggtttgcttgaggtctgaataggcatatctgaaacatttaatcatgttcattgtattcaacgataaaatctgaataaaaattacttattgttgatgaagctcatctcacaagctgtttcacagtatgtttcatttgcaagacacaccattgtgtgaggctgccgggaagagattgtatcacttattgttcattttctcctcccaacccagagaggaatattcttcttcattcccctttgccctccaaagtaatttttcttaaatgggtgagtgtttggcttggtacctgatagtacccatctaaaaaattgcatttggtagatttaggatgcttggagccaccctgcaggcagatgaagaatctaatggaggcagcatttcattttgataattcactcaagtcaaacattttgtttttgctgggatttaatccttctctcaaactaataaagcaaacaaagcaagaaaatcacagtttatgtctcttagatggcactttaaaaatagcataaattgaagggtattgtccggaactttaaatgttatttaggacttactgagacaaagaatactcgtggttgagttaagcagttgaggatgaatctcaacttcccagaaccttgctttcatcatctgcaaaacggacaatattacctaccttgtgggtcttggagcaattttatggrgaaaatcatatgattgggtgctttggcacrtagcaggatttcaagagaatgatctcttagtaatagacagcatggaattctgttcaagaaagtggatggcatttggaattggaagaccaggattgaatccagctacttctgactttgtgatgtttggcaagtcacctttcatgttaataaaaaagaataattaacctttatggagtactactaagagtcaggaatgcttctaagcactttacacatattaacttatttaatcttcagataaccctaggatgtggatacttgtattctcatttgtattagctagataaggaaactgkggcacaggaagatttggtaactggcctgagattacatagcaagtaagggatggaactaggatttaaacctagccattcttgttccagggtctgtcctaaccactgttatgctgcctctgagtgaggaagtgatcccagctagctcccagggtgtaaaatttaatggagaataatgaaatagtaagacttctataggagcaagctacatatttccccatttttggatgctagcaaacaaaatgggtgttaccttatcatcaacagggagtggggcaatgataggcactttgaacacttgtgactctgtggcagtttctatcaggcattggttagtattggttcacatctatttactctgtgaaaatgtttattaattaggtaacaattagtaatcaattagtaaataattgtttaggcaattagtaacgcagaaacagcattactgcttttctcagttactagctgtggtaagcagagattctcaaactaaaaggtggtatagcaggtggtaaggagtctggacttcgtttctggactgactgcctggcttcagatctcagctctaccagctctgtaagctgtgtggccttggccagctaatctaacttctctgtgctttatagttttctttataatgaaataacagtacttacctcataaaattatgaagattacaggaactaacacaaagtgcttagaataatacctagcatgtaaagttacttagctattagtgttatctttcaaatgagataaaaacccatctcctagataatgaaaaagttttccatcattgatattctgagagttatgtatcccaatagtatctggtctatctttaggaagagatacattttaggattttaggcaaaggttttttttttttttttttaattggaaatatttccttacacattttggctctttgtgaagaggagttgtggaagtacacatcatgttaaaatttccatgccattttacttttccgcagttattctgaggaaagtaaaatgactttgattgaattctagaggtgtgtttgtcaactgtcctaatttacagattgaaagaatattaggcttgcagagatacgtaactttacagcccagaggcgccatcgcaactcaggattcttggactccttgtccagtgctcctttcactagaccagattgtctcctataccaggatagagacgtggcttgaaaatataaataaaacttggcagaggaggtgttgtcaggctaagagcatgagccagctagacattctgtactgaaaaaagcatgtcagtaggaaaagaaaacccctcctctggtatgtacatttatatccatgaaaactcacactgaactgaatctgtgaaatgcatatcaggatataaattcatgtaaaaaaatgaaaacaactcattaatcaaattaatcacctggatatttccctctgattggagagcaaatgttcagatttctttttctttgacatgttctttttatttttcttccatttagttttgagatgtgggaaggttttggttgaggaatcataaaactcctctggcatctattttatgaaatatgtagcatattctattggaaagaaattgcaagcttgcttttattattattattttattttatttgaagctgacatataaccaatctgcaatgccagtgggggagtctcataaacagaaaggaaaatataaataaaattctgctgaatagaagagatgacagctaaaatgaygaaaattttgtggtggtgaaggcgggctgtttaacttatggtataaaaataaggggatgggtcctcccaaatagttgtaagtagttcagcatgaacccaaatcggccmtcttgaccacctgtagtgagtcttgcaaattaccaaccccatgcatctgctccgagcttcatattgatttacaattttctttgttggtcagtctctgcatctcttgaatggactcatgatttgtttacttggtatccatcaattcaggtatctctttctttgctctttctctgtctctgtctttcctcgtttctatctgcctttgtcacattcagtctttatgtctctttgtttttattcatgttagtgttgcaactgaaaataattgaaaagctgtgaatatgcattgagagaatctgggaaattgaggaagaacattctggtcatgcacataaacatcacttctatgtccattcaacaaatgtttactgagcacctactttgtgcttgactctggctctgtgctaggcattgtgaagagtaccaagatgcaattgcacagtttgccatctagggacctggtttcatgcataaataactgttacagcaggagatgcgctatggaaaatatgtatacagctgtggaaccttctggaggtggtaatttactctacctggagaaaggaaaggctgggggaaggcttcatttcacctaggtcttgaaggctgaccaggagtttctcaaggcttaaaggcagttctgactgataggacttcatggacaaagtcatgcaagcatgaaggatggttattgacttagggatgggcataattgggtacagaggtaatgtagaacatgcatcaaaatgggtttttttaatagagcattttccaaactgtgtcccaggaaacactaatgtcccctaagatcattatgaatatttcaaaaggaagaaggctcagagggaaaaataagttccatgttcaaaaatgtttggaagrtattgaattatatatcctgttcttagtaagatgtggtatttactgatatgttaaaggttcagagattttctgcactaaagtcatttaactcatgaagaattttaaaaattcatttgccatagaacctttgatttcaagtagcatctctcagtgtcttatgaaatagattgggaaaaatgtagagaatcacttaagccttttaagagtagttttcattctatcatgaaaataatatgtgtgtgatttgaaatgtaggacagaatatttaacccatttatgcctagtgttcctttattggaatgctaagcttgtgggcgttatttatatcctactgctcaaggtcatcaccaaagtctcatttttcacaaaaarcaatttgcaacctctggcataaatgggttaagacacacaaaaagtataaataacaatataataaaaagttttgtacctaccactcagctaatgaaataaagccagttaaatacagttgaaacctcctggtaacctttctctgatcatacgtccccttctcttggcagacatagtcactatcctaaatttgataattcttttgaatatatttttccagaacaaacytaaacaattccactgaattctcttcactttctagctcattactgtatatataataaaaagaaatggtattttgtccaataattttcctgaaataaaggacatttataaactgtctagctagtcactacataggtaataagaaagaaatagtattttgcctaataattatactggaataaaggacatttatgaactacttagggaaaggaaatatagctgtyccttttaactccggtgtctggaatgtagtagatgctcaataagtttctgcttaattgaattgaattaaatgtgttcagtctgctgtggttcattaagttaatttgggtaaaaagattrgsgtaaattgttttccatagacaatattgaaattctttgtgatcagtgaacttgaaaatcattttttattgtgattctttattttgtaatctagatttgggagtgaattataataattatctgttgaaagtcatttctatgttttattgacatctcttaaaatcattaacaataactacttatccaaatctgtcctattaaaacagtcgattcactagagctatctacttccattataggaaaaattataaatamaactgctttcatccaaagaggaaattttaaaattgtaatgctatgtaattactcagtaccctgacatgaaatgcattgaaagtttatgaggttccattccttggggtccccaagaaataacttcccatcagtaacagagtgttgttattagatactatcatgccaacagaagcatctcttttgatatatgcaagggacatcttgaaaaaatttacatcaccttaaacataagtcatatgtgggtgacattttcttctcttattgtctcagactatattcatatattatggtatatatgtcaacatgtagagtgaatggcagaatattggtgaagaatgcatggtagaatgaatgagaggagaaaggaaatggaagactcacaggctcaccggaggaagcttttggtacaaaatcatggctgtgtgggagacagtagattaccttctctcatggggttagaagttgatctaccctagggttttctatccttgctttcactgatatatatttctcctggtagtttttgtagtagcagttaaatcccagcagttagcagaacaagaatgaactttgtggtgtgaatgatcataaacatagaaaaacgctgcacagagggtaaggaagagatgctgtacaatcctagtccctggtgatggtgtagcagtrcctataatgatggcatgtggtggtgcttgtcttgaattgcaggccatgttattctgagcagtattatatgtctactcacgaaagttctaggtataagccacayccattcaaatatactcaggttaaaccagtagtgctagtaatctaattgtggacaaagtcaaagatgggccaaccatatgctgaatctgagctatggcatgtgttgtcagaatatagttccaataaatgcaaaaaggttatttatgcctttgggaagctgaatagatttatagaccacatagaagttggatttttgccaaccttctgctatctaacttcttaattttaacgtagttgaatttatcaatcttttatggttagcactttttatgtcttgtttcagaaagccttttttttcccactctgatgtcatgaagatattctcctttgttrtcttctaaaagctttattgttttgtttgcctttcaaatttaggttctctaatccatgtggagtgtgtgcatatrktgtgtgtgtgtgtgtgtgtgtgtgtgtgtgtgtgttgtgtgaggtaggcatttattctaattttctttcatatggaaaaatgattttcctggaacttagagtcaatttctaagcatatgttttagccactcttttgccctaaccaaactttattatagctttttaatgaatcttggtattggccaggacacatccctaaaagtgtccttctgcaaaagtgtctcaagagtgtcttggcttttcttgggctgttttcttccgtatacattttataatcatctttcaaggtttcacaagaatactgttgagatttgatttgagttttatcaaacttatagnctgattaaaagataatgccatcattaggacattgagcctgagtctttctatctgtaaatrtagtaactctttccatttatttagttcttatttaatgtctttcaatacagtttataattttcttcaaagggcatgcactctttttagattgagttttaggtggtttatatttttgtaattgccattgtaaatgttatctttaaaattatattttctagctatatattaattttcatcatatgctacctgtatttcttattctaaatggcaaatagtcaggagaggaggaaaatcatgggtgtttttgaatgcttactattaaataaattcaggcatccatgggagatacggctggttccattccaggccactgcaataaagagaatattgcaatcaagtgagtcacacaaatttgttggttttccagtgtatataaaagttatgtttacactatactgtagtctgttaagggtgcaatagcattatgtaaaaaaatcaatgtacataccttaattgaaaatactttattgctcacatatgctaatgatcagctgagccttcagcaagtcataatctttttgctggtggagggttttacctcaatgttggtggctactgactgattaaggtggtggttactgaagattgaagtagctgggtcagtttcttaaaataagacaataatgaagtttgtcacattgattgactcttcctttcatgaaagatttctctatagaatgcaatgctgtttgacagtattttacccacagcagaacttttttcaaaattggagtcagtcctctcaaaccctgacactgctttatcaataagtttatgtaaatcctttgctgtcatttcaacaatcttcacagcatcttcactagaagtagattccatctcaagaaaccactttctttgctcatccataagaagtaactccttatccgctaaagttgtagcatgagactacagcaattcagtttcattttcaggctccacttctaattctagtcctcttgttatttgtatcacatctgcagttccttcttccactgaagtcttgaatccctccaagtcagccatgaatcaacttcttccaaactcctattaatgttgatatttagacttcctttcatgaatcacaaatgttcttaatggcatctagaatgatgaatttttttttttttttttttttttttgagacagagtcttgctgtgtcgccygggctggagtgcagtggcgcgatctcagctcactgcaagctctacctcccgagttcaagccattctcctgcctcagcctctcgagtatttgggagtacaggcacctgccaccatgcccggctaatttctttttgtatttttagtagagatggggtttcactgtgttagccatgatggtctcgatctcctgacctcgtgatccacccgcttccgcctcccaaagtgctgggattacaggcatgagccaccgcgctgggccacgaatgatgaattctttacagaatattttaaaattatttcaccaagatctatcagaagaatcactatttatggcagctatagccttatgaaatgtatgtcctaaataataagacttgaaagtcagaattactccttgatccatgggctgcagagtagatgttttgttagcagatgtgaaaacaacattaatttccttgtatgtcttcattagaactcttgggtgaccaggtctgttgtcaaggagcagtaatattttgaaaggaatctttttttctgagcagtaggtctcaacagtggacttaaaatactcagtaaaccatgstgtaaacagatgttctgttattcaggcttcattgttccatttttagagtacaggcagagtagatttcgtataattcttaagggccctagaattttcacaatagtaaagtagccagctgcattcacccctaacgatagagtcagtctgtcttttgaagctttgaaatcaggcattgacctctcctctctagctgtgaaagtcctagataacaccttcttccaatataaggctgttttgtctacattgaaaatttgttatgtggtataaccaacttcatcaatgatcatagtgagatcttcaggataacttgttgtagcttctatatcagcacttactgcttcaccttgcactttcatgtgatggaggtggcttctttccttataattcatgaaccaaggtcttctaacttcaaaattttctcttcagcttcctcacttctcttagccttcatagaattgaatagagttagggctctaaatcaggatttggtttaaggaaatactgtgtctkgtttsatctatccacaccactaaaattctttccatatccactatcaggatatttctcttccttatcagtcatgtgttcactggaactgcacttttaatgtcctttaatctatatcttgtttgccctgagaaataagtactggcagtgagctgcacagagtgggttgagatcttttcctttgcattcacgacttggctgtctggcacaagaggcccagcttttagcctctctcagctttcaacatgccttccccactaagcttaatcatttctagcttttgatttaaagtgagagacttgtgactcttcctttcacttgaacacatagaagccattgtggggttattaattggcctatttcaatattgctgtgtctcagtgaattgggaggccrgaggaaggggaaagtagacgggggaactgccagtcagtggagcagttagaaaacatacagcatttatttattaagttcattgtcttatgtgggcatggctcatagtgcctgaaagcaattacagtagtttcatcaaagttcacttatcacaaatcatcataataagtrtaataataatgaaaacgcttgaagcattgtgagaattaccaaagtaggacagagacacaaagtgagcacctgctgttggaaaatgatggtgatagacttgtttgatgcagggttgctacaaaccttcaatttgtaaaaacatgcaataactgtgaagtgcaataaggcgaagtacaataaaagtaggtatgtctgtactaggtgcttcacaggctctcatttgatacctagaaaagccttaaggaaaggactgtgggtgacttagcaccaccctcgacaggtcactgccctcctttgcagcctgatagtgcagagggcttaaaaggacatcttttgtcccaatgggccagtggggatgcggagtagggaatggagctaatgagagggtgatcgaccagggtagccgctagtcactttgttcaagaggccgaggtttttgaaagacatctctgggtttcctayggagagagaagggatctgcaaaggagggtacagttctcttctggttagacaccctgtggagtgtgaataacaggtgctggggcctgggggccagagtctggctgctgacacactactctggcatttcggatagaccacagttatttggctgcccratgggcaaattttggctggtagcccagttctagcttgacttttcaggcatatcttaggtcagtgaatgttattcccactttcaaatgaggagccacaggcctacagaaatagaaagatgagtccaggtcattaagcagagctagaatagagacccaggtctctgcacccaaaccagtgctctttccatttcatcacacggacttaagatcctcaaatatactatgtcaataatatagtcaaatactggcagggtttttgactatgtgaggaagcaccattatgtctggaaattgtaacatatatctgtaaaaaaatgggagagagatatttggtgattactatctgccaattctctctctgtctctctggtatcccttgtgccattaatctttccgtaagttcactcttactctttctccccaaattattttaggatccagggcagatattcatttccctccaacagtcatcccttatgacatcagtactggtgataaaatttcaaattcctcttcttccctgagcaaatgctgtaactcctttccccttctctcacatgtttcrttgtgttttctggaatgaaaatatatacagtactagtttaggttgatatgaaaaaggaygtctcatataaaacaagattaaggaaaagaaaagacaaccacttggttaacctgataccactctgatattttctgtgtgctgtctgtgggttcatgtgagtcaggctagatatcattctgtatatatttgactgttcagaatgtatcagtggagaaggacgtcttgatttgtttgagaagccataaatcaacacggctaggagtaagaggggcagggaggagggggacttggggactggactagcattgctttctttaaaaaataaaggtcatacagcataggctcaatctaagtttgacacctgcctctgcctgcctttccaaggtaygtgtctctttcttaggcctcttgagcaccggattctgttaaacaccatacttcattatgtcttcaattgttctgttccacatctattgatctaggttcctctaaagattgagagtttctgaaggctactatctttcatgccctttatacttggctttttgaagaaagtcagtttaaacacttgctacatttaatttttaaagtctaccatcactgtttttgtttttttctttttttacagtagagggggaagtgcccctgtagtgaactattttgagtcaatgaaaacaaaagaagagwtttctacattgagacatgcttttaatttcttattattcccaaactgtgctttttctttattttcttatccttttctgtcctgtcctttcattcttcctttctttcctttttaccctccagttttatcaaatcaaaggaattgcacgaaatcaacaacaaaaaggcctaaaggtttgtagtgcgattttacacagttaatagaatgtgtttgcttcctctcttgcatacatttttcagtgggggaggaagtttttgagagtagttgagaggtggactttctaattccttgtcaaatcccacagcatagttatgcaagtatttgacatgtgtgattgtttgcctggtggattatctgatgctagtttttgtttgtttgtttgctttttggagacggagtctagctctgtcacccaggctggagtgtagtggcacaatctcagctcactgcaacctctacctcctgggttcaagtgattctcctgcctcagcctcccgagtagctgggattacaggcacccaccaccatggccagctaatttttgtatttttagtagagatggggtttcactgtgttggccaggctggtctcgaattcctgacctcatgatccgcccacctcggcctcccaaattgctgggattacaagcgtgagccaccacgcccagcccctgatgctggtttaaagttaacctacagattgaaactctgtcagtcagtatgtgtggggtgtaaaagtgtctctctgtgctaaccctgaacacacccaaaacataacagccacactaccatgacttcagacacaatctcatacttttaatgacatgccctgtatctgtgacagccaggagatccataccagcttaataggaagaacttaatacaggaaagcagttacaaaggtgttggaagaactgaaagtgtgacaaagaagcgaaagacagagattagcagtaggaggaagccaacctacctctagatcagtaacactatctgctacctctgtggtatgatagaccccaggaggtgcagcccccaggaggcaggtggaacctttggaggacaagccacatggggaaaaaggccaggagttgggctgccggaagcatagaagagtctgcatggtgggagtgggcaccacacatggatgttctgaaaccatggaggagactccaccacgtctaggggtgctaccgtgaagcagaaagagaaaaagggagataaataccctgtcttcccctcctcccctcctgtcttttgccagtgtttcccagtgagtgaatctaactggaaatcagctgacaagggcgcctaagaaatgtggttaagatcaactttctgcaacactccatggagcaggggaaggggccaggagtggatctgagagaaacaggaaaaggacctgttcatagagcgggaaaataaacctccaacagaaatgtttgttaatattgtgagctacaggcaaacaatgaagggagacacttgctgtttgggattagctcctcatttctcctaccgtatcccatccatcctggcccttgcagaaaattgagagtgackcagctggcggtggactctgtattggcaaggcaagctgtgtgagtgttgggtgcccagggagtagggcagcagcagtgggaccatgcagtcccttttctgcaattccagaatctaaaaggctctgaaactcaagattttgggtaactcatttagtggtaaaacctatcctgacttgaagtgacatgaggctactgagaatctttattgatccccgtgagtaggaatagtcacccatttgttccagaagcattcatgagttwcattacggggtgtcacctcaaacccgggtagggctattacaaataaaagataaatgtggtgtagtatatgctgccttttctaaaatccaaaataaagtctgcattatgaacacattagatcccaggaaatttggataagggattgtaaacccatatttcaacatgaagtagggagaatgaatggaaacacgatgtgctagcttgcaggtctcagcagcgcttgtgtaaacattacagctctggcattcttcagttccctstctcagtccctgtagcctgacagaacaacccactcattctgtagaggagcagactttgcttagagaggagacgtgggcatacaatattgtaaagtcaccaaggagttagtagtggagtcagaaccatttatttcccgtttgctgtgcaagatgtttgctgtgtaaagtctgactctttggtctcatcaaacatttaaatgctggacatttagatgtaatgaaggaagccagcgggtgaatatctaggtaaatccacactctagcagtggtaatcttacatttgtcaagtatttcatatatgtacaamcacacacacacacacacacacacacacacacacacacacttcagatatcttcctcttccatcttcacaacagtcctaccagatagacaggatggccattcgtatccccattttacagatggtcaaatcaaggcttggctgataactagctctgtgaccatgggcaagactcttcactctctgggcctcggccgaaaaataagttcttatagggttgttttgtaaacacaaagaagtaacacatgcaacacaattgaactatacctggtacacagtgacatgccacacagggtcattcttctctccttcagcctttatcttcagacagtgaaatgcattgcacaaagtcacaccgctcttccctttgtaaaggacatgcctcaggatagtaaagagaattcagtagttgaatgatggcagaactctctctttgcttccgtttttattttttctttttcagctttaagaggaggggcttgaactaacgccatcytgtgctaactctctctttctcccttcaaaaactaggtcacgttttgctgtgaccttggtggtctctattgtcttcacaggttaggagacagtttgacattttgtttactccaaatcctactggcgcggggaaaacagtcaccaccacaaacacaatttgctrcagaaagcaactttatgtcttgtgagcacacatgggactttatcataattcactttagatgggaataataaaatattttcttttctgagtattttgcaagattaataaagctgcattcttagggaaagtttattaatccataacttacagaaaactccagaggaagtagatatgagatatgttctgtaggtaaaaatatcatgcatgtcactgctagaattgaattctgcatgcattcttctggttacattaccatttgctgatatgatggtgactttgtcttggacatgatctaaacaagcaactctttcattttatttttaaattgggagggtgtgaaggagtaggtggaaatacagaaaaatcacagcccacaggattcggatcctttctatcctgttggctgcatttcagctaaatttgacagaaaggcatgtgtttggacactgrcatctttgcatacaagctgtgggcactgggtctctgagatctgtcaaatggagattgcggtgctggtggcaatgatgatgcaatgatgaagatgatggtgatgaggaggataatggctacctcagtgccattacaaggagtaatgatttatgtgaaagggccttgtgctctagcacttcatccatttattcagtatttattgagctgctgcagggtacctggcagaattgtggaatccatggacattaccctataaaagccacagactttttcccacaagacccaggaagagacagggaagcacaaataaacaaataataatgtggtggctaagtacaaccaaagagatatttgtcgaagtaaaaaataaratatagggatgaattttgccagagtaagagtaagggagggttagtatctaagtattttgagggtgccttgggattttctggtgagtctttcatgcattaagtatgttctgaatactgtgctgggctctgggcttacagggtgaggtgtgatggaaacaatagctgccctcatgggctagtctgtctactaagacacaaaatcaacgttctccatcaggggaccatgacaaagttggaggcatgtgccatcacatatggggagtcccaggtaatttggtatgaatggatcataaagtggcggggtggcaggaaccaggggaaatgaggcagggaaggtttgcccagcaacttcacagagaaccttgtcaccaagtgttagcaatgagattttggttgtgcacatggatgtgaaatagcctttactttgtgtagccttctctgcaattaactttattttcctattgcctggggtcaaagagcaatctaagaagaaatatatttatttaggtgaaataaggatgtgtgtgtatcaggtacggtataatttaatgatccttcaggtgtctcctgttataagaactacaagctcagatgcttacaagggccaggtgtttgtgggygaaacagtgtgggtggggaccaggtaaaccgctgttaaggttcatctgatggttgcartaacagaatactggactcatgtaggtctttggctttttcaagaaaagctagacatcttgttttcgtgtgaaatccctctgtttaaaaatttggcactaaattaggtaaaacaaaaaatattttgtggactaaagataactggcctaagggcttttcttagcttatgaaccaccactggtgaattctggcctgttctttataattagtatggtatgactacatagatctccctcacgtgcaagttcagtcaatataccaaggggtacattggaccatttccggtaaaggaaaaagtttctgcaggatagcygaatggtgcaaattggccttcatttatttctgtgtgtttcctcaatcccattgtttgtttttctttatcaaactcttctgttacatggcacaagcttccgtgaaaccagtgtccatggcaattctggggtgttcttagctgtttgctggacagcagtgaagtttgtatctgtctaagtctatagctgccttaattcagcttgttatgttctgctaccaagggcatatccttgcagtgagtcaaatgcgtagttttagggtctgtaatgacagcattctgtggctttctcatttaagattgagataccagccactaaaatatgcacatttcaaaccagagcgagaacatgagcaacttagtagttactgtggaattgagtgaatgtcataaatatttatttatctttttcatagctagtataaaactgttaggatataaaaaagttgttcacmataaaaacaacagaaaattcattggctatacatcttttgaatgtgtgtgtctctttgggtkttcattagygtctagcaatatactttgagaaattaaatttgaacagaagcttcagcagaatatgaaaacttctagtgttcataattaacccattttaagcaaggatccattgcatatagcagtctcctgttaaccatgtagtggctacagtcaagtgtaatgaatttttctttcagtwtttttttctcaagaaattccttcttccttgttttttgaatttgaaaaacacaaaaaaagcataaaagagaaaaaaagtcatttatacttctacccagtggcaattgcttttcatatttttaattctagagagaaagaggctagggtttgaggtcagaccagcatgggttccatttcagtcttcttccttcacttaatcttgccaagtcttaattttctcatctgtgaaacgggaataaagatatcatctattttatctgctattttgattaataaaacagatattgcattaagyatttagcacattgtcacataaaaatgtttttaaaattagctattatgattatttttctattttttgctagacgtgttttactttgtgaagtttattctgtcaatacattatttttcattaaaaactctcattattcccatatctctttaaaaacagtttctaaatgtcctttttatagttccttaatakttttttacatgcctgtatcataatatacccttctctttgtatattaaagtcattgttaatttttttttaacataatgctttgatgcgtatcttaacacttggatgaatatcttcattcagtaatctcttgtggcagtttgacttcctggttagtgtggtgactacaccctccatctagaatgggcagaatgactgccatcattttccactggaacttttgacaatgatgggaatgttctatatctgcacagtacaatatagtagccactagcacatgactgttgagtatttgaaatgtagctagtgagactgagaaactgaaaaattttctacatttaattttatttaattttactttaaatggccccgtgtaggtaayggctattatactggacagcatgggcttatatcattctggttcaaagaatagagtgaacgtaggctgggattttgttttccatactgacatatccataaaaaatttgtttttttctggtcttttaacccctagtacagtctcaagatactgtatttttcctttctataccttcttttaattttgaaggaaggttggtagagggtgcctcccatgcctgctaccatgttaagttagaggcttgagtttagaattttgactctatgtgggctctttaggttgttaatgacaaaagtctagcttattctggcttcagtctgcaagagagttttctggctcacataamcaagtccaggtgtagcctagttgcagctatggctagagccargagctccatcaactgtttccacaccacagctttgccttctcagtgctggctttgttagtaagtaggttctcyccaagcagtggcactgatggccaccagcgatccaggctcaaatcctactagttcagcaaccctagcaggagatagggctttttcccaatggatccacagaatggcctaaggctggctttcagtggacctattctcattcctgaaccagtcactatggtcaggattgaggaggtagaattcatactcaatggccgggactggacctctgcagccagacggtgaggtcagccccaccaaaatgtatggactagaactgggataagaaaatgatttcccaaaggaaaatcagagtgggaaatgcaggtttataacagttgaataatctgayctgtatctttgaagccttcttgggtctcccagttttcttcttgggaaagccagtttgttgggcaggggttgggggtgaggggagctggattttctgtcctgtgaattcaatctaattcacatagcaggcttctatcatttaatgggaccattcttttattcagaggaagggtcctgggatgcatctttcaattattagagcattgggatgtttggattctgtctggtcttgctctgtctktgtttatgacagtatacttgcaagctaatttctcctctctaggaagtaggtaactatgccccagagagttaacaatgtaagtaaatcgatacatctattgtgattatttttctttatgaatraggcagaaaatatattgcctaagctccttcttagaagaatctgaatcaaagctgatgggatttgcatatcagactccagataatctaggaatcaggtagagagtgggcacttcagtccccagctggtgtattgcagcaatatcttgggacttatgggtgtaattaaaccatccctattagtaattacaaaaaaggactcactgcccttaaacgtgactgtaacatatcacatctttgtaaaagcatgaagctatttatttaatcagcaaagtccatgtagaaaatgttttattaatattccaattttctgattcaaccctttgtgtaataaaatatggtgactaaaacagtttcctttttactgctcttgctcagccttataagagagattgaaattttgtarcaccatttatgccaatttttttaaactctccagcataaagcatatcagcaaattaatatttcctgactacaagatgagattgacctcataggtataagttcatttcttgttctaacatctactgtaccgtgaaattagaggtctttttctttatctctgtctctctttttttacctcattttcattgtggcaagactgctaatatatcatcaacttttaactagtaagtcactattgtataatggtgtcattatgcaatgtcatgaacacagcttactttttagtgttgttttattacagctggaatcatagagaggttctccaatgtttgaaagggacctaaatgatgaagctcagttttagcaaatctccatggtcacctctgctgagtcatctatgctgaattgagttacctttgtgcaggcaaaggaaatgaagccctggcaggctgtgtagcagagagtcctaggataaagtagaatgtatgggttctaatctcaggtctgtcggaaaatctgtgtgtccttgaactgctgacttgggctctctggacctacatattctcaattgagatgaaagggtttggatgggtgatcactaagatccctgctcactgtgtgattttatgyatactgtgatgctttcatatcttcatatctctgcagtaatgcttaatgactatagttgggagttgcaggcactctctcagaagccttcccagacctaagctctctccatccctgttcctactgtacttttgacagatgacattgtatatcagagtgggtgtttgtatgtgtgttgccttcctaccagcctgtaagggcaggtatcttttcatatatgttttttcatttatgaaagtattttgaattatgcacttaataaatatttagcaaccacatgaataaactacattgcattttagagatgttatagggaaagagaaaacaagatacaaataggtctgaaaggagattcctatatagttgttgtgaaattgcttatatacttataccatgtaaaataaattcagtcgtttctttgggagatttcatcttaatatatatgaaatgccaaatttttccagttgagtgtagaggtaaatcatttcatgcacataattgaatgcttttatacttatctgattatttagcaccttatggtaggaccgtgctgtgctactaatcatgtcaaaatatggcctttttggtggtaagttcctttcrgcacttttttttttttttaagagagagctttcacccttctcactggtgtttagagactgtttttgcatggcgtctgggaaagctggtctgcaaagcaagacgatgtgaatacatctccccaaatcaatgagaattgtgctgtcctctagaaaattaggtttgagccacatcaacgtcagtgcctgagacggaataaatcccatttcatgattgctctttgtatgacttgtgtaatgtgtctagatgggcacaagctatgattgcttctctctccccagcattactagatggtaatgcagtggatttktgtgagaattctctcaaataaacaggccaggatacgtgagataatttagggcccacacttgagagacctccgtggaactgtgtaagatgttactattaaccagaaacaatgtgaaaaatactttttctggcttgttaaaaaaaaaaaaaaaagactgatactggcaagtagtgcttgaataatcttgcctcatatagtgtcatggtaggtccaccatggttgtattagtggaaagaaccatctactttgcacttattgggagtttatggacaggcaggtacctctcataaactttgttcattcagccacttgaaataagccacgtggrttatgtgccacgcaaaatttcagtaatgggttttgggagtgtttagatagcaacaacttcatagactgaaccttttggtttttttttctttctctccaactcagaggttaaaaattaacctgaaaaatcmatgctgcaatatgaatgcgctgtatgtttcttgcatggacttgcagacactctgtaacggtgtttccagtctccagcagttcatattggaaggtgagctttcacatggacaagccytttgcgttgccaagtagtagtgatattacaagtttgaaagacatttagatgataattccaaaggccctcttatctccaaatccatcagaagctacctataatttcagtgcaatgagtgctgggcataggtgrccattcagtgagtgagtaccccaacctttgggaagataagacaggctattctaatccagctgtacccatatagagcaattatcattttcactctggctcccaatgccttagatttactgggtcttcattgcaaggcaggaaccttggagttaattgaattcattggactatttatggctggagctgatgcatatgatttttctctcttgaatatgaatgatcagcttccatgggaaagcaacaataaagtcagtccaagctgtgtagcttactagctgtatgaccttgggcaagtcactttacttctatcagtctcatttttcttatctgtaaaatgaaggcttcttaccattgacgttctaagatatatagataagattctggtttttaaaatgtgcttactagaccagtgagctgatgagaggcatttaggtcatatgtactctccagattactgggattcttcaacttggcctaccttctaaagcatatacttattatacaagcaaatatgcctgtcagtgtcctaatttacttcagaaatgatttaagcctagaatcgcaggtttgaattaatattaatatttgatttaattaggacaattccatcttgagatcaggaaactatgccatccatccatccatctatcatgttatggtcttattcagtatttattaatattaagcacctgctatatgcttggtgctgtgcacagtgctgaggaaacaaagaagaataagattcagtcgctgtccacaaatctctcctcaccttccacaaagaaaaaaagaccctcacactaaaaaccagttgctcttaatggcattgccttttggttctgtgtggctggcatcatgttaatggtgagttggtgacctccaatagaaaagaagaaaaaaaaagttcctcaactctggcttatgcaaacatctttaatcatttcaagcttcaactacagaccaaattggaaggaagagctgtgaaaagcccatttataaacaaaagcccggccaggagtcggactgcatttccccagaagaaggacttcaataccaggagagcacacattcaaaaccctaagccagccttcaagtcagtgttcaaaggaaggaaaggccacacagaaaatgaaatgtaattgggtaccctgtgaggaatgggacaaaacccaggaagccttgcaaagcttcagtatggctgtccccaagcccagaggcggcatctccagccttcagacagtggcaaccgtgtatgttgttaagacgtttggggagttatgaaatgcaggatagaagagtttgcccctgacttgtaaacatggggtgttttgcctttcattttaagataggaaagaaatacatttttwaaaattaactcccaaatcaaaagatgaaagtggaatgaactatttctggatagggagaggtttggagtgtcatttaacatactgactgtctctcagcaaagttcccaaaggggagaaaaatattccgaaacaaacaaacaaataaaaaacaattaagtctctggcatcatttaaaaagacccctttcctgcaagtttttattatctgctttttcagcatcactgcctgttgaactcctccttatctttcaatgccccatcagttgctctcctttccctcaggcatccctagatcctctcagtctgaatgaatggctctccctctgtgctcgagggcactcacataaggccccatgttctagttattcatatacatgttgtcacctccctaagatggtaagtgtcccaagcwcactgacagtatctctttcactttataattctctctgccgcctatgggccttgctcaaagggtgcactcgatagtgttgactgaatgaatgagcaaatgtatgagtgaaaagccttaaaaatctagtatctctggtaaacttgggcagtcaaatggaagtcatttttgttgttaacaattttaccaggaattgggagaaagtgaacaacatatacttacctgatgggcagataacacagagacaagagaaccagaataacaggctaaacactgatctttatacatgagaaaggttgactgagttaaacagggtaaaatttaaaagggctaaatgcaaagccttgcatattcttaacctctgtgctggcacttaggtgcaaaccatttaatattaacagctaagtagaatgtagtgaatatctggccgttcttatgaaggagatgrgaagtagttgatttaagttaatacatgtcatcagtaggctactcaggatgcctcatcactcggggtagactaatagaagtcttttgtacattaagaaaaagttgatcatgaattcctgtctctrccctgtggagagccagtgggaggttcagctgtgtagggacacatctgcctcccatacatggcagtgactgtgtggacgtgcactctcttttctgacttagctcctttcctcagagcccagcactgggccaggcaagtaayaggtttgggtaaatgttcgtggaatgggaactgatcaaatcagagtgtgtccctaggaagtatggtgaaaggtctggaagaaaaaaatagataatctctcaaaaaattataaaaataatagaagcaagtggaaatatttatactgtgaaacatgtatctgttggtggggatgagtgtataggggaagtgtggagcatgacaactatctgtatagttaggaaactgtcatgtggaaatgtggaatgggaattagaatttttctgtttaccaccaaaagtttggaggttagaggaggcaggttttggcttaaagaattgtctaagtgtaaaatggtctatataatgtgttttctttcccaaattttacaagctgagaaaattaagggaaaagggtactgtagaggatccttacattggaatggataaaatggtttctaagggtccttctaattctcatagttgatgatttctgttgaataaaccagtcttttatgactacaggaaaaatgtagtatgttaatataaaatattattactatattgccttatgcttctgaaaacatgtttatttacattatttcaattgggccatatgagaaagataaacatatatagaggaaacattgttatcattctatataataaagatcccactgattagtatggacaagtgacttgttcagcttccctagaggagctgaggcctggacttactaacaagttcttatagtcaggctctatgttagcatgtgagaacatccttaagaggcagcatccatcttggccccatttgacagatgaaggaactgaggcatagagaagtactagtacgtggtcaaggtcacatggctagctattaagtggcagaaccagggtttgaaccagtgcgatttcaaaactcatattcttaacctctgtgctggtatgcatttctctaatcagtgtgatatctctggataaattgctaaactcgtaaagtcaaagaacaatccacaatttacttttgccgtcagccattcaarttaccaagatggaaacttaactagaagtgttttttcccccaaatgtggcrtcctgggatctgtgtcaaaggttaggaagaaaagttaaaacaaaacaaaataaccaaaacaaaacaaaaaaacagcttaccaaagggattcagacgatctgacaccttacactgaaacgtgcttcatgatagttatggatctccactctggcttgtttggcatggagatgctaggttaaatggatttttccaaaacctgcaatctaatgytttcagcagagtgttcaaaccttttatgtgttcggtgctagcgaccagaataagggaagcacagcatggtgtgtgagagcccactgaagtgcgctggcattttytgaatcaacagacctctcagcgcttttgctcttgctrtgcctttctctatcccaccttatagctcactaaaatactttgggtggtctagccccacaagaaatatttaatacttgttgcctgctatgctgctgtagattatgttcagtcttacccacatttgcttttacttcttttctctgctatatttgccagtccttgggacctcctggattagtaatatcaggtaaaatcggaggttgatagtggaaaactgataacttggtgtttcagtaaaattgagtcagatagcctctatacttaagaatgctataggtctgtattccctaatatggtagccatgggatacctgtggctatttaaacttaaattaattaaaaagtccagctccttagtcacactagccacatttcagatgctcagtagcttcacgtgactaggagctactgtggtataggtagtggacagcacagatacagatcatttcatctgagaaatgggaataataaataactaccttgcagggttgttttgaagattaagtagggtgtcataggtaaaacaattcttggcttgtggtagtggctcaaggggtgttcattccttctttacgtttcccgtgatatgtgacatccaatttggtagctcagagctagtttattagggtaaggcttgcaaaatctggcttcagtatgagtggtctccccgggtgccaagtgatattgtaggatttagcatacacattagggctgggagcagtggctcacacctgtaatcccagcgctttgggaagctgaggcaggcggatcacttgaggctaggagttcgagactagcctggccaacatggcgaaaccccgtctctactaaaaatacaaaaaattagctgagcgtggtcgcacacacctgtaatcccggctactcaagaggctgaggcatgagaatcgcctgaaacccggaggtggaggttgcagtgagccgagatctcgccagtgcactccagcctcggtgacatagtgagactctgtctcaaaacaaaaaacaaaaaacatatatattagtaattgtttgttcctttgatgggcagaaatgcaaaaacaaccaatttttaatgatgatatcctttctaagagggtatagaaagtgggttgcatccatcaggaaactttatgataatctataatctaaaaacattctccaaaccacattccaaggaaaatcagacccataaaggtttcctttggtcaaataagtttgggcagctctgcatgctttatgtctctaggagattctcaatgcacagttaaaggctytggaagtcctgctagaaacaagtatgtttgacatttaaaaatttggctttggtcttttgtagacatgaaaatgctccctgttcttataggcacctattaaaattgtgttcccagaaactgttttagaacatactgctcaaagggcatggtcagctagctttccaggggcatctgcagagaaggttcattcagaagcatttccttctgtgcgaatcccwaattctaacayaacaaaaagaatgtggtgcatacagcttattctcttttgtagttctttaaggaaaggataaacttgaagctagttcaggacctgaaagtaacctattttgtcaaggtttgaggttcagtaaacagcgattgagatctcttatatttcagacaaccacaaaagctgtttttgtacctggagactagaggctaaggtaactgtgttgctgttggaaagcaagtggttttcraagctctctgccttcagcagtttgtctttgcaacacaacgcccgttgggtctgatgttggtctgatagaagaaggggaacgtacttcaacctgtgttaaggaaaagattgctttgaacaargcactgcctgtgttggctctaataatctggtaagatctacggtgaatggcctcaactttgttctttcactgcaccatatatgataaaggttaacagagaaacccgctcatataaacaattacagcataatgctacrttgagaactactagtctagtgaccaaagcaggaaaggataatgagcaagtttttgaatcaaggttctagattatagatacacatgtagatctacctatatgtgggccacctatcttgccctatagccttcagtcatctatctcaagggtcagtgaacctttttctgcaaagattcagatagtaaatatttttgaccyggcaggatatatggtctctgttgcaactactcaactcagctgttgtagctcaaaagtagccatagaaaatacacaagtgagtgtgttccaataaaactttacctagaaaaacagcaatygcccatccagatttggcccaccggtgrtagttttctggcccagatctatttctyttgattttcattttttgagaaggggtctcactgtatcacccaggctgtaatacgatcatggctcactgcygcctctacttccctgggctcaaactgggactacaggtgcatgccaccatgcccagctaatttttatattttttttttgtagagatggagcctcaccatgttgcccaggctggtctcgaactccggggctcaagcagtcacctgtctccatctcccaaagtgctacgattacaggcatgagycactgcamccggcctcctgatttatttctttgttcatcaatataagcaccagctacgggcagttcctgaaatgcttgcctgaatcagatccctatgctgaagtgaaaaaaccaaaaattattttaatgaaycactggcagtaatgactttgcaatatatctcagtgatctggcattactctaaatgctcatttagctgtcataacacccctatgagttaggtcctattataatcatccccatttttcataagaaaccaaggccaaagaattagcttgctcaggtcacacagagaggaaatagctcgatttagccattccacaaygtatacatatatcaaaacatcatgttgtacaccataaatatatacaatgtttactttcatttaaaaaatacattttgaaaaaggtcacacattgaagagatagtacatcctgaatgtggagccggggccgactggcaccaaagcttacacttttcctcccaatatgatactgtctcttaagggaattttgggaaaatcaaatctctgtggcttaatgggtggcacagcatgctctccaatggtgctttgttactttacagacattctactgtccccatctccatcttcccagtcccacatgcagattgcttgagtcacgttgatcttctrgctatttcccgaacatgccagttcctctcagaagtcagggtttagaaatgctcttccacataatggaattacattttctctaccctcctcacctggatgaatttagtgcttctttcaagacccrccaaaaatatttctcctgttttctcaaactcttttggtcagaattaattcttcccttttttgttctaactgcatttcctcaaatttaatttattggtttaaggtttttcctcgtgaagactgaggtcttaggtggcaaggagtattgtttcactcagtacctagcacagtgcatgactgctcaaccaatatgttttgaatgcaggaagaaaactaagcctaataagtaggagtgttcgttayatgctttttgttgttgtcgttgttgttgttgttttgagacagtctcgctctgtcacccaggctgaagtgcagtggcacgatctcgctcactgcaacctccgccccctgggttcaagcaattctcctgccttagcctcccaagaagctgggactacaggcatgtgccaccatgcctggttgatttttgtattttgaatagagatggagtttcatcatattggccatggctggtctcgatctcctgatcttgtgatctgtccgccttggcctcccaaagtgctgggattatagccgtgagccactgtgcctggccattacatgctttgttacatgactagggaagtttgggctgacttctgctgtttgaaattatccttaaagtgtacctgaatgagtctgatctggtttattaaaaatcackaagacattgtggagcctgatctaaactaaacttatctaggagagacaaatgaatgataggaattgtgatcagagtcatccttcatattaacactgcatttttacctaaaaaaatgcaactttccagcaacatgaaattgctgtctccctcttctctctctctcctctctctstgtgtgtgtgtgtgtgtgtgtgtgtgtgtgtgtgtktgtgtgtgtttattcctctgcctttaaaaagaccagaagaatgcacagatggattagkgcaacattgctccagaagcatcttatatagttattttcatctgatagcatcaagacacatttgtggggtcgtgagctgtmttgtagtcttcttgttttccagaatatatctgcatgtagtagatgttcagtaaatgttggttgttaaataaaataatgaatccacaacatatggggctcatgctcttggagattcaagcttattgaagcattaattagttgatgtttttagtatacctcccatgtgccaagcagggaggtagaccttaaagattacakaggttaacatgactcaattgcttctcttagttrttttatgtttcatggattctataataargaactgtgagttgctatgctcattaatgctatatccttgcaacaaaatagatcatgaagaagtaacagatgcctctgttgcagcctcttcttttttcatacatctttgagtgtgtttattatattcttcttgcttcttagcctgaatttcttgaatatctgagcaccaagcatactactgggttattaaatgcttgtgaatgaatggacattcttggaaccaaaaacatggagttagggcggcactgtgctatgctagaatgaactttggctgtgggtaggggatctggattcaaagctcagctctgtccctggctggctgtgtgaggtattaattaagcttctattcagctacagaaaaagcatggccactgggagcaaggtggaagaacttaaactatttgtgggaaaagatyatttagatcaagaagttagaaggacagcaatggaatgcttgtcgtacagatgtatttaggagaaggaggacrgctaggaatttgggttttcttaaagcagatttccaccttagaatgacctgggatcatagtatgcatggctaacatttgtaagcaggaagttgggagaaggaaaacagcaaaaagtaaaataaaaattgggaagattaagatrggctgaataatgaaatgaaaacgggtcagaactggcttttctttctcttcttgatttctccttgtcttgtccttggaggaagctgaattcatctttataggcccctttgaagggaagctttgaaagaaggagtaactttatacagaataagtgttaattgtccagaagaaggttatatgccagggctctgattatccatgccactggaataaagttgggacacttgcttgcagaagtttggtttccatgaattaaggagctccaggtgattttcaggtcaggagtacaatcgtgattattttggtgtctgaatagaactgctagaattgaaatgacaccttttgcaaaatattttcgtagacattatctcatttatacttaggagtatccctatgagggcaggtgttaatatctccattacaggcagaaattgaagtccaagttaaatgatttgcctaaggccacacaactaatgaatattatagatggaacttgaatcccatcaggtcttctgattcaaattccatattcttttcatcctgatcracttctggaagaaggttacagtcttacttaagagcgccacatagggccaaaaccttctttgtctgtaataagtctgtgagcatgggagatattgaagacttgttgaagaaagtttggtatgtgttaacagtgccacttataagagcagaccatggatgcagtattaacaacattggtttgggggccaggtggcctgggtttacactgtgaccctgcactaaaagctgtatggctttgagcaaattacttgacatatttatgtttcctcaccgtttactgaggaataaatgagttgatataggtaaacaactcagaagttttctggggtgaggtatattagctattacagttatttttgttatcaagcttgtttctatggggggagttaggtatctaaattttctgtatctcggaaagtatagggctagtgacctgccagatacatttcatytggggaacaatttagttataattactatggaaatagctattggtcacaaattgtacccatgtactatgcattagtatgctccttccttccctctctccctrcctctctttctccttccctccatttatccatccttcatttcttttgttgagttggacccagaaggatgttwggataataggataaaggccaataggagttcatcatatatgcagtgggtgtggaaacatcatatttgaggcagggcsacaggaactaccatggtgygtttcccttagttgaacccacatgggtacaaagcagtcccgtgttactgttccccagggatcttggattgtgctgagtagaggaattgagctgtggtggtaggcaggggctacggcatgcagaaccttacatgccatactggagagtttcaacttcatgctgaaagtaatggggagccattgaaaccttgtcagctgggaatctaattgatcaaatttgctttttggaatcagtctggagtagaaggtgtgaagggcagatgaaaattgacaagaaataagtcarggatgtgtgtttacgggtgtaggagagaaataattagaaccagagccaagataatgacaacaagaatggtaaatagaggctgtgtttgggggtgcataggacaaggttccacccatgtctcctgtttaaaataagggggsagttgaggcatgcattgtcagttacttttgtggtgtgaaagagaatatctttgaaatgtccttctaaaagaataacctaaaaaggaggcaggcagagctgggacagcttcaagggccctgaatgaaagaagaggccatgcagagctagggcacgttttgaaataatgtttgttgctgaggcttcagagtgagcaagaggaggagtttgtgagagggagcagtatkctgtgaagaagagagwtttagggtcatggagtaggagagtgataaagtaatgtgggrtaaacaagagggataagaagaaaaccagaaggggaaacgagctgtgagaatagaaagctgagctcacttccaaaaggtctgtctttgtctgaagcacacaagggagaagagaaaggagagagatgagctttcagagaaagagacgaggcagactaaagcagaaaaggtagcaggccaattggaagtgcaacggagctgcagaaggtggagaggcccaggagaggggatggggctcagtttgtgatgaagctgggggcaggcacatgcggctggacagaaaggaggggtacagaggagcctcgaagattttaatgagatcacatcactttgggacagaaccacctacaygaggactgggaaacacaaagagcagaaaatgccagaggcccatgggactctgagggaggagatgcctgttataattttagccaaggaacagggctgtctaggatgatggagatgttctgggtgaataggggctgcagggttggtcaatagaagaatcatatagggacaggattgttgtttcacaaacatcaggtggctgtgtgaaaggaaatctttgttgaaagatgtatgatcttgatgtttattcagaaggagaaataatcacatttgcgagtgcagaagcctcacaaggagaaatgtgtaaaggaaaatgcatgcaagaatatgagtacttaactgcatgagtgaaaaaggwcatcattaggaggggagtccagcagttcaccaaagtgcctggaaatggagatgaagtcaacctttgatgcttgtatttagaatctgttgaaagagtggaggaagaagacagaggggcatgtagcagatagatcataggtgggtgtagttgaagacacttaatttcatctttcttgactttctggtggaagggctggtaccaggcattttaacctttgtacctcagttttctctctctyttttttttttttttttgaggctgagtcttgctctgtcacccaggctggagtgcagtggcatgatcttggctcactgcagtctccacctcctgggttcaagcaattcttctgcctcagcctcccgagtagctgggactacaggtgtgcgccaccatgcttggctaatctttgtatttttagtagagatggggcttcaccacatcggtcaagctactcacgaactcctgatcttgtgatctgcctgccttggcctcccaaagtgctgggattacaggcgtgagccactgcgcctggcctgctcttgggtttacaatgttactctgatgattagaagaggagcgtgtgtgtgtgtgtgtacatatacacatatatatacacaaaacgtggtttggcagtaatctattttattattaaatgcaaaagatacgaagttcaaaactcaaagatggaccagtgagaatttcctttgcctgtcttagagaagataaaattctggtagtactgctaatgttgacattaaccttctccttatcctcctagctatgggttattaggggtttattcttttcccagccctgtgctggctctgtacacatcatcttaatcctcacactagtttatagaggtaggcagtattgtacccattttccatacaaggaaactgaggcttggagaggcttagtgacttgcttgaggtctctcacctagtaagtgagggaactgaatccaaaccctcattgactaaatccaaagtcttactgttaacctcaaagtggagaaagtagagagctggatacatcttaagaaaacagggttagactgactatcatgctgattccactgctgagagtcctgtaagggagctggctgtggttccccaccatgggaattagatggcttcctggaacaaagagccgatggcatcagcaggcagctcacagatgtgccctggaagcaggataaagcagaatcattctacagcttaatgttgcatggvcctcaggtttgtgaacattttaaaatttctyttccctattcgaaaaatctggtgtgaagagcatgttctgccattmcacacacacacacacacacacacgcacacgcacacagtaccagaagatagtgaggaatgaggctgtactgtgtgaggaagagggccatttcaggagcaaggactcagtgtaatggagtgaacttaggtgaatcttttgatcttttgagcctcagtttgttcatctgcaaagtgaaggagttgatccatttgatctctagrgtccttcctggtcctgacaggctctattgaatatagaatatagaacctacaatgggttctattcagtctcaggttgttttgttaccagttttccaggactggccctcacttcctgtaggcccccgtaaagctgaccaggattctgtcccgtgtttatggagatgaaaaagacgggtytttttytttttttttttttcccaaggggcctaagtgaggcagagataaaacaaattgaccttctattgtcctagtgcataattgtgtctatctgaccactagtgtggaggttccttgaaggataaagactctgccttatttatctttgtatctccagggtctagaacagtccctattcaaaggctgatgaataaatggatagataccatccatgccatttatgaagtccttgctacatgccaagctcttgacttcccttaactcacctaaccccaacagcaacccartgaggtgggagccattctgtttcccatgttatcctgcagaaacagtcactgagtagcccagtcactcacccaaagctgcacagactggggagtgacaccatttggatggaaacctttgctgttgctaactctataacccatgctcttaactcactcagctgtgcctcttccaagaggcagctaaggacacatttaaataccttccaaggggagtgatcaatgaacaatcattcctttgtaagcaaaatgagatcaatgataaagtgcagcacgatttggtagactccatggtaccttgccattctggggacattttaatgagtaacactaccacatggctagagttaaattgcattttgttctaacacagtaagtttttaggccctttctccctagatccttgccttaatgcctatatttcacccttactgaactgtttactctttctctgagtatgtcatgctgtctcttgcctctggactctgcacttcctgagatgtaattacaggctttcttttctgactcctcaattcaactgtgtctccttcaaggcaggggctatgtctcattttcctacatatcaccaaccaaggctagcatatggtagttgctaagtaaatgtttgctgactgaatgcattacagatgatccagaaagtgatttttatcctgcccagaaccacacagaaagactacatggagctacttcctgccacacgtcttcttgctttacacaggctaacacatgcatatgcctrtgaagttctctgagattctgaagcagtaaaaggagctaatacaaattcaagaaataattttatgtgaaacatctagactcaaggttgtcctatttctctktttccaaaatgtagtaacatattttatttgcactgattggcagtgtttgaataatacctaatccctaagtttttatctgggcaatgggagtatatggtctgccctggagactgagcagctgtgtcctgctgctgctgttgatcctgggcagacatcccaatctgtgtattgttcattatcagtgatccaagatgggttttgtgtttctgtataacctattgcttcttctagagagcatgtcatagcatgggggagtatgtacatttttaacwtgctttacaaatatcctacgtgtacatccttactgatctgacatatttttatttttatgacaaatttttaattgtgatatgaartacatgtaaaatttatcatcttaaccatttttaagtgtatgttgttcaatagtgttggctattcacattgttgtgcaaccaatctccagaactttttcatcatgcaaaattgaaactctgtaccctttaaacaataactccccatttttccctccacctcccagttcctggcagctaccattctactttctatgaatttgactactctagatacgtcataaaagtagaattgtgattggcttatttcaattagcatgatgttctcaaggttcatgcatgtgttagaatttccttcctttaaaaggctraatcatatttcactgtatatatttatcacacttggtttatccattcatctgtcagtggatattggggttgcttctgccttttggctattgtgaataatgctgctatgaatatgggtagacaaatgtgcgtacttcttcatgatactgctttcagttcttttggatgtatattcagaagtagaattgctgaataatatggtaattctatgtttacctttttgcggaaccgtcatactgttttccatagtggctgcaccatttaactttcccaccagtggtttgcagggttccagtttctccacatcatcaccaacacttgttatttgctgttatttgtttgtttgtttgtttttatagcagccatcctaacagatgtgaagtgatatctcattgtggctttaatttgcattttcctaatgattggtgatgttgggcatcttttcaaatgcttgttggcaatttgtatgtcttctttggagaaatgagcattcaagtcttttgctcatttttaaattgggttgtcttgttcttgttgagttgtaagaatactttatatattctggatattaaccccttataatatatgatttgcaaatattttttcttaccacttattactctkttgatcatgtcctttgatgcatagatgttttaaattttgatatagtgtgatttacgcatttttacttttgttgtttgtgcttttggtatcatatccaaaaaattgttgctaaattcagtattgtgaaacttttcctttgtgttttctttcaaaggttttgtagttgtaagtttcatggttaggtctttgagccattttgaggtaatttttgtaaatggagttaggtaagggtccaatttcattcttttgcatctagatattcagttttcccaacactgtttgctaaagacactgtcttttccccactgaatttaacccttgtcaaaaatcatttgaccttctatgtgaggttttatttcttggctttctgttctcttctattggtctctatgtctgtctttatgccagcaccacactgttttcattacacttactgatcttgattctccaaatagtatgagattccaggggcaagtgccagtgaacccatgaaaacgttgaggttcaaagaaggaaaatgacagctccagatcatcctgccagtaatgtgcagagataggtttctgtgctcttcattatgctacaaagtctgattcattgtgggccaaaataccccaacctgagaatcagagggacagacatgaacaggctctcataatagaaaattgctgttggaaggaaaaacaaaaccagtatgtgctaggccctcaaaatactctaaatacattttttaaaaaattaatgaacttgtcatttccgaatgacttcagctctttcctaatctcaatttctttcattccacccttaaccagcagctcactctctgtaatatacactaccaccttatttaacactacagtccaacccccragccctgccacttttattcccctcacctttctctacttttatttttttcataggactcataccttctaacttyctgtatacttgctggttttatatttattgtttatagtctgcccttagattgttagttctttgaggcagggatttttttgtttgtctgtttgctaacataaagaatgcattcctgtggtagacagaataattggcccccaaagatgtcatgccctaatcctcggaacctatgaagatgttattcttatatggaaaaagagactcggcagataccattaatataaggaccttgatatgaagatcttggattatcaaggtggaccartcgaaccatctgaatctctaaaagctgagaacctttccccggctgcaaagaaccagagagttggcagcgtgagaaggacttaccattgttggctttgtagatgtgagaaaagggccacaagtcaaagaatcagtggcttttaaaagttggaaaaagcaaggaaatggattctccctttgaagctccagaaaggaatgtggctttctggatattttgattttagtctagaaatacctttattggacttctatagcagtgaaaataataaaattctattgttttgaaccactaagttcatggtaatttgttatggcagcaaaagaaaactaatacagcactcaataaacgtttgttgagaatgaatggataaatgaatgagcctcagatcaaccaacattgggaggtaaggattcatcctcattaagaggaaactgactcaagcaarttgaagtatcttggtcaggggctcagtctgtgactagcagtgtgggatttcaaatctctctgattctcagccacttccctatgtctcctcccttgctgttgggtgagagtgtgttggtttgctattgatcttcccaacagcacacggtaaatctcactggttcatcctcagataaggtgagtctctcaactgagacrggaagagggagggtgaaagctttatcatacccagtacaatttagagacttaattagcagcctcaaccccagagcatttgcttatgcttatatacaaacaaacaagccacccagcagcttctttgttgtgatcagcaggaagcagccacatctgtcttcagcatctggacttctgagccaagcttgggaagctcatcagattcaggtcaccccaggaccaggggctatctctgtctgggaaagcagtgagctcgaagtttaatttcacaccatcagctctgagataaatgtcgaaaccaatgcccaattgttaataataagggatgaatgtgggcagagaacctataaagtcatattcttagagaattgattgtacagacaccacagatttatttcagtggatttgggagcctctgtacatggcagactagctgaggcagatggcgtgtgcaggagaaaatggtgaggagactggtttcctcacaacaaatttccattgaaagttttgttaggatgtgacggggctgcttcccggacctgaacaaaatagagatcatccatatgaaaagagagagaacacagcaagcattctgcatgagtaatgcatgcaactctgtgataccaggctgtatttattctatagacattgcacatcatcagtattttaagagcaacatcttctatataaaaatactcaagagccttatgctttatactgtggactccaatgtaattacactctcttgttgactagatgtaagaagcttgagttgattacccaaggcttgttccctncatttctgtttctctctcatttgacaggtaccatatccatttgttctattatcttctaagtttgaattggaaaaataaggtaaatcagagcagtctttcttaagttataaaaccaaccatgtgaagatgctttgaatgctgttctgcttgtatataactaagaactagcgcctcacggtaattttgcaggtgattagcctgccatgtagaaacggccctttgggaatgacagggaaacatgaggttgtatttctttacaataagcaggttacatgagagaatttctgtctccttactccttctctctggaagtcttaccaatattttaggatagggatggaatataagcttggaggagatataggagactcatactcatcaactcttacatttcaaatgtaatcaacaaatggattgaggtgctgcatgtgctaggcctggagtttgaaggaggacttaggcacagcctttctgttgagaatatccttttattgtatgttcatcaagctcctgtacagcctgcatgttataaatcaaaggctacctcctctgtgaagcccttctggattcactttagacaaacccacgtcttagttactgctgtaacatgttattagtgtgctttatgtctmcccactggacctagccctgtaagagcctagaggccaatgccatttcacctttgtattcccattgttggcatgcaatataaacacattgtactcattatgatcatcattatcattatcatcaccatcattaccatcattgtcactatgttccaggcttcgtcctaagctgaattatccaaactgctggccactttaaggaaaacccttcaatagctaaaggtaaagatgttagctatggtaaaaagtacaaagtagtatctgattgaccaatatttgggtaagacggttctaaggagtgtggtaacagaagagattaagttaataatggtagccactatttataagaacctgttctaggctacgctttatttacgtaacaacaccatatcagttttatggcagcctccaggaaatagagagcctagtttagatcagatggcttcactcttcagtttttttgttagtaatttctctatgtctctattttcatttctatagaatgaaaataatatgacctacttcagagggttgttgtgggattaaaggaaataatgaatgcgcctgacaccaagtaggtgctcaataaatatttggtgactgttaaaactttgcagagtgcttggcatttactaagttattgacaaaataatagaaacaacaactattattaattgagtgtttactatgtgccacacacttttctaagagcttcacgtggattcacatatgagctaatatcaccacttccgtttggcaaatggaaaaactggcatcagaatggtgaaataacttacccaaagtcgtggtgttaatgagtagcagattttgaacgcaagcccttgatcwtcttcttcatgaaggttggatatctttctactacatctttgcaaaatgctgagagaggtaaatcatagtctataggtgrcttggagttcacaccgtatccagtgtgtaatactgaatctgcccttgtttgcctgatttgggagaaagttgttacagctggtgaacaagcaaacagcattgtttgttaccctggggcactcacttggttgaatgttgrgacctggctggcaggttccaaccttaggcagttgttaacctgcaatgatcaaactgttggtctggcagctaaaccacacctgatggggaaaatttwcccagtttacctttattctaacaaatgttcatagcaaacctgcctgtgagctgtagtattaatttcactctgggtcgttgattcttactttgtaacttccttagatatggtggttcatgctttagtctactgaaaggtggacttgggcaaatacttatggcttcacagttccaaatgaagtgggatggaactaagtttattaaactctcttatgttacattttaagatatcttacagatcatctatctaagaatgtatttgtttgtttgtttttgttttttaagcagtggagacctatgtgatctcacacataacttcaatgtacgaaataggaaaagatggtgggggagggggtttcttagctggtagcccctccttactacccgcttctttctaatctttagganctcttatgatagaccttgagataactgtaaagaaccaccctaggtttacccacagcacagttaaagacttcaagttagttctagtccccaagaactaacagagacagaggtagcatctagaagctaggtcttttgacatttgctccagtgctcttttcactccactacaattaatttactttagaagagaagctaatcaaaggtaggaaatgtttggagtagcaacagtttttttagtaagcagtgacatcctcaatattctccttttgggtccatgaaaaagatggttaaacatatgttcttaacccccctccaagtcgctgaggcattctgtgctgcactgccaaattttgtacattctagtgactccttcttctccctaatgcattgctaaaaataagaaaactcacacaaaggcatatgttgtggtttgtctttgatttgggcacggatcatccaagtgtgaaaacaaaattggttgctccatccttctaatacacagatttgcacatctgtactgtacttcctggagggaattataacttaatatcttatacagcttggtaatttcacagagacacctaatacccaatacctcatgtgatgattatggaagacatatcaaggtgggcagaatgggtggctttatttatagcttttcgtaattaagaaaaagattcaaatttgaggagttcctcaggatttaaaactagctcgtcaaccctaaaacctcttttatttatttgatgattgcctggctctcatctttagacaggggcagaatattactagcttttgtttttaatgctaaactagccttgggaatgtgggtgataatataatggccatcccaattgttggagacagtgcccctttggcaaaggagtcaaaaatagagtgccggtactgagttctcttgagagagttggaggtttgagctggacgtcttttgtttgtccctccagaccctgcctccatcctgctctgagctctgagaaactgacccatatgattccattagcatccctgccctctggcctctggttcatttggccagcaggggaacatttgcaggaggcctctggtagggcatgagtgaagctgatgagtgaagtttatttcccatctcccacatttcaggattgctgaagtctagccatcttcctccaccagasgtcacagtcctgtagaaggaccctttccacccagcctctatttttagattctataactgctccttcctcctgtccctcaggccttggagtggtaacagctcccccagggttactagccctgcmatactacaccatcccctgcagcttccccataactctgcccacgcctttgcagacggtccctttatgaaacctaaggttactcagctggaggatgccatctgtgtcttgctggggccctgatagaagtttcttaggtgacatgtagtaattataatgccttacattttgagcctttcaggtagtaagagggaggacttaactggaaaaagtcctctgcattgcctaatttgtagttctgtttgactttcaaatatacccttggccacagtagcaggagctgaagactatatacatatgcctatgattctcaatgtttatgtgcataagaatcatctgaggaggttgtctgaatttacagtttctgggcacctctccccaaagatttcgattctgtggacaagaagtggtgctcaggtatcttcatttttaacagggtcctagatgaatttgatgtgggcatacctagaccacatttgagaaayacttctttatgccaatagactccttatcagtggcctgccttttcttttcttttttttttttttttaagatggagtctcactctgtcacccaggctagagtgcagtggcatgatctaggctcactgcaacctccacctcctgggttcaagcgattctcgttcctcagcctccagcgtagctgaggttacaggcacgtgccaccatgcccagctaatttttgtatttttagtagagatggggtttcaccatgttggccaggctggtctcaaattcctgaactcaagtgatctgcccacctcggcctcccaaagtgttgggattataggcatgagccaccggcacctggacagtggccggccttttaaatttttctgccagattctgtcatcagattcatatctttcaagtggacttaacattgagttctctgtacatatatgtgtgtgtgtttaacaagggaaattttgttgaaaagaaccattaagcaagataatgctgtatcttttccattaataaaactagttgaagatggcagtttttcagtaggctgtacattttgatragtccttttatctttgaacagttttctgtctctttatccatctgttcattcatccagtcactcatgaaacatttattaagcatctactgtgtgacaggcacttttctaagttctggacatacaaagtcatccctgtccctaagatgttcacaggtagctggaaacaaacatgtaagcaagaggtatttgtttattcactcaacaggtatttattttgcacccgatatttgccagggattgttctaggcactagagatacaaaagtgaataaaacagtcagatattcctgcatcgtgaagcttaaattctcactttattaatctcctagtggtaaatagtatggtcagaaacaaaagacagagtttttacttacatgaggattgtaggaattcttctgctaggcagcaccagcttaactgtgacagttcccagcagtgtgcaaggctaagtctagatgggatggcctggatccttgcccattgatgatcagcgcaaatttacacagacagactagagaaaccagggactgggagtggaaagggtttaactagaggctgcatgtctcaaaaatgcagtgttttggagtaagtctggcagagcagttgattttgggaaaaatgtaagggaaagtaccagattgcttgggtgtgtggaagacaagacagtggagcaagccataatggaaaggaactttaggcattttgtgttaccatggaatctcttgcagcacatcctagcatctgttcatacctctgggagtgcatgcgtcatgaaatatgacarttgtctgtgtccgtgtctctgcagttatatsaaacttccttamgacaggaaccaygctcrattcatctttctatccctggaagctcatggaaggcaatacacaaaatattcgttgaatgaaggaatgcataaacagtcaaacagctctttattaaatacctactgtttgccaggcactgtattagattctaaggagacagaaatgaaaatacttgctcttacatccaaatagacacacacagacacacatgcatgaggctactgtgctgtgtgcccagagttagggcagggtcatggcagtcagcgttacctaggctccagtgtggtggttaagagagtggggtcaagtggttcagagtttgggctctatgacaagactgtctggattcaaatgctggcccttatgtttagtagccctgtgatgttgggcctactgcatatatttctgtgtcccaggctccttttctgatatttactttaatctacgtaaaagagcttccttagagcttgcctgggacatagcaagcatcatataactcttggctgttgtggaggttaataagcatggcctttgtcaccagggttggaatcaagatctatctctgctacttcctagctctattacctgagcaagtgagttcacctcagcttctgcccctgcttaagtgatctaataatgttctctgacttgggattgttgtgagggttcaatgagatcctggagatcgagcacttagcttaatactaagaactcattttcaatgagtgtgcttagctgtgggggaggaaatgagtgggagaggagacagccacctgctcctgtggagggcttctgtggggtgaagctcaatcctagggtgatgggagttcctttgtctccatcagttgcacagccagggacagagagaagggttgggacctggaaatcagagtggcagaacaagcactaaatgaatgttctattgttatgatttgtgrttctgsaactgggcagaagcctgtatcctgkgacagaatggcaggtcatagcaggaccagccattacaaaatgggctgctgcaccttatgaaaatttaggtagggactttcagccttcctgctcaaaagggtgggctttagctacactcccggaccaaacagagcccctactactggcttcatgtgaaatattttctagaaaatactgamgcacaggccattttcagaccaattacacctttgtccctagaggtgctacccaggtattttataaaagatttctaaatgattgtagtgtgcagccaggggtttagagctacccatgcagagccaagctgtcctgttcatgggcagaggctgaagagaccaggaagggcaggagatgaagaaagaattgtctaggtctcttggaaagatcaagactctttgaagcttaaacacttaatttttatctccaaataatacaaccataaatttattgagcataattggaaaagggatttactctggaataagtgtctttttatgtcaaatattaatagaatggtattaatttgaaaaatgattcacttccataaaaagcttgctttccaaacaaaataatacatttcttaatataaaagtttaaaagaaattaataaaagtttacatgttcttgatttatgagtaaataaggcattgaaattacaaaattttattctgttggatgatctatatcataataccttctgacaaaaatgcttatctattcttaagatgttttgtttattcttttgtttaccttactgccaaaatatttagcctcatcaytgrtaataaaatartcaatttttttcatttatgcaacaaaggtttactgttaaaacataaagcattttttggtttgtttgtttattttaatttgtcacaggtaaacttagcatgcctgtgtcagcagattcaaattccagcaaagggacctgtccccatggatttaccatagaaaggttgcataaaattgtaataaacaatttttctgggctcaaaaaaaatgtgcatacttctttatcccctttgggatatgcttcctggaggagtctgaaataaggctggaaaaattgtatccaattctttaataaccctttaagtatcttctgatatgtgtttcagaaggttgccacagatatataatttgcaacgggaaaagatgaactcaaattttataagaacccggcgattatgttcttgaaatatgttcatgcctatacccgtggcgcgagagccaccctccctgatttattctgcttggaccagaatttgcgactgctgatttcttttcatccacttttcctaatagattcaggaagtaattttcagatacaggaacaacagatcacagataataaaagtagagcatgggcaatttgggaggcagataaacttatagagatgagatctctttataccactcctccctgttttgcacttgtractgcaatgcatgattctcttttatttcccattaaatacaaatgctttccaatggtgcctttgagggggcaggtagggggctgtacaagcactccttctgttaaacacaataggcatacacacacacgtgcacacacatttttctttcttctagagaactttdtttgctgttaactgaacacttggcctatcagccccgttatgtgttgttaaaatttaaccaccactgagcatcattaagaggtcacagaaccagtcagaagagatagagggatggatccaacaaaccagcacctaaggattccaatgaactgacatcttcatttctttctttcattctttttaatttattttgagacagggtcttgttctgtcacacccaagctggagtggacagtgtcacragcacagctcgctgcagcctcgaactcccaggctcatgggatcctcttacctcagcctcccagagtagctgagactacaggtgcatgccaccatgcccagctaatttttggatttttttttttttctagagaygtagtctcactctgttgctcaggctggtctcaaactcctggactcaaatgatcctctcacctcggcctcccaaagtgctgggattataggcatgagccaccatgctcagacttgctttatttctttaaggtagacatggaaggagagagaagtcattttttgcttgtaaagtggatactccgagaagtgtatcatatattcatcttaaaggccatgtgtataaacagaaagagttcttgaggaaaatatcatactattataagataatctactgtacatattgtgtatgtaggcactctgaaagcaaaatggcatttttaaaaagctcttcagcctcgatagaaaaaaaaacaggagcttagatgtattttcttgaaggcaaggtctgtgaaaatccttttatggagcttgtgtgccaaaacatgctgtgtaaagtcagccagaggtcattaccgtttttattaggtgattatattataaatatgagttgggcctcaatcataagcagatcctttatgtgtgtttctgaacatgcagsctccaaagtgctaaattccaaattggaatattgattgtctgatgcctgagttacagctttcctgaaatcttgaattaggcctcaggtcccatgtgtctttctggagataagttcttcttgtaactggaagatgtaaggtcttaaatagcgggccccacaaggtggaaatccaaaggcagacttgggcaccattctctcccttgtgaatcaggaggtattaaacacaccagtttatggtgtctatagagaaattgtcataatttgtaaatgtctatgagtttgctcttgggtaagggagacattaatgcattcctgcgaatgtttattatttccgtgcaaatccaattgaataatttgtcttcgattctgtagactttttcttagaaaaaggaaccacaggcctctctgctaaattttctaattctgtaaatattcttgagttttaaagtttgacctgatgctttaaaaatagtcaaacataccttaagcaggatttctccgtttcagtagtattgacattttgtgccagatagttctttgctatgcattgtaggatgtttagtagcatccctggcctctacccagtagatttcagtagcacctccccacatcacaagtgacaatcaaaaatgtctcaaaacattgtcccctggggtgtaaagtagcccctggttgagaatcactgccttaaagtggtggccaaacaaagatcttcaatgttctacatacaaaatgaagtgaatctctgagagtttaaaacaagatgtagatgcaaacctgagcactacaaatacttgttcctatattgacttcccctgtagagtgagtcctgagagcagggctgtgagttttgtttccccatggcctaktactgccaggcaagtcatagagccccagtaaatattgagtgggtgaataagagaaataaatcacctgtcattagacgcttccataaatgtatatataaatatgagttgtatgtattcacatagttccattaaaaacttactaaatattactcttttatatcccagtgtctgaatagtaatgygcacagatcagacattgaattggtattggctgaacggctacctggcacataaaaagtacattgaaatgataaattaacagaacacccatggccatatgccatcagacatgtgtttttgtggcgatttcaacagtcagtgagttggatgtgggatactcgacggtggccaccctgcaaggtctatttactttgcctcgtttgaaattcagtctccatgcctcggttgtccaggtcccccgtctggtctttctgaatccacactagtgagaaggagaatgttatggttcagcaggaaatggatcgttttgttttaaatttccaggtcaccacagctgtgcatatagccgctacttattcccagatctctccttgctgccctgccagagctatgaccaaaattagggygatggctctattttgaaggcctgagtttaaagttataaaaaaagtcaggggacagcagccattcccaagatttatgctgaagcagcacagaagtttaatgttattgaaaagtatttgaaatcactttttaaactttagatttaaatttattttccaggctttgaccactacaattgtgttaattttaaaacgaccataaaaaatatttacaaggtacagtggatttctaggtcaggactcaaggcttaggaagaaagtggaattaaaaggcacttcagttaaaaataaaaaactatgctaaatttgccctagtttaaccttctccatttatatgcgaggaaactataagttattgggagatgaaatcactccagggttacacgtttttttttttttctctgtttgtcttttaaatctgtttctcattttccctttctttctctctttctctccctcaccccaataaaagtagatatcagattcayatgcacatatagatgatggttttcctacactgctaaaacattggacctaaattggataactagagatagttaagtgcaactcttttatttcactttatgagtaaacagtggtctggagaattagaactgtgctgttgaaatttttaaaaagtcggtgactggcaaagctgcaacttgaatccaggtctcttctctattcagttatcttttcactaaggcatgcaactttcttattatcttattttgcacccttttattgcaatcattcattagcaaatatttcctgagctgctgttctgtgttgagttaaaagacagcagtcagcatacatggccgctgccctcaggagctcaccttttagtgaggagactgagaaacaagcagacaatgcctgtagagtacagcattagaaataaggtggtgtggttgggctgtgggtggggactgtcagtgaaggttcctgttacaggtgataccggggaatgtgatggtcattgcaggaagaatgctgttcaagacaagggctgagaagaaatactgaactgggaagaagagagttagcatgatgccagggcagagcacaggccttgatttaagacccaacaacgtgacttcgtagctggatgatcttggttcagtcactcaatactcttatcctcatggattaagatcaggatgatcgttataacacttaactttcattgtactcatatataccctttcttgagcactaggtctctggccttgagttaattacttggatattaacatgaccttcacattttagaggaggaggtttcctagcaggtgcctagcagagccttgatttcatctcaagcctgaatccagagtccaagctcagaagttgtgccacctctgagagtacaagactgttgaagattcaatgagctgatataattataggaaaatagacattacaagaatgttagttgttttttctgcatcataaaacgtcctctataaccactttgtaggccaatgcatggatatatatrtgtgtatcactcatatttcttacctgccatttttatattcatggtggaaaggcaaaatttgaaaaaggaaaatrttcattaagaatataaaacacttgggcctatagggaaaaatgtttttctgacttttaaatttccactttttagataatcccttgaatgtatatcttgatactacgtgggcatcaacccctgagggagtgttggatctccttcctgtccttccccattatatggtttattgggtttttactctcattgattaaactcttgctatgtcctagccactgtgatgaatcctcacagcatccatagcagaaatgaagacctaggcctggagagattgcctgccttgctgcttagcaagtggaggaggcaggatgcaaccctgaatcagtctagctccaccattcaagctgtaaccatgaagcactattgcctgtctccttgatttgcattcttttatgcattttctggcaccacaatggagcaaatgtcatgcttacctatctagaatcctgagctacatcttttgaatcccaccttgatttatgacctttttcttagtgtttctagtatatgtgttttgataggtctgggaggttggaagtgaaattacctctttggtaagtttacccatattcagtgggagggcaggagtatggtatttttatgggatctttgaggtgtcgcctttctgtctggaaacctttgttggccagtggcacctttgcctgagttcttgtcctgtgtctaggaagaatgaggtatacagacaagtggagggtgagcaagatgaagaggagctttattgagtgttagaacagctcagaggagacctgcagtgggtagctcctctctggaggaagatcatcccatcaagtgttcagctctcaccagagaggaggcccttctctctgcaggcaggtcgtcccatcatctctggagcactccgcagagaggaggacctggagagggtagctcctctctgcagctggtcatccagaagtctgctcagctctggctgagcttggggcttttatgggcctcagagagaagtgggtgccaattggtccatggttggccatgggtgggcccagaagaggcactacaagttcccactctggttcgtgggactggcagccccrcccccatccttcagcccctccctggcctgaaggtggggcctcaccagggacctgcccccttttgcccaggaacctgtctccctcctgctgccgttcatggcacccaggctgtaggtrccaaggggccccctgcaggccagcactgagctgctctcagccccatttcrgcttccctcttatcctcatcagtgctcaaagtccagaagggggctgaggtgtcaggggcctgacatgtcaacagtgccctgagtgtgtgcacacctggctgggctgtgacagtgcccaggctcaccccactttgcttcaagatgggagcaggtgccaatagcaggaagaagccaggccrtgggagcaggtatttccaagccttcctgggcctccaagagggcagggatgcctgggtccacagctgtggtttgggcggctgcagctgcacccaggagggaggtgcttctgcctgctctgaggagtgggaggcccaggtctgcagtcatagtttgggaggctgcagctgtgcctgggaaggctgggttcctgcttgctctatggaacaggaggcctgggtctgcagccatgacttgggtggctgcagctgcatgtggggagttcctgccccaccaactcagaagggacagtgctcccacttgtccccagctcctgccagctccacggagtgtggaaccctgggcattgcctccctgctgcagccacactgctgcagctagcgtgatggcaacggctgctccagataggtcgccactgccattggtatgatggttagacttgaacttacatggtttctttcgatagctgccattttgggagcatttgccctttgctgattgattcttactgcaagctgatgaggtagatgttaytgccttcattttacagaggaggagatggaaactcaaaactacagtgtttgagtcactggtttccaacacctagtaggtctctggaaatgtgtgttgctcaggtccccagacaaaaaaggcacctagctctgattagaaactttctttcagacttccgaactcttacttttttcagagtaccattttgtgtgacttttttttgttttttttgagacagggtcatgctcttttacccaggctgaagtgcagtagtgccatcacagcttactgcagcctcagcctccctggctgaagtggtcctcccaagtcagcctcccaggtaactaggattacagatgtatggcaccatgcctggctaatttawttattttattttattttattttattttattttattttattttattttattttattttattttattttgtggagacagggtctcactgtgttgcccaggctggtctcgaactcctgggctaaagtggtccacctgcctctgcctcccaaagtgtcgggattataggtgtgagccactgtgcctggccttgtgtgatttatatagtcagtttacattcctgggcttcattctttccagctttgctaagagatattcagaacagcatggaggttaaaaacataaactctgcagccagtagcatggattccagctgtcctttgctggctgtgtgacattaggcaagttgctaaatcattttgagcctcagtttcattatctttaaggtcagaataataacagtaccaatcttttgagattattgtaaaaattaaatgagttaagttttgtaggtataattcttagaatagtatctggtatatgataagcttttaacatatgtattagccattaaaagttattatttacttttcaaacatttagtaagccactgccatgtgtgaaacactgtgctagaaaatgggatggaatcctagtgtccctctcagctctgacattcagtgacagatgtcaacaaccaacccttccatctcttggggaagcactgcatggtttgctccaggggacttactgactctcaacttacaaattgttatgtggaaaatgaaaaatgcatctagctattactttcttttactcatcttgttcacgtaggtgggttgcattttactacataattaagaataaggaacaaaaatggaaggaagcatatttgtagcttatgtgtaggttaaaatttcctgataagtaaaacggactcataaacaggaaagacaatagcactatttaaatgggaaaatccatagctatcatgatatggagtaatgycattttgctgttttggtcttgaaggaggaaggcatgaacatatttgcacatattgtccttggctaaagctggtcctgcaaagagcaggacacatttggacaggaaaattgtattccgaccaccaatttgcatagtcctagctttccgctcatctttctactattgtatatatcaggagatatagtcctcaacctcacacaaaccagactgaaaaggggaaaattggagaggcttagtatatttcctctcttttagaactagcatgaaataccagtttctcattgcttacagtatacgggatttagcaagacacastagaaggtgtcaggatgttagggtcagatcatctacttctgcccgtataaatgtctgtgcaacctctagcaagacacaatctctttctgagactttttccctctttgtagtgtggggagagtaattaaacttgcctgtctatgaaaagcctggtagagtggatagtacacggattttgtggtccgagagayctcacttgaatcatggcctctccacttcactgaactgctcagaacctcatctgcacactgaagatattattacctgtgtcttcaractgttatggggtttaatgttgtattatgtatttggttggaatatagcagtccttccttttaaaatattagggccctttagactctttaattttcccagtgtaacccattttttattttatatgtaagaatatatagttttattgtgaagtacagaatatatatattcttctttatatatatttatatgtaatacatataaatatattatatataatatataaatatatatttatatatattctttatataatacataaatatatgtttatgtattctttatataatatataaatatatatttatatatattctttatataatatataaatatgtttatatatttttatataacataaatatatatttatatatttatatatattctttatatataaagaagatatatattttctgtacttcataataaaaaatatatattcttatatatattctatatatacaaagtatatattcatacgtatatattctttatatatatatataaagtctatgatagcgtatgtggatgatttatgaacaataataataaaaatcccagtgcccatttctcaagccaagaaatagaatgtcatgagactctagaagctacctaaggcctttccttcatagcatcctgataccccttccccaggtaacttctaacctgaattttgtgttatttccttaaggtctttctctctctmtmtatatatatatacatatatatatatccctaaacaatttattatttcttttcattttgcctgattttgaactttatataagtggaatcacattgtaacttcttctcgtgactttgattatcattgtattttcaagatttcttgatatcratacagtttattagtagtattcccttctaagagtgtatatatttattttctaatctagtaatagaggatgtttggctaatatccagtttttttgctattatgaaatatattgctacaaatattcttctatcccttattatatataagctgaatatgttaatatatgctaagtatagttttcagtttatctttccaagtgaaaaggtctttatagatcatttaatctgatatctttcctctgcctgcgtgcagagcagggtgattcctgaggtgtcacggctagtaaatggtaatgtggggccagtaacccaggtctcttgttccagtatggctcatctctgtgactagaccacatgtctgacagtgttttgtttaattttaaatgacttctcttgctattgattttctaattttggaattttcatttggactggttctttaatactctcttagaaatatgcttgcatttagtgttgagatccttttgcccccatccccaaagttgggacagtgctcgcttctcttgggccctgtcccattaatgccagccctaggcataccccatggccatgaacctgtgataaacttctacctcttcagcagtgagagcctctgagacatgtttcaaccagggaaaaaatcaaaatagacccaaaatggccaacggagaaaactgctgaggaaagaaatctgaatccttacaaggcactttcttaggaaatatccctttactataaataggaatggatattcaattttaggtccctttaaaaaaactctctaggactgaaattagatttgaggctgatggaatgaatataggatggggtgattctgtgctgtgctggggcatgtctgaaagttctgagcagctggtgcagtggaacagctgagccacaaacaaatatcagctgattttagcacttcttatttctagatgtcctggtttgttaactccagcccttggttccctgtatgctctcttcatgaggcgtctcagcatttctccctgccttccagtgactgtacaatcttgggtacattattcccttttctgggtctcagtctcctgtatcctacaatgagaggagtccctaatatttattaagaacttagaatgtgccaagcgccttccatatatcatctcatttagttttcacaaaaacactatgaggtgagaactattattatcaccattttacaatgaggaaattgagtgtagggaattgaggcacagttggcccacctgctccccatttaatgggatttggaaatgtgttctgggagagatctgttccggcctctgcctcygtgctctgcagttgggaacgattctatgtcacgggtgtccctcactcacatgcctctctctcatctctcagctctagaaccacagaggagaatgtagctaggattccaaattcttgccatgcacttgtctgtagagagtgtccgtggtttctgtcctatgaaaggggtctgtaacccccaaaagtttaagaaccaccgacttaggtgttaaagtcactaaggcagtaaaccaacacaactaaccatttgaaaacaaagaaatagatccatttgcctatgaagaaataaactttccaaggctttgatgggtttctttttagtgatctgaccaaatattttggagttgtgaaattacagggcaaattcattgtaaggaattcacctaagaaatgaaaagtagtaataatctatcttttgagttttactatatttagtccaaatatttcatctctttgtcttttcatggaaaggtttcaagagaattgaaaacaactctgcttattacttattcaaagatagtgacggaagtgctaacggtaaagaataaaagatgttgtatgtgtagtgcatgcatgtgtgtgtttgtgtgcttgtgtgtgtrtattttgggtgggtgtcttaatctattggggctgctatgacaaaatrccataaactgagtagctaataaacaacttaagtccaggatccaggtgctgacagattaggtgtctggtgaaggcctgctgtgtagtttaaagatagtgccttcaagttgcgtccttctgcagtggaaggggcaaggcagctctctgaggcctcttttataaggggactaatcccactcactagggctcacctctcatgacctaatcacctcaagaagaccccacctccctaataccatcacattggcaattaggattcaatatatgaactttaaaacattccaaccatatcagtggttaatcagtttatagttaaacatgaaagaaattggtgttttgtagttggtgccactgagaaggtataggagtaatgctcctaagtaaattgcagaaagtttagaattattgwataatagtaataaatactaacaatgatttacgttttttgagcacatgttgtgtgttagtctctcttttaaggactccacatggcttaatctaattattgtaattgctgttcaaagtaggtagtgtttctttgttcatttacagatgagaaaaattgaggttcacataggttaaggacttgcccaaggtaaggatgagaaccaatctggggtatattcagttaaatctgatggcaggtatctcatatggaacaaattaatatattcattcttcgacatgtccttctatataattgtttaactctgagacttttacctcttcctcaaaggtctaaggtgaaggaatccaaaattgattaaatgcctaagatgggacaagtgtctttagatatgttattaattcttcaatactatcttatacatatatttataatgatactcttctgattgttgtatcattacctgtttgtcttcctcttagactatgagctattcatttatctctgtattggtgatttttgctgtggtagtaacagatatcccagaatttcaataattctgcaggtcggatgcagctctgtttagttctcttccaaaagtctgctcatgccagaaatccaggctctgggagcagccccatctgggctatgtgattctcatgtcagagggcagaaatacagaagtcttaactgaatgacatatgtatacagtttctgctcagttttgtgtacattatgtctactcatattccagtggccaaaggaaaaaaaaaagtctcatggcaaacccgacaatggagcacagaatattctccatctaccttagatattggcagtgacatggcaaaggatgcagatgaacaatccttttattggaaggacacagatattgggaaccataatgcaatatgttaccatctggttgctcctagaactgcatttttatatgaggaaactgaagtgtagagatgttacatacatatgtggtcatatttatgtgatctgagctagttatctgattccacgtccatgctctttctcattttcagcttcatctctttctgctctaaaacatagactgtcttcttgggacatgctgagttttatgtcattcatccagacactgagtacattcatgtatttgtgactcagtatttgatattacatctgtaattgcagtttcttctttcaatactacctaatgctctttatttttttgtctgaaagctttacttgtttttcttaggctaggagggatgccrtttctcagtgttctgtggtgtcctctgttccctcacagtgcttatctctctgcattttaattgtgtgttaaaggggggcctctctcctaactagactggacatttctggaaggctgcgggaggggctgctttttacctatgggtccttacataataggcgacatataaaaagtattgtaaatgtgygttgaaataatggataaacagaattttcctccagaaaaaatgagacttgttattgaagggccggtgctcatgtatttcataaacaagtcaagtcagttggatttcaatcattccagaacaaagggcctgggaaatctgtccactatcatgacttacatgtgttctgtctgcatattgttctttcttttaaaactcaagcaatttttgtacaatgtgtttccaaagtgatttttatccctttattttatggtagaaaatagactccaattattctctttaattaagtgattttattttattaattgtttctaacttacagaattccctagagaccctttacatgtttccaaatgaaggcaggaagaaaagcacattaattatacacacaaactccttttggcgaattaaacatgatgcacagtgaacatgaaatgacttgccctcctgagctatcaatcttgtcattagtgatggcttgtwtgagtagtattgacatgggcttatccaaattggattctgcaaagagtcattttaattttgcacaaatgtaagaagataaagtagtctgatgggcagtttgttttaacccctccttttgacaagtggctgggttttttctgtttgtaataccgcctagtactttttggagtttaaatttttttttcaaattttaattaattaattagtttaaaattgacagctaacattgcgtattttaatcacgtactgcatgttgttatgaagtgtatacacattgtgaaattgttaagtctagctaatgaacaaatgcattaccttgcatacttggtgagagtgcataatatcaactctgcatttttcaagaatacaatttattgttattaactatagtcaccttgctgtatagtggatctcttaacatttgttcctcctatctaactgtgattatgtataatttgaccaatattgccccatccttcccccactcccaagcacaccagcctctggtagccaccattctactctctacttctatgagatcaactcttttagattccacatgttagtgaggggatataatatttgtctttctgtgcctggcttatttcacttaacatgatgtcctgcaggtcaatccatcttgtcacaaatggcaggatttcattcttttttatggctgaatagtattacattgtgtatataccacattttctttatttatttatccttgatggacacttaggttgtctcygtatcttggctattataaatgtattgctataaacatgggtgtgtggatatctcttcaacatactgatttcatttcctttgcatataattccagtggtgagattgctggatcatatggtagttctatttttaagtttttaaggaacccccatactgttttccacaatggctgtactaatctacatttccatcacctgtgtataggggttgccatttctctatatccttgccaatacttcttatttttatttttgatagcagacattctaactggggtagggggatatcttattgtggttttgatttgcatttcactgatgattagtgatattgagcatttttttcatatacctgttagccatttgtgtatcttcttttgagagatgtttattcagtcttttaacaatttgttagtcagtttttctgtttttgctattgagttgtttgagttccctatatattttggatattaacctcttatcagatatatagtttgtaaatatgttctctcattctgtgggtagtctcttcactctgttgattggtttgtttgctgtgcagcagctttttagattgatgtaatctcatttgtctattcgttacctatgctcttgagatcttatccaaaaagtccttgccgaatccagtgtcatggagcttttcttatatattttcttctagtagttttgtagttttgattaatatatttaaatccttaatctgtttatttttgtatatggtgagaagtaaattttatttttctgcatgaggatatccagttttcccaacaccatttattgaagagactgtgtgttcttggcttctttgttgaaaagaagttggctataaatgcatggatttatttctgagctctctattctgttctattggtctatgtgtctgtttttatgccagtaccatgctgttttggttactgtagctttgtagtatattttgaagtcaggtagtgtgatgcctccagttttgttcttttaactcaagattgttttggctatttgggctcttttgtggttccataagaattttaagattttttttttctatttctgtgaagaatgtttccagtaagggttacattgaatctgtagactgctttggatagtatggtcattttaacaacatttattcttccagtccttaaacatgggatgtcttttcatttatttgtgtcttcaattctttattcttttcatcacacaaaacaataaatgtgatacaccactgtaacagaatgaagacaaaaaccttatgatcatttcaatagatgcacaaaaagcatttgacaaaatgtaacatctctttataataaaagctctcaacaaattaggtatggaagaaatatacctcaacacaataaaggccatataagaaggacccrcaactaatataataataaatgaggaaaagttgaaaktgtttccccaagatttggaacaagacaagaatgcccactttcaccacttctgttcagcatagtgctagaagtcccagccagagcaattagtgaagagaaagaaagaaaaggcattcaaagtaaaaaggaagaagttaaattgtccctctttgcaaatgacatgatcttatatatagaaaaccctaaagactctaccaaaaaactgttagagctaataaacaatttcagtagagttgcaggatacaaaatcaacatatgaaaatcaatagtgtttttccgtgctaatacggtttgcctgtgtctccacccaaatcttatcttgaattgtagttcccgtaatccccatgtgttmggggagggatctggtgggaggtaattgaatcatggggatggttacccccatgcagtactctcatgatagtgagtgagttctcatgagatggttttataaggggatttcccccttttgcttggcatttctctctcctgccgccacgtgagaaggatgtgtttgcttcctctttcaccatgattgtaagtttcctgaggccttctcagccatgcagaactgagtcaattaaacctcttttcttcctaaattacccactctcaggtatttcttcgtagcagcatgacaaattcacatgctaatagtgaactatctgaaaaagaaacaaagaaaacaatcccatttacaatagctaccaaaaaaaaaaaaaaaaaggaagaaggtgaagatctctacaatgaaaaccataaatcagtgataaaagaaattgaagaaaccacttatattttatagtactatggggttggtaaagcaccagaccagatattattttgtcaagccacagagcaaccctgggagataggtgagttttacaggtgaagaaattgaggttctacagttaaaggttatgcatcagatcatataaccaggaagggacagagccttttcagttgttgtcagtattattttttttacatttctctgagcaggaataggggttgagtataagcaaactcctttcctgtcattttcagtgatcaaacgagaggaaattctgatgtgtttatgttaaattgtcaattcagtaatcattgtttggacmcctattatgtgctagagtgtattggtgataaaatataacatgtgttgaacrtgtactgtgtgccaggcmctgttctaatgacttcacaggatraacttagttaatccatgcagtgaccctataggatagggtcattattgtttccaatgtatagttgaagcacaaagggattaaagtaagtctcttaaagccacatggcttaaaagtggcagagtggcacatcacaagctgttaaccactacccagtactgcttctccggtggtggctttcttctcttaagatgcatgtggtctattgcgagaggcagttaatttccaagcagtattataagttgctgtggtagctgtaggatggtatcagtcccccaaagaagtaaggacacatggctttaggaccttcatttggccacagctgagctttgttcctacaaactgcatcgtttgaaaagcacattatattttcaagacttttttctgtctgaatggagtttrttgcaatacttagaaatatcctagggagattatttattttctgaactgatgagagagcatgtcagattgttggaccagattccatgagagaagccatttgttgtgcccctgatatgtgctggatgaccaagacccagttcttgtcctcaggagcttcccaaggagtggaaataaatgtgatatcatcaaaagcataaaacaacagttgaagtttattgaggacttgctctatatgtcagttgctattctaagttcttgacataactttttattgtaattactcttatagtaggtattttacctgcatgctacagatcagaggattgaactgagcaagtttaagtcatgtgtccactttaaaggcaagggcttttcttccaataaaatgttgaggtaattgagttttactgtctttgaaaaggagcagggagctgtagcaaaagcagtgaaattgagttttactgtcttagcactcaacaacattcactgactactatgtgctaaacactgctctaggtgcaaggaatatagcactgaacaaactccaaatcyctgctttcatggagcttatgtttcagtggaggcaaatagacaataaataaaattaataaggaaatctggaactaaatgtgataagggcgacagaagaataaagtagggaagaggaaaaactagtgaattaggttgcaatttaaaatagcatgcttagaggacattttgtgtgtgtgtgtgtgtgtgtgtgtgtgtgtgtgtgtgtgtgtttattgaggtttaacaaaaaagctagttaccactaccacttctgcttaaagcctattatttctctccattgccttcataaaattcttatgtacaaagcttttcataacagtttacctcttcagacccatttcatatgactcccaataaagtatacttcaggtccacgggcctgcctacattttcttgaaaataccatgaaataccacgaaataccacgatcttttgcctttatgtttttgcctctgctgtttcctgtgctggtgacccactctcaccatctaggaagcttttctaaacattgttcacactcatgccccacccccaactccactctatccccatagcactagtgtttatctcacactatattaaggttgtctctgttaggtgaccctctaccagtagactgtgactttttcaacctgggaattattttctctctaagtgcttaataaatgtggaaggaaggacggaaggacggaaggaaggaaggaaggaacgaaggaaggaagggaaggaaggaaggaagggaggatggaaggaaggaaggaagatagataagtaggtaggtaagaaccaaggatggaaaaaaaaatgtatgccaggaaggaaaggaatttaataaagaaggaaggaaattaggaagaaaaagaagggagaaaggaatgaaacaactaagggaaaaggaaaaaagagaaggaagagggaaagagggaaggaagaaatcaaaggtttttgaccaagattgtatcttagagacattaatttaagcatcatgcaaaagaacgtgtagttgtttcatcctggtgtgcctctacctcactttaggagatcttctaaagtttctktctttgggccaagaagacaytcagttttgggtggcccttaggaattcactctgctaatcgtggagaagacagggctgatggaggaaaatgcctgtacacatttctctcatggcaccccttttcccagtagcatgataaatcctggaagtcctgatggratattttaatcacagcttgcagtccttcagatcccaaccattgacagttgattcactccttttcatgcctgctgcctgtctccagttatggtagctcttatgcatgagtctaacattagcagacaaagcatgatggattgctcagggttcccttcatctacagaactagagattgcttcctttttcagactctcaggacccatgtggaacaccatcatgaatgaaagaagaaagtagtacaatattggatgtgcctgtttgctgccactgtttagaaagagaatgatgcattgtggggaatgtaagtgtatagcgtacatcctaaccccccaccctcaacccaacagcaactgatgtggaaaatcattgatcatgatcaattccctaactgagtctggcaatttcattgaagatgtcatactactttcaaatcagaatagtaaacaatttccaaaattgaatcacaaaaagaaaagtcaacccacataaagtctttagatttttgaagtgatctaaggtccaaaaggattaggattgattgatttttatcttggaagtaggttcaaggcagctctcaaatctgtggtctctctggatatgatgctaggaatgtcagccagatactactttatttttattttttaatttgattctaggaccctgagtctgtatgtaatgtttcagtgagcaaaatagttatgtttggctccaatgaaagwttgatagaagcgattttcagatgtgaaatcaaaacagagtgaaaaaatgtcacgtttaaataaaatgcagtacttggaggcatcatgtggtctcataataaatgaattcatggcacaaagttgacaggttttgaaggagaattcctttcaaaaatttgaggtgattcatttttatgattaactgcagtaaaaacaattactagagaatttttaagtgaaaggaaaagaagctttgaggtgtttatagataacatccggctgccttcatttttatacttcgcctcatgcaagctatgaagttgtatgtgtatgaagtttggctgaaggccctggggctctggggacactcatccatcccaggcctcatctgttattcacagtgtggaagggggaggagcagggagctgtagcaaaagcaacgtggagaagtccaccagctttagactcaggcagacctaagcgtgaataactcagtatgacctcaggcaggctacctaacttcctggcatctccctttcttctgttgcttaaaattgagacaaaatgagatagaagtgaatgctgaggtccagcatgtgaccttgcacatactcagcaaacgacaaaaatcgaagccatggcaagcacaaatgatatttatttcaccaacattgatgggcatttactctgttgtctattggaagctctgtacttgatgttgtacaaaagacttgccattcatctcaaggatctcgtaatccagaaaggaggtggatggactaacaaggaatggaaaaccataggcagaataggacggaacagccatatcctccttgaggacagagagagtatctcaaccgtgtaatcaggtctagcatggtgtctgggtcatgtggagcactcagtgaatatctgctgaataaattgagttgaaaagataatgaaagttggtggaagacaaaactgaaaagtgctatgtattagtcaggtttctctagagatacagaaccaataggakgtgtgtgtgtgtgtgtgtgtgtgtgtgtgtgtgtatggaaaaaaatatatatatatggaaaatatgtatacatggaaaaatatttattataaggaattggctcatatgattacagagtctggcaagtccaaaacctgcagcttaggccagcagccttgaaactcaggagagccaacagtgcggatgaattctaaaggcggtctctyggactgttctctcttgtttgattctctcttgtttggggctgctggtctatttgttctgttcaggccttcatcttatttgaggaagctcacccacaaataatcatcaattattattgattgagggtaatcaactttattcaaaatctactgattcaaatgtcaatctcatccaaaaacaccctccaaattgacaccaaaaattaaatgtcataccctaggagaaattaattctaaaaatattcttcaggaaatgttccaaattactagaatgtgtgggttcaaatcttactccttcagtttctttctgtgtatctttagacaaatttttaaatttctatgccttggtttcttggtctgtaaaatggaggtgataatagtacttatgccatagagtggttgtgaagtcaatacaaggaattatagcaagtgctcagtaaactagagctgctgttggtagcattagaaatatgcaagcttttgaacttaggtatacctcttcaagccaaaattcgtccaacatttaaaaaacatattttgggtaaaagtagttttagattatatgaacaaattttcaagttgctgtaagtactatttgtcatctactgtacttaagtactttatatgcatttttcaatttaatcattatcagaaacatggcattaggtatattcttgtacccatttccagatgataaactgaggcttagaaggattaaatggtgtactccaagtcatatagtgactcagcagcttaatggagtctcattcataatactcttgacacttcttctgatcctttttccatcttgtcatgcttgtgtcttgttggatggaacaaagtcagccaggtataygttttcttccttctttgatttggaaatgcagtcattttgggggttcacatctaatgtttttctttcatgtaaagggattataggtattcatgttttgcatttagttttgattgtttctctactttgcttcattttctttctgactatagctaggcctcctagaaaatgacaggtgcaaaacacaccacattttacatgctaagtagttgggtagttatttctgagcagggagaaatgacaaataaacatgtgtgggtgttttatccaaattcattgtcaggagactgggatgtttgcaactgattggccccatgaaagtcaatgatggccttagctgagttctgcttgctttcactcacaccaggggtccaccctgctctggaaaaatcacatgaaagatgtgtatgcgcacatgcatgcatgcttgtgtgtgtaatgttcacacacacacacaaccctatgtgtattaccctttagtcccttccctgcctacatctgcaaccaacttgttatccctatccttaatatcaccttatacaattactgtacagaattgcttgcagcaattcttagtgggtcttagtgggctgtgctcgtttgtgcctctggaattctgagttcttcctgacttgaatgttcaactcccctcctttgtttccttgatgaacttacatgtgtgtttcaaaacctgatacagccctgtgaaggtcgaagacatgcctttccttcatacccccaaatgacttccgttctttttggtgtctcctcttggacttgtgcctacttctgtgttgtccttacagtgctgaaatgtggtagatttatttctgagcagggaaccagtatagcatagtgtttaaagatcaagtctttggagtctgcaaaacctagatttgagttccagttctgtcactccctagtttttgaaacttgaacaagtgactcaaygatttgaaccacaattttctcatttgtagactgcagataatagtgcatctcttcataacattaagtggataatggacatgaaacaagtggcacagtgcccagcccatggctagtatgtaagaagtgagttgctggtgtgactacctcaatgtgtctctctcttctgtttcattcgaaccctttgaggtcaggggcctcttcttatttatttctaaatttgtagctcctaacactgcgtgctcagtatatctctggtaaattctgtatgagccagatatatagactcatcttacaaacgcacaggctgtggttagcaaagttcacygtagtctttcattaagcagacattcattttatcttagtgtttgggcatgtgacttgaatagctattttttttttgaagacacttgaagccagctgttgtgactttgtgtgaakccaactggaaattggcatttacttctctttcattctcaagctctttgtccctttttggtgccagtcagaggtatgggcatgcttttgattgggtcagccagtcaggaacttgtaattattgcttctctccctgagtagcgcccagcaaagtkgatctaaatacagagggagctcattccattcagcagtcggggccaagtgggagcaggatatgcttttcctgatctcctgtcactaaacatttaccatgaacatgcaagcattagcatatggtttgttactacacagctttgaacctactagggtggtcaattcttgttggtagatgatattggtaagtaaaggagtagtagacagaaaaggartcaaacaggtatgtgttcaaatcctagctacaccacgtaaaagctggtgggatctaaggccaatacttcaaattctttktatcagtgtcctcatttttaaaaagaacaaaaaatgaggataaaaattgtgtctgcattataaatcacttgaagatgaaatgacttggtacatatttaacttatcacagagctcagcatgtggtacattctctattaaggatagttgatcagagcaacttttcaggatgatgtgccagcatgggctagtaggaagaaccctgggctattggcaatgtggccatttgagaaatcaaatctatttataratatctgtgccaattgcaatgctttactgcyatagaaatgaagtagtttgtrcttctcatttcttgcccaggaataaatgtgtctatgtcaggatggccacttgatggtgagattctgcagacataattattgaggtaaagaggaggctacaatcagtattttagtcacataaaaagatattcttttgtagctatccttggacaaactgccaatgagtataattagtttctgtccggatctttattttgatttcccccgctaggaggggaaattctcactgtcatgtgtacctaatgcaaaattcctccacagatactggaataatgcaggctgctttttccttgaaggtgcctacatggtaggctgtatgttaatcatcagtcctgaaaaatgtcattcaatagcaggggaaatatgatagtttgtgcattcatggaaaagagattattttcaaacatttcaaaatcccgatgaccttcgtcagagagcttccttttttttcccttacttatttggagaaaagatactacagctttccatgttttataaatatggcttcgagtgtagtggaggaaacttattgtctgaaaattaaaggctaaatgtatgatactcagtcagcgtgggtgctaaggaccctgccacacacacacaccaaaaaaatctcttcttacccagaatacagtgggcattttacaaaagcaaggttaaagagaagtgcttagaaatcactaccagtgcctgatggtttgggatggaaaatatcctaattcaarcatgaaggagagttgaaagagaagaacaatgaaacaaaagtgggctgtgttgaattactcagggtcacaggacgagttattacaaacaggatgaagaaagccccaccctttttagaaagtcaggagctattgggatkacttgcctgggacttactttcagtgagggaaatgaatgttcagtgggctttagaatgagaggtggaaggttttttgttccattgccagttgggaaggaaatgggcttgaattttatgttggttcttattaccttccctacagatggctggacccacctcttacttctgtgggaggagcatggtgtctgggcagagttaaaggctgggtcaagggcacatatggcttctttcttggagaactttggagtcttgttggagaaataaaagaaccaaaaccacgtgtagagggctagacaagggaggcatttccagtggagctaagtgacatggctcagactttgtgtagttggttagartcaggcagaaggtagttggctgcaggttagatactgagaacatcatgaaggttctcgtagaggggagaagaggcattctagttggcttcattgagggaaaattggttttcattcctgactctggcaagatgagtgaaatggggagagttactgaacagatgatgtatacataactgtgcctcagttatttcatctgtacaacggggatgataaatgtactgggtgctttagagattaaattaaacacagttagcatctggtactgggcctgacactaaataccagtttytgcttttcagctaccttatgaatatttggcaaccatttattttttatagctcaagggtcacctttaacatgaagacttgccttctaaactctgataaaaccaccctctctcttttggccctccctctatcctgttcacagctctgttttagcccctgtgaaaatttagtggacttgctttatcagtgatctgtctcctacagcagatagtgagcctctaggggcagggacaagtgtttgctcctctgtggattcctatctctcagcaacttgcctggtatataggaaacactcggcaagttttgaatacaattttgtctccttcaggctcatgctgatatgttattcgaggtaaatttatattcctgtgctgctcaaatacccttgttgatagttccaggtcatgatgatcaaagagccaactattccacctagaaaggaacctggaaagtttcaagtttaattcattttcttgaggttagaatgaaagtaaatgaattttcttacagttttagaggggtgatggaaccccaaagctcatccctaaacagcagtgtagtaaccccctcatcttacctgacatctcttgcctactgtgcacttgctccttttagcagtaacttagccacagtactattgggaagacaaatctgccgcttaaaaaaaaaatcttgaaatacagcctaaaaccaaattagaataggcctttggattagctatgccatttcagtctttcattagtgctgataattagcagaatttaggatgggcatttaaattatggcttggacaacaaaacatctctaggaatgaaattaccattcaacttacattttcaatgagatcttgaaatcacttaaatataaatgaggctgaagagtgctttgatgctgggggctctgaaccctggaaccaaagtggatcattggaataatgataaaagtcacaattgtgctgaccattatctcatacatttgtgcagcaaattagagtttacagagctctttcataccattagaatcttagcaaattagaacgggaagagatcatagaaatcctgtaataccaccccttaatatattgggtgagaaaaatgggatatttygctgctggtcacagcaggcctattttgcaaggtaggcagggcaagtattattattcttactgcataaagtgaggaagctgaagattgcagatgagaaatgtttgggccgtgagaaatgttttgccccatttgrggcaggactttgccactgccctgctgaccccaaatcctctcctagtttgtataagcatatttgttgacagcttcacctccccagaagtgccttccctggccctgcactgaatgggctctcccttcctgcctttgtgtaatcacaatctctccttcctctggttgatatcatagcttttatgactacctaacattagaaaaggtatattttggtttatttgttggttttctccaccagtacgtaagcttcatggattttgcctattttgttcacaactggaatccaagcaccgaacactgcctggcataccataggtacacagtaaatgcttgttaaatgatggaatgaataactgaaggaggtagttaacaaattcagatagtatggagtaatgagacttaaaaagagcctcagtctatcttgaaaacttggcatacgtgtctgaaaattggtcagttcatgtacactgctgtaacctcagcttttagtgaatgaactcatttattgaacaaatgttcagaggagcttctatactctagactcttccagcttctagagaacagtgacaacaaaacagcctagaattccatgtcaaaggagagcttccatttttggtatactgagatgacaataaataaaggatgtaaaggaaatttattaataaatttataaatttgcatctctgtgtgtgttataacaaagtaaaatataagtagaagagcaaagataagaattgggattccattttatagcgggtggccaggaaggtctcctgagaattgtcatatcactatttaatgaatgaatacttagtctttgtgtttgttgaaagaatgaatgtttaaaaattctgccttcacatcaaaatctctttgaggaaycttcaagtaaaatgtgtagaaggcttgtaagctctgacctacgaagtcaagttgaagctgaaatattaactaccatgtaggatcctcctccgtcttctcactcctcctcacccctttttcctctgaaattagtaagaactgccacactggggctgattacaatgaagctgagattcattgctcagcccagttaagccgttttgtagcgtagtgaaagaccacagcagctgccactgaatagctttaagttccaacctcactmacctcttccgttttctagcyctctgaccttggacaggtttcttctctcgatctcagggttttcgtttttaaatgatgacgataatatccacataagccatgtttctaaactgcctactaattcctgatgcacaccagtaacttgacacctgttaattccttcttctgttttgtatgttgtacatttaaattgcccttgatattgagggattagagtacaatgcaagtgtgaaaaagaagcaatctggagtttcttgcatgcataagttgcataggcaccggcagtaattgcagggccgtgaaacaggataaccatcacagctcataaatggtggtacattttaatcagattttagatgttatgaaggctccaagtaattacagttatttttgccttaaaattgaactgccgttattaaaatgcttttattaaatctttttttcctttggtagttatgaaagattgtagaatttctgagtcaaataaccgagcactaratgttgcatacataaaagttcttatgatttaggtgtaggaagggtyccagactcactgctaatgctggagcctgaagaagaaacagtggcttttcagtcacccctgttggttctggcttattcctcatcacctttactctgagatgtgccttattttccctttattgaccatccttatgtctgttttctctaaggcagttatcattattttcatttcccagatgagaagtttcaggatcaaatatgttagttcatcccaaaccattcacccatggtgtgctatttgctaggtaatgtgccaggagagcacacaatcagcgcaggctcacctggcctgtaggaaagggcagatccacgatagggggcaggtccccaagttcagcacagtgttccctctgttacaatctgctgaaacatcgggaaagacttagggcccatttcagagtccaaactggattattacaaatcctattattattaataatgattataatcatcctgaagatagggctctaagataatacagatggtccaggagcatccagataaacaagactgtctgggtctctgccctgggacagtgcatatcctatcggggtagcacatgacaggcataataacaacagcaatrttgactggcttctgatatttggaggcaccaagccaaggtattccatgcatgctgtgaaatcctcccaaagcttaatgctgactatagtgttaccccattttacagatgatgaaatgagggcttctgtggcttaggtaactcactctaggccatgcagcttgcagctgggaatcaagcccacgtctgtgtgccccaaagtctgtgatctcagtgaggcacagttgttcctgggagggaactccatcttaacagaattacacacgagcacagatgtatcagtgtacagtgccatcatgaactgcgtatactgcttstgcttgtttttgccgaaacctctataaccttcgcctcgattcatcagggtgactgtgggagccttttcatttgggargctgctgggagtctaagctagcaccgtttgaactaattgtgtacaatttagcattccccaagcactgacagtcctcattcaaaccaagtgtgaaagtttttaaattagctttcacagtttgattcacaagcagcaaatgcaaaacggcacaggattaatttttccaagcaccaccacgatggcatagctgaaggctatcttagcttattttctttaacagtaagagaaagagctaggcagagagagtgttcttaggagaatgatgttctagaagagatctcagtgctctggttacaaaatgaatcagatgtgcaaattacaaagtagcagcatggaacagtgtatgcaaagagcaaagactttggaatctgatcatcttgggtttgtaacttggttctgccatttactggttatgtgggtggggaccggttaattatctttcttgagcctcagtttgccttattgtaaaatggggataatattttcaaatgtctgaaaggtttctggtgaggataaaatgatatactctaggtaatgtgcttacacagtggctggcacatcagtggatctcagtcaatcagagtgagaggtgacagkgtgctggcagccctcacagcccttgctcgctctgggcgcctccttggccttggcgcccactctggccacacttgaggagcccttcagcccgctgatgcactgtgggagccgctttctgggctggccaaggccrgagccagctccctcagcttttggggaggtgtggatggagaggcgtcggtgggaaccggggctgcacaccgtgcttgcrggccagcgcgagttctgggtgggcgtgggctccgcggaccccacacttggagcggccggccggccccaccggccccaggcagtgaggggcttagcacctrggccagcagctgctgtgctcaatttctcgccgggccttagctgccttccctcagggcagggctcgggacctgcagccyrccatgcctgagcctcccccgacctccgtgggctcttgtgcggcggagcctccccaatgagcgcagccccctgctccatggcrccwagtcccatcgaccacccaagggctcaggagtgcgggcgcacggtgcgggactggcaggcagctccacctgtggccctggtgcaggatccactgggtgaagccagctgggctcctgagtctggtgggaacttggagaacctctatgtctagctaagggattgtaaatataccaatcggcgctctatatctagctcaaggtttgtaaacacaccaatcagcaccctgtgtctagctcagggtttgtgaatgcaccaattgacactctgtatctagctactctggtggggacttggagaacctttatgtggacactctgtatctagctaatctrgtggggacgtggagaacctttgtgtctagctcagggattgtaaatgcaccaatcagcgccctgtcaaaacagaccactggrctctaccaatcagcaggatgtgggtggggccagataagacaataaaagcaggctgcccgagccagcagtggcaacccgctcgggtccccttctgagctgtggaagctttgttctttctctctttgcaataaaccttgctgctgctcactctttgggtccacactgcctttatgagctgtaatactcaccgcaaaggtctgcagcttcactcctgaagccagcgagaccacgaacccaccgcgaggaaccaacaactccagacacgcctccttaagagctgtaacgctcaccgcgaaggtccgcagcttcactcctgagccagcgagaccacgaacccaccataaggaagaaactctgaacacatccgaacatcagaaggaacaaactccggacaggccacctttaagaactgtaacactcactgccagggtccgcgtcttcattcttgaagtcagtgagaccaagaacccaccaatttyggacacaagagcacttattagtatgatcatccttgaattgctttcctgcaaataatattcctgtcttagatagggagttgttgcttattgcttttatttttttgtttttcccttagcaagcgtttattgagcatccactatttgccaagtgctatgcttttggcaaatgcactagggataaagaaataacaaaatatgaacccttccatgaagaaactcagcacagaggcagacacataaaaacattcttataatacagcatagtagctgcagggagcagagtgtacagtgaaggaacttttgagctgacatggagggaatgataatagaagatcctgtggagaaaagactcaaaggatacataggratcagccaggtgagaagggttggaaggaagttccaggcagaggaaatggtctcccacaaaggcaaaaaggtgagaaggaacaaggttcattttgagaacttctgagttgttctgaaaggttggagcaaactatgtataagtcagtaacttaaccctgtctcaatttcctccattggcataataatagtacctatcccaaagggctgtgttcaggatgaaatatggtaagtcatggaatacacttaggataatgcctggcataaggtaccagacaatgttggcaattaacatcacctaatgttgaacagtgacagatggcatcacctaggagcttctcagtgctttcactgtacagcgtgctgtctatagcatcaaaaggaggttcttacacgtagcattccctgaacctgtttgaccattagatgagtggagaacacttctttttagtgaactgttggtaataatctttttcgggggacctgtgtactcttaatgtttgggaaatgctgtgaatacagcagacgagatcagttttttgttctaaaagagtttaaattgagagtctaacagctcaaaaaaagaaagaraaaaaaaatcaaaagagttttctctctctgtttttgaaggaccctttgtttcatacacacacatacactccaatcctgggtatttgaataaaaacccaaattcagggggttagaaattgaagggttaaaaggaatgtccctttgcttatttaaattagtttctgatattcctgtctaatgaatcattttattgacaggtgtttataggcatagggtaggcaaatgaaaaattcacagtgcacagaagtgagtcctgtgatttgtttgctgagtgttaaaactaaggtttggtgctagataatctcccagcttcttcccagctgtgtgatagagaatgaacctggcagactgggtcagatttgaaggtaggaagaatcagggtccaaatctccatttggatgtagggaaccctagattagagatggcacatgggggttaagagcatagattttgagattggactgcctaccccagaacctgccctgccatttaccagccatgtagccttgataagtgatgatttctttgggttccaatgtcctcgtctgtaaaatgggaccaacgggcacctcatgctgctgctcttagaacagcacctgggcacaataagggctgtgtaagtgctggctgccagtcaaaacccagctcttatacttcttgggcaaataaattagctctcttgagccttccttccctgggatcattgtgcctgtcatccacaagtggtggaaagattaaaagaggtaaagtgagtgttcagtgtgggacttgtgcaggagggcccttcttgtagttcagagcccaggtgctggcatcagatggtgctgtttaccagcaatgaaaacttctgcacccattaaaactccgtacttcggcttcctcagagtacacacacctaggctggttggtggtgagcaataaatgacacagtgtgtgcttcaacactttgaggccaggcacaagactgatactcaataaatgttacctattgttagacactgacctgggctagccagatataccttgcacactgcatccgccaaaggaattgaagcaaatgtagactgtgtctccacatagcctagcaaatggttacagtgactgcgtttccacggtggctgcacaaatcaatacagatggctgcccgatcaattcaagtacagcatatctgatagacagactttataggccatgacacaccaatgcagaggttttcccaagccatgcagtggaatggattttcactgtcttctcctcattagatccagagtgcatattttccaacacagaacacatgcaaattgatgacaggcttttaaatgtaatcaagaagaatgaacttgtgtacaggcattaatttgccttagttctgtattaggatttccagagttcagtgatctgcatttttgtttggtgttttctctttctgtagaagagtttaagtcaactaaatggtgttacctctccttcccacttgcaaatgaatcagatgagggtaagcctgccgtaatgccttctttgtaaaaccccttctagttggggtaacttgaagagcatcgagattttgcttctgctccctggcatcttccaaacaggtttgagtgaccagcatcagaaatgctcattacaggatgaatcctttgaatgaatcgaaaccatcctagattctgctagtctctgctatctccacaaacctcccgagctctacctccctggcgatgacttgaaaattaattaagtgatgcttcagagtaacatakctattgctgaaacattagaaccttttgttgatgcttaagttttcagtactaagtgtcattttgtcataactatattgtgaaggcaactacatgggaccatatattaatttttaaattcaacccgtatttctaattataatccttgaaagcatttaatatggtagtgtgcacatagtgtgtgttcagcaaatactggttggattttgattaaaaggtgactttttaaaatgagactgttaggaccttaaacataccagctcaattaatgtgtcagcctgaaatcattggtctgtaatcacttcttatttccactttacattcttaagtgtacacttagaaatagcaatttagtgataggaatgtaacagactgctttgttaaaggctttgaaaacaatgtattaaacgtttaaagaaagaagccggccaggcacagtgctcacgcctgtaatcccagccctttgggaggccaaggcgtgtggatcacgaggtcaggagatcgagaccatcctggctaacacagtgaaaccccatctctactaaaaatacaaaaaaattagctgggcttggtggcgggcgcctgtagtcccagctgctcgggaggccgaggcaggagaatggcatgaacccaagaggcggagcttgccgtgagcagagatcgcgccactgccctccagcctgggcgacagagcgagactctgtctcgaaaaaaaaaaataataattaattaaaaaaaaaaaagaaagaagccgtatttttttcctaagtcagtaagaaggaagtgagcagtaacattacagtaacagacatgtcctgagtgggaactgcatgtcaggctttgatatacaccttctcrcatccgatcttcattcaagagtgaactcttccttatccctattttacagaggagggagcaaaggcttaaaaaaggtaagtaacttagcctttcggacttatagcttctaaatatttagcacttacaaagttcttacacatacattacttcatttgttcctctcagtaaactcacaaagtaggaattcttggtaaccttatagttgagacaacagagccaagatgacttggggcccctgatcctgtcagggcagggccatgactagtacacaagactgtggttttcaaagactatagtttttccattatcacatcctgaacaatgattgcatgaagagttatgaacttcatggggctccaacttactgcccagtactaagcagaaatagatactacatatgggttttgcaacatccatttgcttctaaaaggttatatttgatatcagcttatttctacattttgaacagaaacttgcataaaaatagccttatatccttgggttcagtctaccagatagatattgagaatgaccactgcaaaagaaggacaaatgcctattattttttaatacatatatgcacagctaccatctaaaatgaggtagctcaacataataagggatctctgtgttccttattatgttaaggatttaggtttttcagggaaaactctgtctttccaggaagcagagaaggggaatggagaaggaaggtaaagagagaataagaaagcatgaggttgggtgyggtggctcactcctgtcatcccagcactttgggtgggtgaggtgggcagatctctygagcccaggagttcgagaccagcctgggcaacacggcaaaacctcatctctactaaaaatgcaaaaattagccaggtgtggtggtgtgtgcctatagtcccagctactctggaggctgaggtggaagagtcacctgaaactgggaagttgaggctgcagtgaattgtgattgtaccactgcattccatcctgggcaaccagagtgaaaccttgtctcagaagaagaagaagaaggaggaggaggaggagggagaaaagagagagaagagagtgaggaagagagagagaaaaaaggaggaagcaaggaaggagggaagggaagggaagggaagggaagggaggggaggggagggaagggaaagggaaagggaaaaggaaagggagagaccttggtgtcctggaactttctagtggaatacaggtgccactggcctgttgccgatgagcagggaagccccagcagtgggaggatgcacttcatcctttcttcattcactcactggcacaaatattcataagtgcttgctctctcaccaggcgccgctcttctaggtgctgaagatacagcagtaaaccaaccagattctgccatcatgggattacacaaaataaatgtgtaaattacagggtacattataaagtgttcaggaaaaaaaacataggagagacactgagagtacagagagtggggtttgtaattttaaatagggaaactgaggaaggcttccctaagacagtggcatttgagcaaaggctccaaggaggctgcaggagtcttctcttgtgatccctggggcagagagaacagcagatgcaaaggcaggggtgagccctgtgtgtttgaaggatggtgaagaggcaggtgtgcctggaacagggcaagggataccaagagtggtggtcagagaaataaaggggataaggtgggaagttcatagagagctttataatatcataaaagaatctgggttctattttgaaaataaattttaggaaagttcgagcaggagcagagactgcagccagaaagctgttacagtagtccatgagaaaggggatggtggcttgcaggaggctttagctgtgtggttgatgagaggtttggattctaggtagagacattcaagtgctattgatattcaaatgcttaggtgccagacactgagacccaggacactgaacagttgaagaatcagtgtcactgattggataacacactctctgtttgtgagtactacctagaggagctgatgttggggagggagaggcaatactgtgtagaaggaggttgcctttagagttccaatcctgccgtgtcacatgctgggagggcgaccttgagcagactcatttagccttgagtctatttccttatctgtaaaatgggaaagtgacatctatttggatacttacaacacatataaataacaaatacagattgcttaggacaattactgtaatcaacagggtagacatagaggggtaacatctggattcttgtaaggggcagaataatgttatggttaagagcccagactcaaaagccacacctcctgcatgaccatggacaaattacttaaatcctgcatgcttaatttgtaaaaaggaaacggtgataagcacctacctactagagctgttgtgtagattaactgagtttgtttgcaagcttgtagaatgatgcctgacacacaggaatcaaaactccttcctagtgttgctgtgagttccaaagaagttgttcagaatctcctggtaacattagcatacttgggctgcattatacctatttctaatgcatttcttatttcagtgttttctgaatccaaattttgcctaaattgcccaacaatgtcagttaaaccaaatccttttatttggttctctgtttattcatcctatgcaatcagagtgtcattttaatttcttcttggattagtygtgtttaccaacagcactggaaatacattccagccttcagaaagaaaacgacaagagctataacaaggtattagaggttgtgtaaacttgtcttacttgaagttaatgcgaaaaatgtggagaaaaaaataacaaggggaaatttcgaaaattgggcaatgatgtttaaccaaaatgacatgtgcatctctgaatgtaaatgcacaactgcgttaatgccatgccggctgcctgccatcctgaggttttatcacatcataatgcagtgatgaggtatttctttgcttttttggtttttctacttgcagatgccaacaatgattatttgtaatttcagaaataaagatgctcaaaagcaacatctgtggttccatatttttctgtgggattcaaaatgcatgtcttattcctatttgtaaccagggaatatttgcagtcaaacataattcctgtgtacttgatttagttctgggccagattgactaaaaggttttaaaatggtgcccatgcttttggtatctacactatgtggattctcgaccttttaatcctcattttcgttaatacaaataaaagagagtttatcagttgattcagatgagcaggggtatgccatgtaaatttcaaggaattatgcactaaattacaggacccatttggggrcttaaatattattctccactacacaaaactggcatggattttattttaactgaaatggcacacagtggcaggcaattatttttgttattgtatttcctatcgtggcctccagaatctaaggacaatgaaaggggatgttcatttataatttgacctcctgaattgttcttgaaatgcaatttaatcctcatatcaagcaaaatctaatgctgtatttgccagtaaaatagtcatttgcattttttattgacaatamaaattgtgtttaatcaggcagtcagcatgttagcatttccaaatgattgaagacccatttttgttcaactatgtcccattttgggtcaaatgtattttgctttttttaatgatcggggcacgtaaagttgctctttaacactgtgycttaaaaaaaaaatgtccagatctcacatagctgtattttcctgtctccagaagaaagccaggaaactcttaaattcttaaattcacacacttaacagatgttagcccagcttagaagaacaattagaatgtgttgctactaacttattttattgttgaaaggaccgcagtggggtggacatagctctgaaccagaaatcaaaaggctatggtttgattattattcccagaaagaaatgaaaggttagttctctggtttctagctatgggatacctcacttctctgggcctcagtttccttatttaaacaggaaggacaacaatgttctttaactttctctaggatgttcatgaagctttatcctgtgagaggtactgttgaagcccagctctactattactagccagatgaccttaggcaggttcacccatccctgcctcagtttcctcatctgtatggtggagacaataatagtgcttacttcacaggattgttgtgagtaggagttaccatacgtaaagcttaaaacaatgcttatcgtatggaaagtgctgtttatgtttgtaattatgtcatcgacattattcttattaatagcrccttcctcacagggttgttgtgtggactaaatcaatttatatttgtaaagtacttacaataaaccctaacatgtcgtaaggtacaagcatttgctattgtgattattatcagttaactaccatttattaagtgctcactgcctgtaagacgttatatcaggaatcctcactgccacttgtgaggggagagttactagcttcatttttctctaagcttcacatacagaaaaaggctccaagtcataaagccactgtcccaagggaacatgctgagtgcatggcagagtcaggacttgaacccagggcagcctgaccccaagggggatgccctttaatgcctgtgcttccttagtcctctgttcaggcctgagtcctgagcttggagtccactttagatgaagtcctccgtgagcattacaggccttttcctgccacacagtcttagcctggcctccatattcatcatggtgaacttggctgggccttacttccccacttataygcattgagactgcttgtacttggcctggtttcctttactgagagagaatgggagtccaaggctgggggtctattttggtttccctttcccccaaatacctgcttcaattgtaccacttcctttactacctcctccaacccttgtctctgtcccgttattcctaatacaatgtgcattgccaacataaggtgttagggtaatgatgatgacagtgatggattctagtttgatttggagtagacgttcacttataatggtaaatatcaaatttgtttagatttgtccacatagacacagattataataagaacaaacatttattgagagtttaatatgtgccagagctgttctaagcagttaatagatattactttattttatcctcacagcaactctatgcagtagatactaacactgtctgcaatctacagataaatcaacagaccatagtctgtagggagctggagtggctttgagaggagcagaactggctgatccctgagaatttaattccactcatttcttcttatctttgtcaattggttggttacacacaatttgcctagcactgtgctattgcaagcaatgcaagcgaggtggagaaataagaataggaaggaacaagcatgtgtggggcatttaatgtgcccagcatggggctacatcctttatatatgttatcacatgtcctattgacagcaaccctgtaagataagtgtgcccattctcctgtcggagatgaggatgctgagaaactgagccgttaagtgagttgctttaccttaaattgttacatggcaaagctgggatttgaacctaggtgtgaagytttttcttgggtttaatctcctccctctttccttctcctctaactttaggacaatggtggtaaacaaaacaggcaaagttcctgcctctaagaggcttacattccagccagaatcaatcaatmaataaacagatgaacaaatgagcagatcattacagatgtgcgggacatcagtaggggaagtgagagagaactcctggtctaggaagcaagtccattactagtgtacttggggatgacctctcattacccctaggatctacgggatgggaaagaaacagccacgcaaagagcaargcgaagagagtttcaacagataagacagcaagtagacagaacagatgccttggagcagaagacggtgtgggatgtttgaggaacagaaaggaaggccatgtggctggtgggaggcagacaggtcagattaaacagagcattgcagaacagggtaagaagtctggactttactccaacttccataaaatgaatgaaattggccatgtgaccttgaacaatccctttctagcmtcagtctccatttttttaaatctattgggcatgggtaagaagccctgcctcatgtacatttcagagattgtttaaatatcaaatctggagactttctggtcacagagaaagatggctaatttacctgatacatttatctgtataaaagtggagtcattggaagactgattgtagaagaaaggaagctgaaccttggggtttctgaaggttaagtctctcattgattggtagtaataatagtaataagagtaaatattccataaatgattactctaccgaaactaaactaagctctttaaatgcattatcattctatcctcagaaaactagaaaggtaacagacactgttattacctcattttgacagttgagagactgaggcatagtgaggatgggtctctatccatgtgtttggttatgaataacagagacctcaatgagtggcctgaacaagcaagatgtttatttttattatataaaaaagactcccagctgggcattgtggcttatgcctgtaatcccagcactttgggaggccaaggcgggcagattacttgaggtcaggagttcaagacccacctggccaacacggtgaaaccctgtctctactaaaaatacaaaaattagccaggcatggtggtgtgggcctgtagtcccagctactcaggaggctgaggcccgagaatcacttgaacctgggaggcagaggttgtagtgagtcgagattgcactaactccggctaggctgggcaatagagcaagactccgtctttaaaaaacaaacaaacaagcaaacaaaaaactcttagagtaagagcaagctagtgcygataaagctgctcaagaaagtcatcaagaacccaagattcctctgcctttctgctacctcgtctttaatgtgtagtgtttgttctttatgagctcaaagtggctgctgtagctccagttttctcatctcagtgccaagtcaaaaggaagtgcaagagacaaaagaagaagagcaattgtgggaagggtaaaaggctttaacttttgagaatttgtcttttaaaggaagaaagcctttctcaggaaygttcatctgtatcttctttgcctccaactggggcacatgaccaaccctagctaaatgggaagcaggattccagtatttcactttctagtctctatagaaggcaaaggttaaagagaagggtgtcaggagagatgttgagtgagctaggctacagaattttttccactcacacaacttgtaaatggtgaagccatgtgtttcaacccagtctttttgactccagaagtcatactcttaaccatggtgccatactgcctccttattgggcagaggctagagaatcttagacaagtttttaagcctctctatgccaatttataaatttgtaacataggaataataagagtatttaataaggttaccgggagggtaaaacatgagagccctcatgaaacaattaccacagtgtctttggcatatggtaagtgcacaccaattgcatgttagctgttcttacagttaaattgttattgttcttatcgttagcagacagtttctttgctagcatttgtggatacagagagtcaaaaaaaatacaatatagyatttactttttaggtgcttacttgttcagacttattcctaatttacaatgttaagttcagtgatggagcaaggggcagcagtggtatagaaaaaggaggatcaaggtactttggtatgaactggaagagataggcaagggtgtcagggtcagggaaggaaggatggtatttacagagaaatgatgctgtttaggtggctctamagagatgagacagttcaccaggaagaggagagggaagggtattcctgacagagggaacaatatatgctaagcaggggtcaagctgccgagggttcacactgtactgcctgctgggagctgcaagcatttccaacagtctggaccatagtgtggagctccagaccagctaaatagacatgagcaagatttcctgagtgcctcctttatgccaggcactgcgtggggcaccggggacacaatgaggagtgacatacaacccctgctctcaagaagcacatcacgtcgacactrttttctcgtttgccagatgggaaaatgcaagaatcctaaattttatttaccatctcctctatgctacattcagggcttgatgctttgtggacattgtctcattgcacttcaaggtcattattattctctccctcttgcaggtgaggaaaccgaggctcagtaagattaaaggagttatccaaggttacccagctagtaaatgatacagcaaggattcagaccaggtttctgtgactccacaacctgtgtgttctgctgcatggcttccaggagcctgggtacgacacacatcygcaccaccctagtggtaaaatgaaacaatatctgagagcacttcagagccaaatgcaatattaacactaygtccctggagttatttatttatttatttatgaagaacaaggaaagcccctcctttactaccacagtaaatctccagtagcttgtcaattccttctcagacaggctgattagctggagtgcagctgtccaggttgcttaagtgaaggaagatgacttgattgtagttcartgccttagctgtcactgaactgcattcctaaatatgayccttattgccctgctaacccctctataaacagcactgcagtgaaagcataaaacattaaaaacatcccctggttgactgctattgccttttgaattagcaccagaaatactcatttgagggatgtggtttaactcaagcaatatttcttgatgggttaatgaatatcatatgttatactttagcttaatacaacatcatcaattattcaattatttttattgaytgacctcttccagattatttgatagtagatttttcactattcagaargttaaatgctgagcagtcaggaatcttcctctgcrgttctgagtgtcttctgagctgtgacccaacttgcaaatatagaggtgtatatgtatctatgggtatgtttttgttttgtgggktttttttttttttttttttggaararacaaattgcaraccatcctggaacattctggaattaatgaacatgatgcatcaatagccttgctaaatcaagacataacaaagaattgagctgctgatgacactgaagaaaggtttcaaagacacagatgatcaagcccacataattagaattactgtttaratatgcaaaaaaamcggaaaggcaacactggaaagggagaatgggttgcaaaactagcgccaatataaagtacgagtaatggccaataaaagcatatctaccaatgactttgtaactaagagaaagtaatatgggattgtgtccatttagctcatgtcatgggacacagtacggagttctcaagggcttctcatgggctttggagggaggaaggaggatgaggctggaaagcaggctgcctgggatccgctcctcttgcggcactaattagttttgtgaccttgggattaattggcctgctaagccaaatcccttgaccagggttcagcactcattgtgctggactccagctgctttgggggccattgttgtaggctgtgtgaggattgtggaatgaatgtagcatgtgaattatagagttatagaaatgggaatgacaggtattttctaatgcaggaagatcaggctgggattttttcttaaagtgctgtcaacattaataatttttcctaaggccctcatttcatgtcaccatgttagcactgtctgtagattaatactactacgaataattttattaataatagacagaatttatctaatgactggtaatttgctaagtaatggtcagatatatgattttatccctcacatgccacatgggcagatgttatttcaggcaggtgcccaaactcaaaagttttttgccagtaattttaagtcagtgagaaacagaaattctgtcttggctatcagctgtgcaaagtggtgatatagagaaaggacagttagtcaaaagacctagaattgaatcatggcatggcacttcccattattagttttgtgaccttcttcaaatcacttaaactttatgcaggtcttactgtccatagttttagaatgtttgaagtaaatgtgaccaaggcaatgacatggacacacaatttaataaggtatataaaacgtgcttccctactgcaaaatacagtgcgtatgtgtggggtgtttccatcctcggaggatcaagtacctgttagctaggaaaccacagtctacctccagagtgggcatctctcatccatcctggcattcttttccatgagctcatgtgtggtctcagggttctttgagtatagcaccccacgtggtctttaccagttggtcaaatgtggcaagcgagatgaaaactcatgccatcccaacgctggcacagagkttggactcaagatctgccgctagccattctccttacaggtaggcttttctctttgcctctaattcctgggatctgacccagaaaactcacagacctacccacytctcagaagctaggtggatttgctttatgctactagctaggtggcagctgcgagaaatgtcaccctgcaggatgcaacagccatcatgggtagcaaacaacctggtaaggcaaagggagtgtatttttaaacctaatctactcagtagcatttgctctgtaatggttagattcctcccccagaaaatgactttctggggttcttagagatcctaatttaaaaactatcactgaaggttatttttaaacatcataaaggtatctgagacctgaatttcaggtcaatcatatctccatgtttgtaggggtattttttgttgttgttttttccacttgtaaatctctcaagcttttaggaaaagtaactctggcaaaggaattgatttggcckctcaaatctcaagaggccaccgttgagctacccagcccatatgacaggaatcctttccttcttgttttggttaagttycctggcaagcattgcttaatargatttgttttagcatttaaatttcccctctcctgccaagacacaggaggtgttttgacacatggtatcattttggtgatctcttaacctctttttttcctgacatctaccatggcagagctaaccattttggggtgattggttgccaggtttggcagcagttctgaagaggccccatctgccgtccggaggattggcagattgttttcttgcaggtcacatagagaggaattcacacactcgggaaaattatcaacaaactcttccatgaaaggcacctggtgctgcagaacggtggtgtgtgcagtaaatctggtagagactggtgcgcatctctctcttctctgacagcccatcttccagattatctcagcacttctcccagtgggatcctgggcctgtagtctcatgtggtgtttcacgtaaagagggctctgtgtgtaggccaggcattgtagctcacgcctgcaatcctagcactttagaaggctgaggtaagaggatcacgtgaggccaggagtacaagaccagcctggggaacatagtaagacccccatcactacaaaaaataaaaaaaattagccaagtgtgrggtcacacgcctgtagtcccagatactcagggggctgatgccagagaatcacttgagcctgggaggttgaggctgcgatgaaccaagattgtgccactgcactccaatccaggcaacagagtgcaaacctgtctcaaaaaataaataaataaataaataatagtgctctgtgtatgaaaacactgaacagcactgtgggtttgtgtacccctagattcctgtgttgaagccctaagcccccagtgtgatggtatttggaggcagggacattgggaggtgatgaggattcgatgaggtctgaggatggtactctcatgatgggattagtggccatataagaaaagaaagagagactggagctccctctttacaatgtgaggataccggaagaaagtgactgtccacagccatgaaaaagaccctcatcaggaactaaatctgctggtgccttgctcttggacttcttagcctccagctgttaagaaataaatttctgttgtttaagccacccagtctatggtattttgttatggcagcacaagctgaaaagacgcagcctactctgtcttcctcttggagagtcatagggctgtgtgtggtcacattaaaggctctgagaaatcctgcagtggagagggtgtttaataccctctttcagtcacctgtccgtagaatcaattttcaaagtacctccatagactagttttctgcaaatgttactttgggaaaagctggattaagtcatggtttgccctcttttgcttcctgctgtctttagaatttatgtctgggtcaggcagagcatgagcatttcatctgatccaaaggttgaatgtttctaagtgcatttccagggatgatttgagggatgcgaacaaggtggactgaggttgaatataaaaggaaattatggaaagatctggagcagtcaccttatggtgtagctttaagtatccccaaatatttcattgctagactgtgagctccttgagggcagggagtacccccttttcatcgtgtctatgcctagcaaaagtgtagaactcggagaaatccctagtaaatgcttgttggataaatgaaatcatttgcgggtgatttctttaatgctggaaagaagtcragcaattacttagtcgaattcatttgtgaaacaaggaaaccaagattcagagagaaagagtgtctgtgagctcatgaaatggacctgaggttacagatctgaaaatgaatgatgagatacaatcagttcttgatttcgtgaattgttctagagaaggaatgtgttctgtgtgggaatgggaaggtgagggaagccaaaaacattttaaacttcatggagtttgctctttggcctggtttacctttaataattcacttaaacaactgttatcacctacttacaatgactggcttcactccagagctggaggaggagaagtgataaaaaagacacagtctgcatccttcaggagctcacagtctagtaaatagtgaaatatgtaaaaacatcagttataatatgtaaacaagtagatgtataaacatccagttataataatagcacctgctctgtaccaagcaccrcattaggtactttatacacagtggttcatttagtcctcacaccaaagcacacttttatccctttggtaaggtggagaaaccaaagttcagaaaagttaagcaatgtgctccaagtgttggggctgagttttgacccccaccctgtttcgtcctctgccccattgtgtaaagcatgcttaccaacaccgatgaccacttttgaggctaactcgggctaagagcccagaacagggggcaggtgatttgttctgggagctcagaaatgtgtacagagatgtgccaagggaatgggagctgctctttctccctctggtctgtctgccttctgctccaggctggcctgaaaggaacttggaagtgaagtgcagggaagtcacagtctctacccagtggcttcattgcaaagtaaaagcaaaaatcaaagaagactgaaatgggcaggctccagcatmtacaggatacatgtggcttatttggaggtcaaaacaaacattacttgagcatctgctctgtgcagggcatcaaaggtacaaacaggataaagcatccaccctggctcttgagcagttctcagggaaacagttgaaaccttaacggagctacacacagagtggctggaacatgaaggaggggagtcaactctttgtsctttgcaggcattgagggtagtggtggaggatggctgggatggagcagtgtcttaaagaagaaatggagagtgctaggcagcagagacaagggccaaacttgggaggggcttgagcaagggctgagaggctgagaaagaaagcggatgtggggtgggggctgctagtgatgaggcaggagggagggaggaaaggttggtgtagtccaaccttcagagccaccacattgagggttttggatagttatgtattcagtttctcatcattctcctctctaatgcgcatcattctcctctctaatgcgcactgctaattgaatgttttttatggactccaagacccacattaacactgtctacttttaattccatacaatggggaaaaatctcttggttttattgactgcttctttatctgacttcacctaattggaaaataaacagataaaatgatacctttactactgatgaataattcatgtcctctttgtcttttgtcataggagaaagcctagcaggtctttcttaagttaggatatctggtagatgagagaaaaatgtgaacgattaactgcaaattgagtttagtgtgaattcctgagcatcccgactcctcctctgtaataaagtttagattggttcacttaacggttcacctggctctggtggagcccaaatttagaacatatgaatgctattgacctgttaatttgaaacgttttaatctgcataaaaatggattgtattaattgtctcacattaaccaggtctgactataatgtctgattgaattaggctgagttttctgtatcttagctctttgcagtttcatttgccccaaacatgtgtaacttttttctcctccatgcctgtcatctgagcaagttgggctgtgttgctctcagattagagagaaatcccactcaccttcagcaaatactaatacctatcatcctcacattgcctatactgcttgacaccactctcggaaacattcctcttttctaattacccttggtaacatttcgccaccccgatctcactggtttatgtcattttcaaaatcctggtaaataactttaactccttacyggagtctgtgcttcaaaataaatactggaatttaaaattctatttttaaaaagatgtaatttttaattattttataaacatacactatctgcagtaggctggacaccctgctagataccaagggcatacaacatagctgagtttgatcctgcccttagcgagatcacagtctggttctggtgatacggtttaaatatgaaaagttaaataatggtgcaaatcaacatttaaagtgaaaattccaggccaaaagtgattaatgtttgagtgatggaatctatggggaataagaaatctttaaggcccctgaatgggccctatgtgttgattttgttttttttcttcacaattctggattctgaggctattcttcattccttcctgagtcaggaataatcttcccctctataactcaataaagtcaccacctgttttgggaagccttccttggccttccttgtctgattaaggtgccctcttctgggctgtttatgcatcttagcctgtcataagccatcattgtatttatcttgccatttacttgtttctttcaatcagctggagtgaagggctcaaccggcaacayacaggaaggaaagactagagagaggatttagggagaattaggtggtatatccatgccctttctactcaacctgtggtccatggaccagcaggcttagcatcacctggcaaggagttagaaatgcaaaaaaaaaaatctcagaactctcctgagacctacagaatcagaagctaaactttagcagatcactagtcattcataaacgtattaacattccagaacccttgagctgatctagcattaaagaaacctgagggtctttagaaaggactgctgcttgggccccacccacagaggttctgatttacttggttgggatgtagccaattaaaagctttccaggtggtgcaacagtgcattcacagtggtgagccccctccaggytagcattttctaagtgctgtcccctgtcatcaygcttattgtgtggtactgtcatcttcatataggtactttcttaaacatttctatatttgtgtatgctgagatttaatagagtatctcctactgcataattgtttcataaaagtgaatggaaaattaacctgggtggaggcctctaatgatgattttggcaatgacattggagaaaacttattgaaaaatgccatcaacagcttgtgtgaagaattgagccatataaatggcagaaaaagtggttcagaaggtttttggttggccaaagtcaaagtctacggggtaagtcaggtgcttggtgcccagatttcatgggaatggagtgtgttggcatggggaagactcagcttgatctcttttaataggaagagagaggcttacagggttgattcactttgagccctagataatgcactagtgatacttattgggcagctaagaaaatcacaatatgactttktaatgcgttaatggaagtgcaaagtttatttgtactgggcactggaatctgcatctcctctgggtaccacacttgaggatttagtgagcattgtggataatgtagatatcacgtcatgggagggaggtatattcaaatgaatgcctggagaaaagaggatgtggcaagtacatgactgctttttttcataagggctgactgttttgtgaaaagagagcagaattgtgctgtgctgctccacaggacatagctagggccagtgggattcatggaggcagattttggctcaacatcggaaagactttgtgccagtgagagccatccaataatagaactggctgcctggggagatggtgagagcgagcgagctctctatctttggaaatgttctagcagagactggatagccatctgtcgtaggtattgtggaaagagtcatgcatttggtggatgagcaaaattttgttggtgatgatgacagtagtaaatgtgactaccatatactgagtgcctttgaagtgccaggtatgctgctaggcatgtcaatattcattatcatctttcatccttttacagccataatggaagtgagagctattactcccattttatagaagaaatggattcagggctaggatttgaaccctgggttttatgactcaaaacccataatcttttaactgtatcacctgctttttatgattccttccatctctaagattctgtgatttcaagtgtattcagatactggatttgaagtgacctttacacgcccatgtataaaaagtctgatrgctggatgcgaaggcttgggagtcgaaagagtagtcagggtggcagatgtagacttgaacatcctctgccaagaggtgagagttgatgccactgggttggtaagattctcaaggtagtgactgcagagagaaggggccatggtgggctgactccttcccgtgtggtgctggaaaaagccatgggaatagatgtgagtcctgctttctgagaaggaaggagtgatcttagtgcatattggaagatgggtttctaacctcagtaacatgtgaatacttctatacattttttggattctatttaatagattgagactttgcaaagtcaagtgctgaaattggagtcagtataatacggtggycaaagggagagcctctgcctgagttgatacctggacattgctactccttagctgtgtgycctttaacacattacctttgtataccttcgtttcatcatctgtaaaattaatgcatttggttgcactttttaagctgtattaatctcctttctgactgtaatacatagtttactttacataattgaggcagcaaaaagtagaagttaaaagaaggactgtgtagtcagactgcttggatttaaatttcggcttcatcatttactagccctgtaacctggggcaatttatttagtctcagtaagccttggtttctttggtgtaaagtggagatagtagtaataactaccacatagggttttgtgattaaatgagattatatgtatagggtacttagaataatccttagagatcttcaacataggaagcattcaacaaatgataatggtgwtatatataatattttataacaaagaaacttgtgccttggggtccttattgtaggaattggtgttgattttataatcccataatgtgtgaacatgatctatagacatgtttctctctgagcaagagatccatgcattgtagtatgtgcatggataggtttatatagaatctttgattctcctgaaatagtaggcaagacttgggggaatgcatgtctatatggagaagatctattttttcattaatgctctatgaccttacaaaattcaagaagttagtgtgcataataatcttgtagatgtacatgaggctattagtgaacataaacaaaaaatctggttgccagtgtctgttagtcagttttcacactgctgtaaagaatacctgcaactgggtaatttatgaaggaaagaagttaattgactcacagttctgcatggctggggaggtctcaggaaacttcttagaatcatggcataaggcaaaggggaagcaggcaccttctgggaccttgctggcaccccccataatacagtcctctcccactaggtccttcccttgacacaattcgagatragatttgggtgggaatacagagccaaaccctatcacagtacttaaggaataaagccatttgttatcggatataacagaaacccagagggagtggtcccaagatcagtgcaatagttcaaagttgttatcaggggctcaagttctttctttcagccctgtgccatccttagattaattgcttcctggtcccaggatagctgctatagatccaagtatcacaccttcatagaacttcatggaaaacagaaagaagccagggcagccaggatgataagaagaggtttccttacttatctcctttctttgatcgaggttatttttttttttcccagaaggaactcccacaaagcaagacaacccacctaccctctgtttattcgtattttgccagaactgtatcatagtgccacttctagccagaagggagtccaagaaagcaagtatctggctttttcaaaatctctgaggaaagtgggcaagaaaaggcagtgtaagggaaaaagcttcctatatgtcaatgcactaatgaaaatgtgagagctcattgccttaagagaggtcacacaaaatacctgaattgggggagggggtgttttgtgttaagaaacagacatccagagaaggaccaagggaattagggagggcttcaaggaccttcaagatgccttaccctaaacaggygtctttccttggtgactcatgcagaggaagtggctggattccaaatatgtgtatagaaaaactgccacrgaagrggcagcgatttgttcatgtttgcagctgctgactctgacccaaatctgccctcycccaatcctcagctgctggtaccmatgcatccttttgggagctggaccatgagctctgccaggaagaaggtgcccatctcaatggttccccgcttcaatccccaagcaagctgtttccagagaaggggagtagcacacacaatagtaaccggtttagtaattagcagcagccctggggccatgcaacacttctaaaaagacaaggtggttcaataagatctgccacgacccctgagaatgttctagatggaaagacaggtggggatctccaatgctgatgacatggaggcctttcaccctcagtggttagagggcacagrttaggaaatggggaacaaaagcaaaacaggtggacatggaggctgtgtttctgttgttgatggaagaccatatttttatacatgatcttggcaaagtgtgctactgtaaagagcaggcatagaactgtgatggtgcagtcctttcaaaacaaacatgcaaaatgtgaaaccacaacgtaacaagcccatgtctttacccatctcttttatcctcaatccagagrctgaggaatccgatgaaawttttttttttttttttttttgcaaattaccgggtaaacaaaaagttgaaagtttaatactgcatttattatattgagtcaacgtgccctatgcatattttctctaatagagggtggaagaatccaatgagatcagtgaagatattttttatctcccttgggaggcaaaggggaagcaggcaccttctttacaaggcagcagggaactagcgagtgcacacagaggaggtagcttttgatctgattctcgaaggctgagtaggaacttgcctggcttatgraggtatatcaagattgtggaggtgttaggtattctatctaccagagtattttaagctgtgggacagcatctaaagggcataaagttgtaaaattcaatgaatatgtgacattttgtttacttagtacttttctccttttctttagaaaraaacaaccaattttctttttctggaggattttctttaccaaacctgaattgtgtggttggtttggagctaccattcagttccacaatcaactgatctgggagtatgcaaatcactctctctggaccaatcaaagtcttccctgggatttttttttttttttttttttgagttgcagctgggaaatttcagtcagcatcttgctggagacaaagtgagagwtgctgtgtgcgatttgtagatggctctgaccttgccatttggaaatactccggactacaggagacagaaaccctattcaaatgaacttagatacaaatggcattgactgtaaaatttacaaacrcatagtccatgtctgtctctccttgctagttgatcttcacaaaagcagactaggcactttcaaatggtggcactcagtatcaacaatgacttccattgtcattctgatgagaaaataaaatctcattgaggttgagggagggtgggaggcaggcaaaaaataaataaataagaaaacttcatattagactagtgtttctcaartgttgatgtacctgtaaatcacctggagatcttcctaacatgcagattttgactcaatagatctggaatggtaccggagacttcatttctaataagctcccatgtgaggtggatgctgctgtttcaaaggctactctttgagtaacgtagtgttcaaagataatgcttgaggattcagcaaatatgaaaagatggtacagcataaggtggtataggagtggggtagaagtgagctgtgattttcaataggataattaggacaggcccatagaggtaatctttgagcatacttgaaagtggtcattctatttacgtgactaaaaaaaattgtgttttaagaacacgtattagtttactgctgcataacaaattactctaacatgtagcagtttaaaaaagcaaacatttataatcccacagctttgatgggtcagttgagttgggtccccttgctcagaacctctcacaagactgcaatcaaggtattggccagagctgctcccgtcattgcgaggctcacccgggatggatctgtttccaggctcactcaaggggccgttggtggacctcagttcctcacatgctgttggactgggggtctcakttcttcttaggctgtttgccggaggcttcccttggttccctgtcatgtggcctcctgatagggyggctcacaaatatggcagctggcttccatcagagcaagctaatgagagggcaagagatggagagcaagatgaaagtcggggtctttctataacctaatttatcaagtgacatcccattactttttgccatattccatttattacaaataarcatacttgcttacaagtaagtcactaagtccagcccacactcagtgaggagactaccaaaggcatgaatattattagacagggatcacttggggccattttaagatggctgccacagcacatatttgcctgttacctcagaatctgaatgtctatgcccttatgtaggttgccgtcactgttggtttgattaggaaggaggatcatgggaattttttggctcccagcagaaactaggattggcctaaatggttctcactgaacaactttactttggccaatcttcaacttttgaggtagatccaagctgctttttatttttttcttttttttctttttgagacatccgagcagaggctggtaggccacctgagagcttgtgggcagctgagctctgactgaccccctggccattttagcgctgccaataaaattgcctgaggaacctgccaaggagacagatgctgctgctggagaaacaccttctgtagcctggcatttgtccggtaattgctgtccaagagaaaataaaatcttcatttgagggggaaggtggatggctcctgactgtcaagtgtagagatgatttagaacaagtgctgcaaataaaatgcacaagattttattacaaaataaaatacatttgtatagatctaagatttgactctttaaaaatccactgacttaggaagtgcttcttgttttctaggcatagaataatacacagtaaattggattatgtacaaaatgcctcacctgttttctctctcctgttctgtttgaagtcatatttcttttgcgatagtcagagccactatttcctctgccttatagattcataatgtagacwcagcactggtttaggactggacaataggcttcgtcacttactaagagggaatttaagcttttgtctacagttttccgatctttaaattggggtggtaatacacctatcctaaactcgttttaaaagtgaataaagttaccccagaaaaagttccttgccatattgtagacacttaataaatagggtctctatagctgctatacctgtacttacaataacagtrgtgggaggagtttatagtcttccaacataggaaaaccaaggcccagaaggtttaaggtgtttcttaaagatcatataataggtggccgggcgcggtggctcatgcctgtaatcccagcactttgggaagccaaggcgggcggatcacgaggtcaggagatcgagaccatcctggctaacatggtgagaccccgtctctactaaaagtacaaaaaattagctgggcgtggtggcaggcrcttgtagtcccagctactcgggaggctgaggcaggagaatggcatgaacctgggaggaaaaggtgtcagtgagccgagatcgcaccactgcactccagcctgggtgacagagcgagactccgtcgcagaaaaaaagatcatataataggtaagctttccaccatctatccatgcatctatttacccacccacgtacccacctaactatccacccatctgttcatccagcaaatattttttgaggtgtgccctttgaggatgctatattcattgcagtggctatagtgacaaagaactcaggtaaactggtgctctcaagaggttaagatagacmatgagcaaacacattattaatagaatttacatggaataagtaatatataataaatagtttgaaatgatacagtaactggtatgaggacacaaggaggcaattttagtttgggtggcctcagaaaaccactttaaataggtgacatttgagtggaaacctataagacaagaaggagccaagagaggaaacacaactgcaaagaccctgaagcagaaaggacagaagaagtggggtggtgggcatttctcagatcagatagggtatctatagttatgccaggagaaaatttggttaaacaaattatagaatttctggtcttatttaaagtaagtgcccttgacaaagggcttttcaaagttgttaatatttattatgatatctcaatggatcagggactattatattattgttttgagaactatttaaccatggatccatcctctcttttcttccttgcctccttcccttcttcccgtctgtgtacctgttcatctgtcctttttttccatctgttcatccctttctttktgtgtgtgtgtgtgttttgtgttttttttttctgagacaatgtcttgatatgttgcccaggctggcctgggactcctgagctcaagcgwtccttctgcctcaacttcccaagtagttgggaccacaggtgtgccccaccaggcctagcttatccyttgcttatttttaaagagcatccttacgagatagagcgttctgtgggaaacctgggtaaattgcttagtgaacattcattagatcctctgagcctcacaacatccctaatgtaagcagggattggcattcaatactgcagaaaagagaactagggcttggagtgtgaaggacctgccaatcctctgatgaaagttgaaccaggtcagcaaatcacatgtgagactccaagtcaggtgctcttcccaaaactctggccacagctccagcttcagctgacagagcctgggacattgatttttctaagtgctctgatattttgatgtttttcaaaaattaataacaaggacaattttgacaaagtttccccttggtgggaaaatgtttccttttaagtctgttgtcagtattaagtatgtgtatctattgagaacaaccatgttctcatagctattgggatattttgaggagctgagtgagtaaattgcgtagggaacaaactcatgtctctcctgccaaaagatgcagaatcctgttttctttgaagaatggctgtcttggtcattttggactgctataacagaatgccatagaatgggtggtttgtaaataacagaaatttacttcttacagtcctggaggctggaaggtccaagatcaaggctccagcagattcagtgtctgtgagaatccacttcctggttcatagatggcaccttctcactgtaacytcacacggtggaaggggtgagggacttctctgaggtctttcctgtaagaacatgaatccyatcaccttccaaaggctgcacctccaaattccatcatcctagggattaggtttcaatgtatgaatttctgtgtgtttgcaggaagagggggcataaacattgtctatggaaatggctaaattacattttctgaataataaacgtaatataatgttaacaaccactgactgaacatctgctggaacaggcgtggtgggaggtcagctttgtattaaactactcaccctaacaacatcttgagtggcaggtgccatcaattccacttttttattatggaaactatggccagacyggggccaacttaccccttcctcatagcaggcacagtgcctcaggcccctactgtatttttgaggtcccacaaatagattttcacttcttttaaactcagaagaaggaaatggacttttagggtcaaagattatgcttgtcataataccaacactgtaattgaatataatttttttaacacattttgtaaagaaaggagcctatgaaagaagcagtgctcaggtcccctgactgtcatattgtggggaccaggctagggctcggggaagttgcagctcattcaaagccgtgcaggagagatgggcaaagcaggacccacacagactcaaacctgtgctattttcctgccataccttgaggcctcattctcaattggctttaccccacactctctagctttcagcctcagcatcatttccacagaaacagtgagtgcctaaaaactggggcactgcatccttaattttagcaccccatctgctcctggataacgacagacagaaatgcacaaaaccttcttttccgagagcctcatcccaggattcctgagcaagtgttcaggcccacccagggcttcatgagagcaagcgctgccgtgaccttgttaaagtggacagttcagtccagcaaaagcgtccctctctgttccattaggccaagtgtggaaccgtccccctggaactctgagataatgagcaagtggagaaacaggtggaaagcaatagtgctggagtttgcacactccactgctgctcaccggccactgctgcaaatgagaacctttgggaagtttggccctcatttccctgcacaccgagaggtcagtgtgaataggggccattttacattcaaggcacaagacactttactccagtaaatggagttttaataaagcctttgtatgattccgggtatcacaacaactaaatcagatcctggatgcattagcctgggccctggtgatgttccctatggcatttcacttatgatgtgacacttactacctttgcctgagtttatcattaggaagagatttctaaattattgtagacggcatctgcttagataaaattatgtgtcccctctttggacttcactttccccagtggtaaaatgaaagacttaggttatttctaaactctcgtctagttctggattttattttttgagtgactactaagggagagaccctttgcctgagtttatcattaggaagaggtttctaaattattgtagacgrcatctgcttagataaaattatgtgtcccctctttggacttcactttccccagtggtaaaatgaaagacttaggttatttctaaactctcatctagttctggattttattttttgagtgactactaagggagagaccccaagwtaagggctggggtcrtgttgtggggatcacatgagattatggatggcataaaaatgtgtaaatcttattcacctttcttttgacagagagtaacaacagtcagttatgaaggaacaactgtggactcaaggactttagatacctccgcctcccttgccacagtactaatgttgcaggataaatattagtaacatttcagagatgagaaatttaggttcagggaggttaagaaaccataacgtttagcgccagggattaagtagaagactgacttcaccttgtggtcttcattatttttaccatcaccatcatcatgtttattgccattgwattatggtcacaagaaagatgcattcacatggatggtaacacaaacacagtcaatatcaagttatattggtttgagttaaggtgtccactgatgacctttgcctggatatagattgtgtaggaaatamagggtgtgggacattccaagtgttagagcatccagaaaagttaacttttccagatgagttaaaccgaatcttcatttattgggagcaaggtccagggccataaacacatgctccctaacataactgaatgtccttcctccccttcagacaggttccagccaagaagtggtgtgtgtgtgtgtgtgtggtggttggcaggaggtggggaagaacaactcctatcattctaagtcagctacacagagtttgatgtctgatttttttttcttttcattttcacattctaagcttggggaatttgatgacttaaatggctgcctcagtttcccagtgtgctcaggcttcaggaatccaaacttatcaagtctgtggagacacctagagaaacaggacaaatttaatcttgccaccttcagattgagctttgtccccacgtgggactrcttagcaatcatgatgacagagtgtactttgttccatcatcctgcctagcccactatgtcattagaacagcaacagccattataaggccgtgttgcccttctcacgctgggtgacacttaacagctgtcgttttcttggggccatcaaatgaacaaattggagcagtgggctttggggtcacaaagacattttcaaatctgagttctgccgcttgtctgtcaatctggctgtctatctgtctgtctatcatctatctatttttttttttagagatgggctcttgctctgtcacctaggctagagtacagtggcactatcatcactcagcgcagcctcaaattcctaggctcacacactccccacctcagtctcccaagtagccgggattacaggagtaagcgaccatgcccatctctctatctgtattttcttgagtaagaactttaactctctgcatctaagtttcttatctgtgacatggaaatgaaactattaaacccttgtggttgttctgcagagaaatgacagyagcattttgaagctatctcactacagtgatgggagcagggttagtgggatagaygaaatgagattattatttttcttttttttcttttacaaatgaggaaagggagcctcacaaaagttttcctttccagagttgcttggggagtgattggagaagccagcccggaaaaccctagccttctgggcacaattgcttacttcctgctagactacgagccacttagcagcgaggactctgccatactttccatctctagggcccrgctctggtatccactttgttgatctcatcctttacttctttttccctctcctctgtgtcccatactagtatctccactgttctttgatgaaagtgcttggcttatttctgcctcagagtttttggggcttgctgttccctctgcctcaaatgttcttcccccagatctctgcatggcacacaccttcaccctcttaaaagttttgctccaatgtcatctccgtatggcctttgctaactactcattaaaaagacttactcccctccagcacttcttatagccctcccatccttacttttcttcataacacttaccaatacctgacacattgtrtacttgatagacttgattgatttattgtccaccaaccttcactagaacataagctgtgtcctcagaactgaacaatgtatggtaaacagctggcagtctgtaaattatactatgcattgattgaaagagtaaataaacgtgtttggagtggcgggggtctgtgcatgaatgcctcttgccctgatgatgtttgtggcagaacactaaactgcatccccccatgtgattgattgctccttgcccaactccttctcttgtgatcactgaaagtcactaattgtgatctcagctgtgtactttgtccttccttctttgtggggtggctttgagctcccacaagggccaggagggctgtctgttctggagctttgctctgcagcatgatcaacatgggtaatgtagtatttaacttaatttttttttcatctctgagtagagctctttactagaaattaatttgcccaggttgttggggtttgtttgctttcagctgctgagttacttcttctgtgtctgagttctttcttgcctgtgcctgtgcctggagttctaggaaaatgtttcctagaatgctagaaaacattgagttttggtaagttatgttacctgagttttggtaaattatgttatgtacaaagggctccctctaaagtgtgggcagaagtcttatcatgctttaattcttttaaaagacacttttatgctttttgaaatgtttaaaaacaaacttattttggagcagaaatcctaaaagtgaatgaagccagaaattgcctaataatacaaatcatatggaagtattctctgcgacagatgttatgaacgatgggctcagtggaccacagtggtctcagaagtggactaaagatcaggtgacctagctaactgatgtgtgtaactcactcattgtgtaacttcaggcaaagcattcgatctttctaagatcattcttcatctgcaaagtaaagactctaggccaggggtatccaatcttttggcttccctgagccacgttggaaaaagaagaatatccttggaccacacataaaatacactaatgatagctgatgagctaaaaaatgtcacaaaaaaatttcataatattttaagaacgtttacgaatttgtgttgggccgcattcaaagccaccctgggctacatgtggctgtcagggtgctggttggacaagcttgctctaggctatgggtctagctgatatccgagtttttttttcatctttaaagccctagactagaagcctaaagactttgatcttagcttggttacagccatttaccagtactggacctcagggtaagtcagtttccttcccagagcctcagttgctcagtctttaaaatgagcactgagattactattttgtgtttttctgagggtattgagagaacttcatttggatacacagatggaaaagtactttttagccattcagtcttcttattattagaagccatttcttattttactgtgattttgtggcaatatgccaccagaatgattggataaaagttagaagatgaaaagtcagtgcacatagtactgacaatttttaaattgtgcttttaaaacatattgggtttttgtttcctttttgaatttttttttaaatccccactttacatgttaagttcttgacttgagctttgggaaagtgttcacagctttcataaaatttttcaaaggagtatttgatataccagtttttttcagccttgtgattttctgtgggtgtttccccctggaattcctgagaggaggagatcttttcatgcttcttctgatcatatatccattcctccttgcatggacgttaactggtaatatctagagaatcacagatgtcaagagaatgactgtttgcaggactagcttgctgctctctggaagctgaaagctaatgggcacctaatcaaggctggctcattttttagggataactcaattacaaatctggatgaactgacctactagtttggctcttggaagccatttagtattctgttatctttattttggtctttttatctctaaagaatacttttaatttagactgtaaattttaatgagctaaggttaaagttccctccagagagggaaaaagcactattattcaggttagtgaccccacagctctcatcaggtggctgggcaaaggtgcagagattcaacagattggacaggaggtgtagtctagattcagcagatggagaaggagacctggtctgggaggtgtgatctagattccatagctagggaaagaaggtggtctaggaggtgtggtctagattgaattgacagggaagagagtatggtctatattcaacatacaggaaagggggtgtggcctaaattcaacaaacaggaaaggaggtgtggcctagattcaacagatacgaaagggggtgtagtctagattcaacagacagggaaggggatgtggtctggattcaacagacaggcaaagaaggtgtggcctagrttcagcagacaggaaacggggtgtggtccagattcaacagacaggaaagggagtgtggcctagattcaacagaaagggaaagagggtgtggcctagactcagcggatggagaaggaggtgtggtctgggaggtgcggtctagattcaacagatggtgaaggaggtgtggtctcaccagctggggaggagtggggaagattgtgggcaactcacctactagcaagaggtcctgctctttcactatcattcagggtggcagtacctgtactagggctgataatctaattaaggtagcataatatagagccagaagtcaggtggtatttacaaggtacagaagagatcttggactcaaaaggcatggagtccagtcctatttagctggaaaatctgtggcttatatcatctccaaccatggtaaaatgaggacagcaccatgaagatgaaatgaaagcacaaaagagaaggtatttggcaaaccatgacagtcgttgttagaaaggaaatgtcaaatgagtgcacaaagagggacccgaggggaccctcctaaaaaactgcaagatcctttcctttcactgttgctatgttctgacaaggtttgttgtcttcctgttaaatgggaggtgagtgtggagtggagaaagcgagttgtttgggcctcaggcctcaacctccacttgaagcctacacaagctcacctttgctaccctgcagagaaggcaaaaggagttaatgatgaaatgtcagaaaggcccttgggagcttttagaaattctcaccaggtaagattgcactcacataatatcaaatatacagagctgccatggtcgtatcattaattattttattgtttttattattagtaatacttcatccaaagagtccatttttaaaaatgttgttagatatgcttaagtaaatgacyataatatttyttttaaagcttcgcataagagcaggctacccagaagccttgtacttggcaagcaraaatgaatytaaactgttttccgaatttaccaagtgcttgcctgaacagacaaggagcctggggggatttyttgtgggagtgatgagctgtgaatcccaatataagatgtgtgtaaaaaaaaaaaaaaaaaaaaaaagcctgttctaagagagaaaagaagtttctgagtgtttggcaaaacagggtatttttaaactgagaaaaaaatagtattgtggggatttcaaagattttgtggttttatttatcagctaatatatatgtggagctttcttgcatcttattagaacaaaggcaaaggaagatgcaagagaaatagaagaccatctatgccttcaggtagccctcaggctcattgaagggcaagatataggtagataaggagtgacaatttatgaaggcagtatggttttatggaaacaktgtgatatttggaatcagatacacttgggttctagatctggattyaccataggagtgggacccgggacttgatactttatcacttctgtgcctgtgtttccaccactacaaaatgggaataatcatacttaccttcccagattgtaaagaagtaacagcatggggaatgtatacactgcttagcacagaacgtgaagcctagtaggttctcatgaaagtcattgttttcttttcttttttctttttttttttttttttgagacggagtcttgctctgtcgcccaggctggagtgcagtggctcgatctcggctcactgcaagctctgcctcccaggttcatgccattctcctgcctcagcctcctgagtagctgggactacaggcacccgtaaccgcgcccggctaattttttgtatttttagtagaggcagggtttcaccatgttagccaggatggtctcgatctcctgacctcgtgatctgcccgcctccgcctcccaaagtgctgggattacaggtgtgagccactgcgcctggcccattgttttcttttcttcatttctcccttctgttttatgctctgttacaggagacatagaagcatgcagttccttgggaattttgaagaatataggctgtgataggaaattcttcctggagcgggagggcttcacctgggcctttggttgtcttctgctcacccctccaggggctctctctgccctattctcctgctctgggaagctgacctgtgtggactgcatccatccctctttcatgtgtgggcctcctgaccctttggccacttacggggattagccagtgctgggtcctagcaggaggctgaggagaaaaaaggagagaaaagtctctgtatttttgatttcccttttcagcttctttctccctgctagctggccttgggtttgctgcttcctagactgaaagtcactgctcctttaaggaattttctctacagggttccctcctggtctggtagcctttccctcctctcattccttcaggcctagaagaggtaacagttctgctcttctctccctgggacactgcactgtcctttggggtttctcttcaatgcagcccactcacgtgtaaatattattaagtcttcagaaataatcttaatgtgaatgtgtcatcagtttcccgctggcacctccaaagctgagctgagtttgaataggtgaggaagtgtgttattggataaccaaggtgtgctctggggtctgtgaccaacccagtctgcttatagcttgtttttcacataaggatgctgacctgagttgtgagtttggggagatttgccgaactagagcctgaagatcaggctaagtgaacatatcagatttctcatcataggagaaataattttttggtattaataattgtttcctaactcattttgagaagtatggattacgtaatcaatagttatatggtatagcaaataaatatcagaaacacctttctttccattccaaagaagtatatgcaaatgaaatagagggaagggaaggcaaacaatatgtaatgaacaccttctctagtaccaggcaatttgcatatattaccttatttattctactcagcaacgcttatgggtaaggtaccattttccctgctttacagaggtagaaagggaggctcaaagacttcaagagatttgcctaaggtcacatatctgggacttggtggagccacagtttgaattcccagggcaartccgtgagacggtgatgctcatggcttttctttgtcagacaccagataacagtggtatagtttggatctgtgtccctgcccaaatctcatgttgaactgtaatctccactactggaggtggggcctggtgggaggtgactggaagcgggggagggtgtgggggggaggtggatttctcatgaattgtttagagccatccctcgatgctgtcttcacaatagtgagtgagttctcaggatatttgattgtttaaaagtatgaggcacctcccccaccttctctcctgctcctgttttcaccacgtgaagtgcctgctcctgctttaccttcccttctgctatgagtaaaagctccctgaagcctccccagaaccatgagccagataaacctcttttcttataaattaccgagcctcaggtatttctctatagcaatacgagaatggactaatacaaacagtgatatatttaagggttccgatgacaggtatagttacgtgcatcagagtaggagcttcaggctgtttgttgcagtcccccacaataaggaggactatgacattgtaaagccatgcgtagcagtaaggcaggggggagtttttctggagttaggaatagccgtagagcctggcctcgtgaacactgggtatgactttctaacaggaagaatcctgggtatctcttgggattaggtatcatgttgttcccactgcacaggattttgtttgctccctgccattgggtgccttcagtttctacttctactgaaaatgatctctctctttccccttcctaattatctgtttttttttgtttgtttgtttttctacctagtggcttctgctagtgctcacttctgctaactcacaacttctgctgggtcttggccttgctgcctcctggcttctccctgttcatcttttcacttctagtctctctaccagtggatagagtctgaactgacaaattcaaattcttgaaagagagactgtgcatatcctcttatatatccaacttggatgtagttctttctgccaggctgagctgtgactgctggtcaggcagcagattgtccttggggagagatctgtcccaggcccagccagctgggactggactggggcgaaaggcagagcaagcagcagggcagtaacacatacaactcctttgccatgtgacggacaacatgttcacaggctccagaagctagggaggaggcatctgtgggggtcaccattctgtctaccactgtcagccctcccacccaaagatcaactttcatccttcatgcagtatataacccccatcccaggatctctctggtctcttctgttcaaaacctcaaatgtcatctaaatctcaggagttcaaaagccccagttttcattatctcagtcgtctacatcaggttccagtgattagggcttgagcatctttggggaagggcatttctctgctttccaccagcacttaccactgtgagataaacattttatgtggattacatcatttaatactgtagttagatgtggcatgtattcagtcatcgcattttgcagtgaacaaattcaggcttgggggagttaaatagcgtgcccaaccctacccaagtagtgggaggggtcatgccaagttctcttaacctttattcctgtgtttgccaaacttggctgcattttagaatcacctgggaagcttttaaatctccttgtgccaagctgggtgcagcatcatgcacctgtagttccagctacttgggaggttgaggtgggaggatccctcgaacccaggagttggaggctgcagtaaggtatgattgtaccactgcactgtatcctgggcaacagagtgagactctgtctctaaaacataaaataaaaaaaaaaatcccagtgcccatgttgcacctcaaaccaattaaataagaatccagggatgggcatcagctcctcaggtgattccagctgtagctcccattcgggagctgcccaccgtgctcttacttgtaagtagaggtgtggtgtgtaaggagtgagtgcaggaaggtggtcagggaaggcttcctgtgcaggggagtttgagtttgtagtggtttgctgggtgaaacagtgaggaggcttttccatgttgctgctttgctcattactttccaagtgtgattkaatttttacgtttttgtgagatggttccaataaatacattcacaaatccggaaacaacaacaaaaagacatcctttgtcagggcatccattctcatttatggcttcaggaaaacacggttattgctgttgcgtgtgcttttttgtcagggagataattgtggaaattgggttgcttcccgtcaagcacagatccttttgtggagaaaatttgagccatccatgtatccattttacagtaattgagattggactagcaaatcattagcaagctaaaggaagatgatagccctttttgtcaaaaggaaggtggtaaaaatatgatgtttgaggagagcgagaagaaaaataggttatcagtgatgagaggaagcctgccacctgtctttctcttccctccagaaggagaaggtggcatctattagaagggacctcgagtgggtccagcgggcaaggctcttacaggggaaatctattgatggtcactgggacccagacagtcactgagaggcagacggttcaggatgagtccctgcccagggcactcgtgaagtggagcagcttggggtcatctgttgcaccacctaggcttggtacttacaggtgtcggttctgttctctttctgattgtcaactttgaagataatgaaatgcagcttgtggaagggagaataaataatggcggtatatattttaggtaaatcagcaggtgaagctgccaaatgcggcgtttgtttatttaaaatccctttcacagggaggcccatgttaaatacttgtcttttctctctgctagaccctagggaatagcaatagttcgtgttactcaaacactctgtggaggaaacggggatgagtacagggcgttcagtctccaaaagcaaataaacacagtaagcctkcctcccctcacctggctggtatggagtagggttaaaatgaggaayggtatcatggctaaaaaggccaatgaggaaggtgcccctttagaatccgtgtgttggggagcagatgtgatgagcacctgaggtcagactctgccctgggaggctatagctgtggccaggccttgtttaatctccctctgtacctccagcatttacagggtctgcttacaccgagtcagtgtttaggaaatgtgtgctgacctgatttgattgacagaacctgtgatttaatgactgtgttctgaaagagttgggtatgtttgctttttacctttttttttttgaagattcatttatctaggacctctttggaaaagaaaatggaagcacatgtgcttttaaatttgctcccctcatgcagcagtcttttgcttggcccttggtccctgggtgattcctggacaagcaccatcttgtaagaacataaactgtatcaattgctcccctgttatcccactgtggtggcccctgtcacctgtgagtagtcaatgaatcaatgaataatttttgaggtcttcaccaatgtatgcattttggaatatggtacatacatgtgctactgttaatctgcatattaaatgaataaacttttatttatttttgtagctaaaaataatcttacgcattgtagagtttgatctccccaccccagtggattttcttsgggcctccttgggttgtacaccactgggtttacagcatccgtttcaagcgcctcactggcaggatctgaattcaggcccattgcattctggcctatctctccttctgcagacttgcctcttgttgctacccagccatgatgagctgtttgagttcccaggattgattacgtcttctctctgtttcatgctatcatccacagcttttcttyttaaggtgactaacatttacttgtcttcctgaactcagttcaaggatctcctcttcttggaagtcttccgtctgcatcccccctgttaactctgccttgctccaccctgtagcatctccmggttgaggcagtgcctatcctctgcattcctgagaatcctatgatttctctcataccaactgttagcatgccatgcaatcactgtctctttttccctccctaataatttgagctccttgcagttggaattatatcatctttatttctttctgagcatctagaacagtggtctatcaaagaataggtgtttaataactacttgttcaatgaatcagtgaatttgtttccttatttaaatatttgttgccagccaatacaacatggaaggctctgtgcagggggctggtgtggatgcaaaggtgtatagggcacattcccactcggggttgggacagtttaaggcctgccggggagacagacacgcagctgtatgagagggtagagaaaaagaggatgaggagagaaggggaggtgggagaagagtatgagctgaacacaaggcaagcagctatgacaatttatatagctctgtgcattttggtctcctgtaagcccagcgagataaaaaggtattcccattttacagatgaagaaattgaggccaaggctgatgaaagagcttaaaggtctaaatttacctaggcagtcaatggcggagtcaggcaggcttccagcccagccccttggacagcttgctgctttacattctgccaactactggtagatatgtttttgtaaaattagaggtgagaattttagaaggttggatgtaactggggtcccaagtattgaaaacactaatggaattattttaggtttatgcacttgtttttttctsataccctaggagtttatgtaatgaattttcatggtgctatagatacttaatgaaactatgtgatccattagttaaatgaaatgttgctgagtatgccatgttgctgtcaaataaattcgtttaatgttgctaaaacctggttctggcttttgttagctttgagtttgattacagaaacacattgtattccctccctctttgccttgccgaagattgactgatgtctgaataacaagaatgctgccttctggaacatagcattttatttttccaaaaatactttcacataaatctataagattattctattattgttccattttacagatgagtaaactgataaaaaagattagtttgtttaattcaagattttaccttagaaaagttagaccatcagatactgtgtagcaagatcccacttatttatctttcaatttagttaataaaaagaaaatatgccttgttcataaacaacttaaatggattttggccacattgtttggaccctatttaaaagtggtactactagtattatgctctcagtgttagttttatgatctcagcatacagtaagagatgtggaatattctctttcagaattttatagagacactgcttatgttgacatttgtgataccacggtgtcaatttcatgaaaactgataggcagttttctttttccacttctggtccaaagggaaaaaaagttctatagactttgtgaaattgtaactgatcttttctctctttgctttggcttctaggaatctcatagccawacatatagcctatcttctacagccatatcaatgtttttgatgtcttattcttgcttctgccctcatcttcatttctaattttttgtgtctctttgctccaactttcttgtttatttagtttatcctattatggaaaatggcttttataaggcttttggtaagttgcctaaaattctgtttttttttcataacrtggggtaaatacaactaacaatgccacatcgtgaagatgagctgttaggctaagatatgtctcccatatttgtgattcgttttctcccctttcttgttacagttatggcaagagagctttgattggatccataccaaggctgtcaatctatcagttttgtgagcttcaaagttttaaagctaggaatatgtcctatcaccgtgttatttttcttgaaagttttggtaaagtagatgatgattgtacatctgctgcaatgatggtggacctctgttagcagaaagatacagcgtctctcaatattctgccaaaagtttctatagcacttgtacctttcacacctacagcagctttatagaactgctgccattgggttcctgcaaagccttacattttcctattgtcttgaccctaaagaaatcaaatatgcagcatgggggaattttaggccttttccaaattgccatggtcagatcagatagcctttgacattaaaaaataaaaataaaaaaaaaagattgacaggttaatgacatagtcccaggaatggagagggagataatctacaaaaggcctacttaggctgagtaattaaaggaacctgcagtggtccagggggcaggaggatgtaaagtctgagtgggcatggaatacagtctagagaggaagcttagagctcaggaagaaaggaccctgttccgtgcaaatttggtccatagacttctgccaagtttggcagtctggggagttacaggggtggaggtggaatcagaactggcagccataaaataattttaaactcagctagccttgggaattagaaagtatgccatctaggaagctggaatgggtttgaacttaggagaaaagtgaggccagaatggacttagttacatatttctttgtgttaagagtttgagctaggctttgttttcccttttcttaatttggaaataatctcacaattacaggaagaagtataagcataagaataagcaaaaaacacccaatgccctttacttagtatcactcattgctgatattttatcttacttgatttatcatttgtgtgttttctctctatgtatgtacgtatatacatatatatatattcacacatatatgcatacacatacatgtatacatgtatatgtgttttttctgaatcatctgaatataaggtgcacatatcttggccctttactcctgaatatttagtgtgtttcctaaaaacagctatattattttatataatcacaggaaagttttcaagttaaataaatttaccattaatgcaatatgtttacctaacttaccattcatattcaagtttatcaactggctcaataattttgaggggctaacatttcttttctctccagtacaatatcctgtatagatatggcatttaattgttattttggcttaatttcttttaatctaaaatatttccacagcttctctttgtcttttattacattttcagtgaatacagctctccccttccgatttcttaaatgcctaatctgattagattcctggccagaacactacacagtactgcatagtgatgttatgttctgctcagggtatcacatgctatccatctgcccctgtttgttgatgttaattttgttaacaacgttttgtccaatttctccactgtataattacaaagtttcccttggaactgataaacaataagtgcgaagacagtttaagacctgcaaatattctgcttcttatcaaaaatttttcccggacttagcatctgttgatgattcttgcctgaccagtctttactctgatggctgcaaaatgttgatttgataactccagcactccctttgtgtttaccagtcagcacctgttctgctataagcaagacagccttccattcttaccccatttgtttgtctgtctgtcatcagtatagatttgtggatttctattttttcaatggtttattatttattaccatccttaattatatcggtatttaaatcattcctaattaggctggtgagaactcttcatgatggcttctgtatcctttataaaattctctcatcattttttgtttgttttgagcacttaatttctggaataacaagatatttcaggctcattttgtacctgccatgcgccagctctgaaataattcatttcccccaagaaaccttggtttcttttgctgaaaaatgataacagaaaccaaaatctaagtattagttatctcattgttgctagagtatctttgctcctaggccctcttaatggacagagataggaaatagttgcatatcaacacatatatacattcatacctatacatttatatacagatgcatgcatattttataaatcctgagtttactttgaaacctacaattttcartctatcactttagcattctttcctgctttcctttccctattttaacatctcttgtcccataggagaagcttggctcccaacaatatctgcatttactcctttgctccattctatagaacatcgaaaatagtttcagaattgctttgctcataacactacagaaaacaagcctgctaaaaagacctcagaatttgcttgctgctgctcttgcttcaactctacccaagactgggtgtgtgccatccaattctgtgtttataagttatttgataaagttttttctcttccacctgtttagcaagtgtgcttatgatgcccatttaacataaaattgaattgatttgcttcagtctgcttttagttctacgatcccccttaccatccctattaatttaattttcttcagatatgtagaacattaatatgcttccaaatgtggaaattatgcaaaaagctgyattctgaggagtatcaccctctgccataacccttttaccctggcacccagtcacatcaccacccagttctccctatgaaaaacaacttccatgttatctggtttgtttatcctgtgtatctttttgtaaagataaaaggtagcatgctatagattgagctaggctttttaatgcccaaatctcatttatcttccaaatctcacatacttggtggtggtgttcccattttactgatgaggaaactgaggcttcttgtctgtactgttataaacctttgggccttgttgataaatgtcctgttttctgtgctttataccttggatgaagctaagtctaagatatcgaatcataaaacatgccaattgtgacatacagttttaatgcatgcagttactgccacacaaactcaaagtcttggttttgggaaaactacattttcatctgtcttttagcactacattatgtttttaaactgaaatttgcagtggcgttagtgttatcacacaaggctcatatcaggttgggaggggttttgttttcctaattctgstgaaattcacatgacataaaattaaccattttaaagtggtatttattatagtcatgatgttgtgcaaccctcacttctgtctggttccaaaatattttcatcactccaaagaagaccccatacccattaagcagttcctcaaccttatgcccctcccctggcctctggcaaccactgatctgcattccatctccagggatttgtctatttaggatatttcatataagtgaaatcatacagtatgcaacatattttgtctaacttacttgccttgctgttttcagggttcatccacrttgcagtgtgtatcagtactacatttcctttatacaattgagtaatattccattgcaccaatattttgtttttccattcacccactaatggaaatctgggagggctttgagtgaagttggagagacgagtgtcttgtaacttgccytgtgctgtgctatttactagctatgtggctttggacaagcgcctaagctggcttgtgcctcagtttcctcgtttgtttcatgtagataattatattggattcttaaaatagttgaatgaattgtatcaaataatgccagaaaagctcatagcataatacttggcaaataatgggccctcaataaataatagctgttttattgtaggattatatgagaaaagggggaaagaaagaacacaaatgtgtgttatagtatgkgtttagtgtgtgtttgttctgttgtagctgctgaaaccttcatgctttgtttaaaaaaaaaaggcatatctgttttctctgctttgtggtttagtgtttttggcccccaccccatcaataaacatgaaattttacattttagaagcagttcactagacagaatgtctgtagtggaatgttacataattcacatttagatttgaagagctcattataaaaaacctgacacacttcaggaatattaaattactgcagattgtgtggagcaaagaaatattattgaagcatttcaaaattccaggcaagcctgaatttaactgataggatttcacagcctttactggggaaaatgatttgagttgtcacatggtttctggccctggaggactttaatctccttaattacaaagaagcgaatttcctaaataatttggagttacttcacagcatttgctcaacctctgccttttggaaaattaaaggggatgccagggtccacactgtggtacattctcacagtactgtagcttccttatttaagtttttattcagaatgatggtggtttcctttcattattgatgtagggatgtacttcagaaattcacaagtaatgcttgtaacacttgaacataatcatattttgttgaacaaacrtctttgaagatagaaataaggagagatgctatattgtgakttataaggttgaagaagagaaaatggcccaaatccaatccagttttatacaaytgattttaaaaaaattcttgaaaatgtgtaaaatccatatatttcagctactttctgaatttatagattaggyacctactgtgtccaagaccaacatgataccatttcctacaattcatcctgagacagcaaaattaacttgtatcaatttcctcctttgtaaaggggagataatacagactttcggtcacataccggccakgtggccttgagcaagtggcacaggaatttatgtgcctaatatttattaaatgcttaccaggaggcatgccagacactcttccaatcacattacgtgtgygatcatacttaattgccacaacagctcccccagtgggcactattatccccattgtacagatgaagaaactgaggcaaagacaaggttgagtaacttcctcaaatcatgtggcttgtaaggggctggaactgaagttgtccaaaaatcaaatcataaaataagttgggaaagagtctattttgctacagagatcagaacatctttctgcctgtgatgtctctttgaactgaaccttgaggattcaatagaatgtccaggcagacttgagacaagagattccatagaaagatagcagcacaaggaaaaactgggaagatggggaagtgcatcacctccctgctagagtcgtgcctccttttactggtttggttgttgatttcacccctccttgcttttacacatgctgatctttctgcctgagacaaccactcattcattcattcattcattctacatacaattattgagaagctggtggtcctttcccttatcgtccttttgacagaaacatagcttttcaacatctcacagagtagggcttatcctctttgwagctttattaacccttccaagcaaagatgaatacttgcatctttccgccccagtgtgcgtggtatttatacctgttttagttttgctcacatgtgtgtgttgccgtcccttacatgactgatacctctgttagactgagcttcttggaggacaggaaacaacccttgactatgtactcttggccagcatggttacatggtaaatgtctgttaacatgaatgagctagtatttgtatctggcccatagcagattcttactaaatatttgctgcaatgaaatggtaaatattattaataaattttattatgtttatacatgaccaaattttgtgactctgccatctcccattgaacgttgtcttrgagacgagggtctggaaagggtgtgggtgctggtgacaaggtatagatagatggtataaaagtgacaggataaattctcattttctgtgtatggtttcatggaccctgttttacaaagataactttctgtttttcttagttgtagccttagattcaccagatcaagtactttcatttgggccatttcctttttaaaaaataggtagcttatatataaataaaacaaaacagatayctttggattaaggtgggaatttcctcatattgaagctttactataattttatgtggcttttatattagactttctggttaagattaactagattgtcatgattaagaggttggggtcattattctttttgaactgaaactggcatttgaggtcagtcgttttctattaaaccattctacatctgtgggatgaactaagaattggctgcayaattcgaagatccatttctaatagctttttcttaatatttttcaaaagtggaaattggtgaaatgtttactttttaatagaactctcagatataactatyagatagtcacaagaaaggactattatcaaagagaatactgtatatttgtttaatttaaatgagatcgagtgagacactatatgtgaagcagtasctaagggcatrgtatatagtaaatattacctgtaagtgaagtggttgtattatcattattctgttcctagcacrgtgtctgagtttaatagcacctggtattattcartgcacatttattagagaatgaatgaatgaaatctgwgtctgcctgtttcttttctttttctctgcacattaaatgcttgtctgctcttatagctggaggaaaakctgacataaaaattggcttgctggaatgtttcttggccccatttgtcaccttatccttggagcccatttgtatgtcaactccatgccccctctgatgcctgccagtgagggacagaccacaggttacttccatatgatctgcttttgctgccaaggtgctgatcaagcttggctgatggatgggtgctctcttattggaaatgtctccatggggctggtcaggacatacctttgctatatattctggttgggatctagtgcttgaaaataagaaacatagaaaacagagttgggttttgtccctcttataaatctagacttttaaakatctattttgagttacctagtttgagaagcagttttgccgcwaagcctctcattccctttgctgtataaaccctatcamtgccttcatgaaaccatgggagcagtttttgcataaagaccaagattttgtttgtatatgtttgccaattcactttttatwaatttctgtttaacttcataacagtgatgattctgaatgttctcttgccttgatttgcagcactcaaaaagagtgaatgaaatgtgcagctcagagtgtcatttctgaagggaggagtctttctcttggagaagagtcctcaatgagcctggccgaggcccgggatctgtgtgaagtggactaaggattaagtaggatgtcaactgagacagaacttcaagtagctgtgaaaaccagcgccaagaaagactccagaaagaaaggtagggctgaatttgacctttttttaatggctacttttctgcacaggaatgagtttttagatctctggaatgatataaagaaatatctttatgattgcatatatttttaaatagttattttgtgtgttttgtgttaataatataataatgtaatggttcatcattattctccagataaaatccaaaacttttctgcacaggaatgagtttttaaatatctggaatgatataaaggagtatctttatgatcacatatatttttaaatagtwattttgtgtgtttcgtattcataatataataatgtaatggctcttcattattctccagawaagatccaaaacttttctcataatatacaaagtttttctgcatatgccttctatgcatccctccagcaacatctctgcctaaccaccccccttccccatccctgtttaccctccagatattctgtagttcatcatcgcctgtaccagtggttgtcaaactccggctggacccgaatcactgggagggcttgataaagccttcatttctgagtctcatctcaaagtgtcagattcagtaartctagggtaggacccaagactctgcatttaaaacaggttcccaggtgatgccagtcttgctggtccagagaccctactttaagaaccactggactcttaatccagcccgaaatccttttctgttgctcttcatttttttttttttcctgaactgactcctgcttattcactaggtttgagtttaggggagcctcctgggggagccttttcttactcccaaaattgatgtaaatgtttttatttgttttgtttcattagcacttggttagtgttttgctttattaaaaatgtcctgcataaactcctttggagctagatgtttcgttcacattttaagtctcagcacttagaaagtgcttggcagagaggagccagagatatctggcaatgaagatttgcaggcatagtgtgatgataaagtaattctrtcacttttcgtgttttctggagaatttagccccatggctttaggaccatgtttttcagtaagcttcaccccctgccaattaaatatgagcaacttctttctctctgtgtgtgtgtgttttctccctgtagtttctgctctctctcccttgttttctcagctgcatgggagaggattgacagagctctctctcaggtcttgaaatctgtcaatgtgggcttgcaaactgggatgcccttgacttctttgtataggcagtgatttgtttgagacatcgttgtgcctgcccagttatgttttgtgatggcatttgtctgacactctatatgaagtaagggacataactgtaatacatatgcagctytttgacagccagaagcccaggaaggactataaattttgcttttgatgtttatttgaaacacaaatactttggaggcagtctattttgttccctaaaaattaatgtaaaccttgttttctatgsatcatggtctaagaataatagaaagaaagtaagtgggtgaaagaacatgtcttgggagactgctgtgtggaaaaagaaaaaagaggtcgcagagcccagtatgtactagaattcaaatgctttttcagtggaaactgacaagttatatttttgccttaaatttaacctttccactaaacctgcactcttgaatgcttaatgcattaaaaatgttatcttagtgcatattttttcattcttcattttaacatgcaaaaccagaagtattctgcagagaggattcaggttttcaggacattggctcagttggggatttgggatgagagcatgaaggtgaccctttttgaacctcctcatcttcatgtcctaaaaaaactctgaaatcaacataatacatatgtgaggagtgtcctccatggactggctaatatcatgggatttgggtaggcagagctggattcaaattctggctttaccactttctcacaatgtgacctttgaaagtatttaacctgatcctcattttcctctcttataaaatgggtatataatattacagacttcaaaggctcactatgaagattaatgaaaataaggcaaataaaatacttattacttggcatgtattaaatgcttaacaaaggttagctgtgatcttcttcctctttttcctcccttttccttttctccttctcttcccctcccttccctgtcatctttctccatttccctcctctccactcttttctctttttctcttccttcatcattcatcttgtcttaattagcttgagctgccacaagaaaataccatagacttgacagcttaaacaacagaaacatgtttctcacagatctggaggctagaaagtctaagatcaaagtgccagccaatttggttcctggtgagggctctcttcctggctcatagatggtcatcttctcaccatgtcctcacgtggtagaggaagaccaaactctttccttctcttctttcccatcacaagagccccacactcacaatggtatctaaccataattaccttccaaaggccccatttccaaacaccatgccactggggttcagggctttaacatatagattttggtgaaacacagatatgcataacacaccacatctccttcttttcctcctcccccatcccccatcctcttcatctgtatcatcatcatcatcatcaccatcgcatagatatttttgcttattctgttttatacccaaggggctcttgaaaagtatatagctaatttgtcccagaacaatattttgcaattgtttataattgtgaaacagtgataaacaattattattctctatacatttgtctgggccaaggcacatgtatattaaaatgagagagaagggctgggcgtrgtggctcacgcctgtaatccctgcactttcggaggctgaggcaggcagaacacttgaagtcaggaattcgagaccagcctggccaacacagtgaaaccccgtctctactaaaaatacaaaaattartcaggcwtggtggcacgcacctgtaatcccagctactcgggaggctgaggcaggagaatcgcttgaacctgggaggcagaggttacggtgagccaagatggcttcattgccctccagcctgggtgaccaaatgagactccgtctcaaataaataaataaataaataaataaataaataaataaataaataaataaaagagagagaaaacgtgctggtaacagcattaattcatttcttgttcttcagttttgatgatgtaatagtatttcattaaacaaatttgctaacttggacaaaattaatacaactttaaaaggaataaacagtttatatactgatattgaattttgaatataaccatgtcgttatgctcttttattactaatactttctccaactatgcttggattttctatggagacagcatataacctgcaaataagtttctcatcaatctttaagtacttacttctttttctctctaattggctggatytgtcattataatatttagtgataataaatgtccttatctcgttcctgattgcttctagcttacatttaagttatgtttaagtttttactaaagatagttttctggctgggcatggtggctcaygcctatagtctcagctctttgggaggctaaggtgggtggatcgcttgaacttatgagtttgagaccagcctgggcaacatggtgaaaccccatctttacaaaaaaaaatgcaaagaatggccaggcatggcggcgcatgccagtagtcccagctactyaggaggctgagttgggaggatggcttgagcccatgaattggrgyttgcastgtgccaaaatcacaccactgcactccagcctgtgcaatagagccagaccttgtcmcaaaacaaaacaaaacaaaacataccttgttagttcccctttatgtattattttctaggaagtgtttttaaattctaaatttgcatgttgaattttatcataggctttttctgtatttatttcaatgattatacatatttttcctcttataatttatactgtggcagatttaactgatagatttttaaatattcatttctggggtaaatcttacttggttgtaatgctattattttctacaccctggtgggtttgattcgttaggttaaggaatggtttttgtatctatatttatcagcaagattggtgtataacttcttttctgggacaaaccttgtgtctggtattagttaatgttatattctcatataatgatttttatcagttaatgttatatcctcatataatgatttttggtaggaatgaaatgctgaataatattgaggactatttctggaaaatattaactttctttacaattatttaactttttaaaagctatatatgcttattgctgaaattagaaaggacaaagtaaccatgcataattccgtaaaacaaaaataactactattaacaactgaagttacatccttaaactggccttccaggataatatgtagttgacatcatactcttcatacagtttcatgtcctattttgttatttgacattagtgtgtttcctatattattacctgatattacaaaatagaagtgttttttttccccctcttattaagatttagatgactcctggggcagatattttaactcctgaaaaaagaatacctgacaatttgggtcatctattgtgagaaagagtggcataaaggccctttagagttcctcacaaatctatcaccctagttctttaacccaggctgttgaaagcaagccagacggtttcaaatacaagtcacataggggcatatttcatcacaaaatgagtttctaggcaggcgatttatgaaatgtaactagagtattcacaattcaaatragggatgtaagtagtgaaaaataaagttgtttttttcattttatttttattggattgtgtcactgcacatacagcttgtcaaatggtgcccattccagaagtggaatttgatggaagacctgaggaaaagaatgtatatttttaggttcgttacctgccatcaaaggaggacaatcagttgacactactcttgttatttgtaatctccgtattagggcactcagtggaagatcatggtagaggaacgtgtcccatgatgaacagatagatatttctgggggcagtgcctggagtcttccagtcagtgccatctggcagcttagtgtagtggaaagagcactgactttggagcacagcagacctggtttttagttctaactcttctctttatgtgctgtgtaaccagagacaggttaattagcctccttgagcctggtttcacttatctttaaagggaggggtttgtgtatttttatgtgtgtgtgaatatttccacttgtcattagaaaggtgagggggctgggtgtggtgctcatgcctgtaatcccagcactttaggaggctgaggtgggcagatcacctgaggtcaggtgttcgagaccaacctggccaacatggtgaaaccctgtctctactaaaaatacaaaaatacaaaaatagggtgtggtggcactcgcctgtaatcccagctacttgggaggctgaggcaggaggatcacttgaacctgggaggcagaggttgcagtgagctgagattgtgccattgcactccagcctgggcaaaaagagcaaaactcaaaactcaaaaagaaaaaaagaaagaaagaaaggtgagggagatactgtgagtaaagagctagcttggggtctgcaatgtagtctggcttagtcagtgtgttagtgctctgtcctcttctttctgaaatcacagttcaccatcacctccttattttctagaaacacctggaaatagtgaaacttttttacttcccttatatttcatattagtgctatacccagggatcatcaattaaccacaatgacagtgacaaaaagctgccttcatattttctcccaggagaattttggctccaagartcaaggctttaatgggattcagaagtcagtgatcacagggcagatgcctcaggtttraagtcacatcaaaccgagtgtgaaccttctgtaactcgcarctgtgctaacttttggaggtttcttgaaaaattctagtcagtttgggttaaagaatggtttcagtaatgtcacactcagggtcatgactgctcaactggtcattagccctgggaagtaacttccgctaacattggcttacctcataggagcttataaattgccatcatattgattatctcattaggtcatcaggatcctgagagaatgatcttttaagaaaacaatctttttatcaggcttatttatcattgcttctatatgctgctcttgtcctgcagaggaggcagcctggggtcaatcaagatactgggtatttgggttcatactttaagccccccactctctcatggtctaacttcagacaagtcacctctgctttttgagcttcacttttctcagccaccaaatggatgtagagataatatttgcttgcccaattttgaaatgtaggacggggcatcattaattaattagttcttttgtccacaaacatttatccagctccagcatgagcccagcctatgcttggtcttctgcagaacagagaaatgccttagaaggagattctgactctagtcatccacgctgtagttaaagaactgtgagctgggagggtggcgcaggggagggggccttctgatatttatgtctcgtctttccytgaaaaaatattgtgtttctactttgctgcttttattcattcccaacctattactgttcataaaatgcataaggtttactttgactccaagtttatttttattcattaaaatattccatgtttatcataatgaggatgattctcattaaaactcttttcattgccttcctgactaaaagcaagtacatttttattttaataaacataagtaacacaatactctgaaagtctgtatacattaaaacgtgaataacctctctggaatatacaacttctctggaagttgacatatataaaaggttataagaagttaatgtttggtggcaggccacagcctggttgtcacaggtgaggtctcaagaggaaaatgatttgtcagtggtcactcccctgggcaatggcagagccagggttgcaacccaggaatggctccctggctggagctccttccactcagtagatcccaaacaacttatrttcttaggattcacctcattaacatctcagggtgtttgcttcctcttccttacaatgaagacttctgaaaagagcccatgttttagaattagataaactgaagttggagtcaaggctcagcacattttctacttgcctatcttgggctggctacctaatctttctgggcctcaacttcttcatctgtaaaatggaaataatagtagttcgtatcttagagtgttgcagtgaggattccatgagttcacaagtataaaaaacctagcattgaaactctatacctagaatcaagattaagaaatattcctttcctctgtggcccccaactcccaccatgtctgagaggcagcacatctctagtggtataggaaatatagagaggtagaaggtacccttttctctagaggaatatggggtagttggtaagaaaaagacacttgtccctcttcaaatggatacttgctccaagaataactgagggaatgaataagaagtacaaaggaaaatggaccatgttgtcaagctacaaagatttactaatagccatcatgtatgcttcctgcatatgagccattttagacaaattttccctaataagcctaactcttacatcatcccattgaatacataagaaaataatgtttgcagaggtcaagagacttgccccaggtcatggggcttgtctgtctgagttgccatacactaggtcttagcagtgctgaagtctgtactatcttccctgaatgtattctgtgggtttgccctgtggcttgatgctggagagttggagaatgtgaaaaaaattataggggctatactcttctggggagatgggagcatagaaactgattagctacatcatgtaaatttatggtgctgttctgtcttggcagggttttggtgagctaatcattctatatgaactctgtgatttgtaagctttagaaattcaaaaccaaggatttaattataagaaaagataaatttttctgaacttgatcagtagagctcttgggccaaagggtttggaggcagagagtaatgttttggggccaagcagtttacttctttatggtaagactgatcatatgatgtgctgtggtgaaaagagacttctgtattctctgtggtcacacggtcatgaatttattacaggacacttcactcgatgtggtcattcactgaagataaactgtttcaggtttaattggtgacttagttcagcaccttgttctaactggttcccttgctagaagtcaggctttctccaaactcacctacatagctcttttcctccttgaacttgtactgtaaccctggcagcatacaccacaggacaatacatcaagccctttgaaatgtggttcccatctccttttctgtcactccgcttgctcccaccctaagccacactaagcttcaggtcccaggtctcacctctgtggcttttgtgcagactgcgatttcaccttggatagctctcttaccctatgcacttgctcttggcgactcctgttcatccttcaaaactcagtcaccgttttttktttttkttttttttttttttgagaagaaggcttgctctgtcacccaggctggagtgcagtggtgtgatctcagctcactgcaatgtctgcctcccaggttcaagcgattctcctgccttagcctcctgagtagctgggattacaggtgcatgtcactgcacccagctaattttttatatttttagtagagatggggtttcgccatgttggccaggctggtcttgaacttctgacctcagctaatcggcctgcctcagcctcccaaagtgctaggattacagtcaccttttggttaacattgtgagtttcctaacatcctcaattaattaatcactgattatcaattcatgtgagcttctacatatctttcaaatccattcattccttcttccccactggcccccgtccccgaaggtagttcaggctaccttcatctctcatctggatcatcctagcaccctcctaaatggtyttcaggttttcactgctgtccatctccaagccattctcagcactgctcactaatgcggagatttaatcagatcacactcctgcataaaacccttcagtgagtggctcctcctgccctcaggaaaaagtccacactgcttatcatggcatcagagaggtgctgtctggtctgaccccttcttatctgtccaggcgcattcctcaccactcttgccaatcatacgtcaccgagtggtcccactgaatcaattgcagttccctgaccctaccatgttgattttttacacgtggggttttgtacatgttttttcttctcctgggaatacattttttctgtatttgtttcaaagctaactccatgtattctttagtctcaagttaaagattacttttctccagaaatgctttggtgacccactgcaacccacccacatgccccccagttgtgggtcatgaccatgctgtgtgctctcaaccactttgcattttctccattatttaaataaggtttattctctttatcactcactaggctgggagatctgtgaggacagggactgtgtctgttttttcagccactttagttctgccactaaggacagtgttgaaaagtgtaggtatgcagcaatatttattgaatgaataagggagtaaatgaatgaacttacggccacgaaaaatctcacctgagtcccctggattctaaggagtctcacagcaccctgtacttactaaaattatcacactttccccattttttctataattatttttcttttttctatgctatgccattaactatgagttcctcacctggtacacttggcacaaggtaggtaatcagtaaatgtttgttgaattaattrttatataatgtgggggagaattatttgcacaaggagaaaraaaatttaaaaaaatctcccctaagagttggctcttgagattcttattatgtggcattcaaaattcctacaattcagacagctacttctccttttgtgatgtgtgtccaatcatgtctggtgctgtaatttaccgtgatgtaggccatattggtagtaagagctataagatttgccatattagttcatcccactgcttcattaagctcagtgtgctgcctctggcagtgactgggcctgaatttttatgtttggaagaacaaagctcttcacattagccctctgagtccttgatatgctgtgagtctggttacgtatatgctctttcacggagctggagagtctttgtctttgcagatagtcagtaaatgactcagaggatgggatttcattatttgtgtaagtttgctgagcagacaatgttcccaggtgtgctgagatttcagcaatctcctattgcaacacaccttctaggatggtcagagtacacatgtttgcaaggctgagtgtttctgcagtccatcaaaagaacacacatagatcaaaggcagaggagaggcaagagcagaggtgaaggaggaaccaatatctattgttcatgtgtccttgtgtccatgttttctcatttaagcttgaaaatagcctttagacaagtattctcattctgtgtaagaggcaactgaggctcagagaggtgcatggcttacttgaggtcacacaggtaaagggacccatttacacacagatctttctaaccccagagcctgtccacgttcttaaccctggactaaacttctctccactgaatgatatgtcctcttaccaaatactaagttgtgcttgcactgaaagatgtcctcctacaggttccaatagtaatgcctttaggttgagatggcctcagcaagaggagggaatgatgataaaatatgttgtatagttagaaaagaagttaaaaagccatgggaagccccttcacttcacatctcttgtctgtgacttgcagaaggttgtcatgcacaagtctccacatgattgagaaggaaacatttcctagatataaaaaggtaaagtgaaaatgaacttgaaggattttgactatgtataaattgaaatgtacaatcagccctttgtgactgtgggtttcacatctgtgtattcaaccaactgtggataaaatcctgaggctatggagggccaactgtgtgtgttttccatctgaggttgtttatccattcatccatcagtggacatttgggctgcctccacctcttggctattgtgaatgatgctggtatgaaatgagtatacagctatctattcgagaccctgctttcattcctcttggatataaagtcagccaccctccatatctgaggttctgcatccatggattcaaccaacattggatagaaaatattaggcaaaaaatacaacaattaaaaaataatacaaattttaaaatgcaagtataatagctattacatagcattttctttgcattaggtattacgagtaatctagagatgatttaaagtatactacaggattacataggttgtatgcaaatactatgccattttatataaagaacttgaatatctttagattttgttatctatggagatcctggagctaatccccatggatatggaagatataatgttatattaaaggaaaacatcatttctatctcttaatttggagcaagcactgtaaaagtgaagaccaggaaatttcgcaaattccccaaatctatgaataatatcatcagcctagttcacctcccagcgggcatccccaaacctgaaataataacgaggatgctggtgatgaaggtagctactatctgtcagcaattgctaagtatcaggcaatgtattcaaacctttatatctgttttctcattcagatcattcctatgaggtagctgctttttaaaaatctcaggtttacagatgaggaaggtgagaagctggaaagacgacacaaagtcagtgctgtaagggccctgcagttctgtctcactaatcaatacagcaaatgttgtgtgtcccttctaaacaccttgcgcaatttgaacacatcgccttgcttgcccccctttgagcatgcatggatttgcttcagctctcctctcagcctggaagaagttcccctctctctttttggcctgtcaaagtcctcctgctcctctgagacatagctcagatagcactgccatagagctcctcctcagmatccctctccttccatggaattaagccttgtgattctcagtgtactgttttcactccagatgaagctcttattcctttcttctgttcattaggattccgctttataaccctttcttcccttctatattgtgtgttcagctgagtcttattgacaaggactgtgtcttttctatcattatatcatctgaaagctgggaggaagagaagtaaagagttatcagtggaatgtgggaaatgatattaatgatgtgactactaaatgccagggagggaatacaataacttttaaaatcttcacaagagaattatgagtttgataatactcccattttacagatgagaaagcatactcagataagttaagattatgttcaatgtcacccatcgtgtaaatagaaggacaggtattttaatttggatctgattcaaagcacaagctctttccgctacaccatgctgtttcccagcagagaccatcaaataaaaccccagtgaaagctcacttcctaggggtctggttcctgttgtaaaatggtagctacagatgcaatttacctttataaaggatttatatgtcatcattgcagattcacattccttaaatttgggactatcatcacttgagtctttcagctttccctggctggcaatactgctgtagggagaacttgcattctaattgttaaaccagaggcaagacacaccatgctgggacttgcactggaagaagcccagtagatgatgaatggcagacctgaatcttatcatgtatttcaggatgatgtacgggactgttggaaactgcctttgacaaatgtgcacgggaaggagaattatctccaacaatgaaaaatgttcttattatgtgatcctaaaaaggatcaggacccctatcattgggaaaatgatcatgcccatatcccttattaacagtgatacagaagcatgtgctaaagacattgaatgtcattctgaagcagtgatggatagtcatgagagctgaaatcaggttggwcttatgaaaggtagcttgatgcttgatagcaggtgggaatcgtgcaacttgctaaggtctcttttagcccttgcttcttgaggctctgcaagacttgtttctgctgtcttagccagtgcccagtggcttttggtcaggttgaggctgtgattaaatactagaagatayatgatatatatgtttgtaggaaaaaaaaccgttttcatagggagaagactaatgtacaggcattttaaatattactctcagtttattttcatattttatatgaatagagtcatagagatttagtatcctgcccacagctagaaactagcagagttaggatttaaacccaagcagtctggtttcaaaatcgatactttgttgaccatagtagcttctaataaataccttcctggttggagttcaaaatcgtggaaaatgaaactgctgagtacatgtgtgaaggtgcctatcgyggactttagcacgtcataggtgatcaagagatgctagtcaaatcaagaattgtcaacatggtaattttgttaagggctaagtgatgattacagagttctttgaattccttcctttcttcccttcttttcttttccttcctccctctttccttccacctttccttcattcaatttttgagcatttttcaaaacctggcagagtgctggccacagaagattatggagaagtcctgagttcaaggaacttaaaatctaataagaaagagagacaaataagaaacaattatagtttattatagtaagttgaaatcacttagcagagacaaccaactatccaaggacttcccagaggttgtgagatttaaataaacattcttggggttcagatttatttatgatttttagttccatagttactttgtgaaatatctcctgttattgaagatctgtaaacccccacttgtgaaaaacaaatcctaccctatcctcccgtgaaaggaagactagcagatcctaaatcttgctggacaataacttgttcctgcctcttctagagtaaaagctacctcacattacaaacatattttattcatttcgtgttatgcatagggccaggtgcataatatgtgttcactaaacatttgttgaacagtattctatgttaaataggtaattcattggcctttggcctacatttacttataatcagtaatttatattcaagtagtttttctttgatgttttgaagtaatgattacagcagtttctcctcctgctcacaaagttatagattgcaaatagattttgtgtaatttgccaatcctggtcgattttaatggctgccttgagcrctatggagaggattctgaaattatgtcctggcgatgagtgagaacagttaacacttaggtatattttctttcagtatttttctcctgcacactactgtgtgcacacaagcgtgcaaacacatgacatcctgtctgatccttctgtgtatttaattctgtattactttttcactaaacctcacaatttaagctattctcatatcataaactttttgcaatattatcattttgctaagtgatctaattttctttagctttttctcacaaaacctctctctcaatctttctgtcattgttgccatttttattggtgcattcccaaatttgtcaaatcttgcttaagctgtggtgttacagaactgcttttagcagttgttggttcatttctattttcatccttgaacggatacagtgtttatcttctgtgttttgcgggcaggggaagatgctaatttgttctcctgtagtgagaagaaactgagactttggagtgggctcccctttgcgggcatgtcaccactggggaccaccactctagtaaagcacgggaattaagatttgccaatgaatggctgtgaaccggagtgtgctttgctgttcagaycttttaacctcagcttatcaactttaatatgttgtcctggtgtcttgattttttggttcatctgttttaatgcgatgaaatgtaaaaatagagcttagttttgtcccctcacaatgactttaggggtttttagctgataaccaacccttcttctgtaaaggattcraattttaaacagctaaaaatacatttttctaatatctgtcatcaagtgattagtgcaactatttagttctggtcatctttcctattcttggtagatttatattctcttcttagaattctactgccgccctctctgtctgggagactggagatgtcatttaaacattgcttattaggattccattatttgtctctcctatacagtcagctaaatcaaaaagtcagacagtgtttttaaattgcaaatttaaatgacaatttttaggccaggtctactggaaattttctgtccttggcatccatcattgcttgtgagtatatagttttatattctctctctctttttctctctatccttttctctttatcttcttgagagcacagcacacatatccatcagaaggatcagaactgcttgcaatcaaacaaaaatgcaataaagatcttggaaggaaattaagacaaacacctattctagaccttgcttacatattagttctcttcctcctccttatgctcccttgcctcttaaagaggaaacttgcataagacaatttttttttaagcagttaagcccatggcttagattaaaaaaaaaaaaaaaaatttggctgagcgyggtggctcacacatgtaatcccagctctttgggaggccaaggcgggcagatcacctgaggtcaggagctcgagaccagcctggccaacatggtgagaccccatctctactaaaaatacaaaaaattagtcaggcgtggtggtgctcgcctgtagtcccagctacttgggatgctgaggcaggagaatcgcttgagcccaggaggcagaggttgcggtgagctgagatggcgcagctgcactccagcctgggcaacagagcaagactccatctcaaaacaaaaagaaaatcactgaaagcctggaatatgccagataatgttatttcagttaatctgcatgaaaaaaccaataacaatatggtactattgtgatggctagtatttattgagcgcttactatgcatcagacactcttctatgtgttttttgtcttaacttatataagacactcgtctggatttttaaaagaggaaactgaaatttgtgggaggcaacttgctcagggcccacagctgaacaagtggtgaagcatcagcctytgacttagaacattgtctaccacactagcctctatcttattttcagtaagataatttgcgggctatttagtatctctgctttataagaatgacaggttggaaagccttctcactatgccttactgagttttaatttttaacagattgggttagaagaagagggtggctttaaaccttgaaatcatcttcttttatcagtccattttctctgggatcagagcagattggcaaagcattatgatcttccatttcaaagctgaaggattatccatctcgatgggtgaaatcatctctaaaatccttctgaagccaaatgccgaggttggtacatttcagaaaatgcctgtggtacccaataacttcagtgaggaaaattaatagggtgaggtttgcatctggaaggcctatgtgtaggaagtggactcaccgctggccctgggtcagacttttcctttccagcagggccttgaaggtcttctttctgttcagtctcgactcactaggctccattgtcaacagtagatggagcagtcaagggctggtgagattccagtcaaacataggaggtgaggacaggggaggaaaagacattctcatgtcagtgaggaaaaatagggaagcagccaggggcggctaggggagccatcagaccacaatgcatgtttgactcgagtggagaagacagggagggagggagggagggagggagggaaggaaggaaggaaggaaggaaggaaggaaggaaggcaggcaggcaggcaggcaggcaggcagtcaggcttggtggatgcatcttagatgttggcgctgtcctaaggcaacttcagccaggtcttattggagtacttaagccaaagttgcttagcagaggagttccctgtctcctgggaaagggcctgcctgagaatcctgccctgctttgtcactggctgggagtggcctatgggaaacatgttcctcttgcagacatgaagaagggtgtctgaatgtagcaggtagaatgctttgtcagttcctttccctgttaggggaggttggcgaggtgcattctcgtgactcccacattaaaacaaatggatactcaaaatactcaaatatcataagttgccataagacatcccctctcacttcaattcactaccatctggtggaaactgaccagttatatttcttttctcatgccagcccatgccacataggcaaagatgggttaaaaggtggtgcaaatagaagttgaggtcccagagtctttggtcacttggcccagaaatttccagaacattttgacctttcatagtttgcaagggctgaaatgggggggaacagaaagcagctattacattgatagcccaagagggaagccctggtattcttcccacacttttcttatttcttcttatcacaaacaaaggagaatgctcatcttgccaccagcctatcctgacccctactgcccgccccacacccaacccactgtgctaggaaggctgaaagttgtatttcttgaacacctctctgatggccagccacgtgtgtaggagccttatttaaactcactctcttaacacaacaaccagtgaggtaggtattcttcagagcccagtaattgcattactgtctttagagttacaagttgatcagtcagtctgccatttatttattaagctatgtggcctggagcaggttccaaatcctctaagcctccatttcctaacacataagataggagtgataggacccatctctcagagagacaatttagactagatgaaatcatgtatgtaagtgcctcagtttggtgtatatttagtgaagtgctagcttactgctattgttactatgagaaaaccaaagcccaggcagcaaggctgattcttgggactctaaagtttgtgagaagtgggatgtgcaatgttgtgtgggatgcgcatccatcctgcctggctctgtgctagatgtggcaatacaggagacacccacttcagctttcctgccttttaagaagttacagctcaacacttgaatggtctccaggcgtgtggttctactttatggctttaaggctgaatgctcagccttcacattggcctcctctggaatcatgcagttgtttagaatgtaacccactcatgaaaaaagcaatctggaaagctggctctcctgagggcttggagccccgcactagaaaatcaaacgccaacatctcccttcaggagtctctccagagttatttatctttgctcttttcagacacctgcttcatgcttctttctccctgtgttcagacttgcctttgtttgtcactgtgcttgtggccagcttctccatccaagatcccatctgcacctgagttacagggttccagttccagattctagacagtgaaaatctgtaaagctcagcccagctctgatggtggccacctatagtctattcaagagtttggaacaatcagtgtgacagtagtgattacagcccaccctgtggatgattggtaggaagggtgaggcacgtactgaacaggtacaactaccaaacaaaaatcagcctagatggcayttcctccaggaagccttcctagacccagccaaacacagataatcaggccctccgcggggctacttggatactgacctctagtacagtagctctcacagtgtgctgtactgtacttgcctcatccctatgtctgtctctctaccagaccatgtcccctgagggcagggatgggaaccagttcttcaccaaccctgtgaagctgtgcttcccaacctggaacccgatgcctgtcgcaaagtcggtgttcagtaagtctttacaggaagtgagtttcatcagggaaacagacaaataattgcaccacacaatgagaagtacttcccagtggcaacacgaagcagtcatcctgccaaaaccagttgtttttccttcaaaatacagtaaacaccagtgaggacagaggcagagttccagtgcagcttttcacatacagtcatgttctgtttctttgatcccaaactcctttagattttgaatcttaaagagcctgctgcagctatccacttaatagccatccggcaccctatgtgttcatgccaattagcttgggaaagatgaaaacttgggggacttaatgagctgagctggcacctgttcacttagcactccagcctgcatcttttgagctgcttacaccaactggatggtgtcaggtttaacctttctggggaaaggcttacagaggcatttttgcattagcgtcttccaacttttatactttgggtgactgacctagagattatggagtgaaagtctttggaaacttggacttatactgtacccacactccctcacccaccccagtccctgctcattacagatgatggtctgggttgtgggggtggctcaggtatgatgtttccaacaggcccaagtttgaatcctaaacttgtaggagctgtgtgatagggccaagcaaggtgcctggcactaataggtgctcagtgagtattggtggagggaggctccctcaacacaatgcagtatcacagatgaaagtgtccactctatgaggacactcctgtgttcattgcagggtcaccagcacctacgtcagtgtccagcacctagtaagtgctcagtaagtatttgttgaatgagtgaatggacaaataatgaagagtatttaagagctttagcaggaaagagacctggatttgaaccttgcttctcccacatctgaatgtggtgaatatgggcgatttacttctctctcagactctggtccttcatctgtgatagggaagaaagaccaatgcctcttatggttttgggcatagctatgaagcacttagtatgctgtctgtcacatggtaagtactaaacacataggtattcttagcaactttttaattaatggagtaactttaaataaattgtttgatacccacatctcagtctattaatttataaagtaaaaatactactgtctgttccacagggctcttatgaagaataatgcaatatggcatgcagagtatttgaatgcccagcatgggctcagagctcactaaatggtggatgatgccatcactattagtagaagacttggaaggctcagacagtaaccacgcatctctcagagtggcgtgcaggaggaagagggcatgtttggagaggagcttgtctgtagctctgggatgtggcagaagcttttgtgggcagacatccagtgctcgggctctcctttgcctttcaccctgaaagagctcgggcttttcaaagggatcccaggctgtattgtcagacgttcacctagcaagctgttcttttcagtagatcgacttttgtaattctcgtgaccaaatgccaagcsttctttgcccaaaacctcttaatcctttgatcttgtctcagtcacaggaaatgattgtctgctacctcctgccatacatgatttagggaggattaccgggcaacaacctcagtccctctccaaccttcctctcccccacctgccagtcactccctaacatgaaatcctcctcatctccctggtgtctggaaaatattctcgggagaaaaagagttaagcaagttggggtgaagtaaagtgcatctcagggtgagaggttggagggagtattcagaaaggagtggaggagggcgtaaatctgaatatcctacattgttaagttaaagaaaacctgtgcatgggttcaggtaagcagagacgcccctggacatacctacgtagggcctcattgaaccacctgcctgaccttcatatttgttctgtgagtggccagggaggggggtgacagcttcagggggctcttaccaaagagagccacagagtatgaatgtcttgcttgagaccacagggtaaaycagtggcatctttgagatgggatcccagcttcttctgattggggtgaattcttctgtcagcaagaacaagggctgagaagttagacaggtctggggtgcttgtcactcagattcaccctccatccctgcatggcaaggctttctgtatatcccagggagctggaactctattttgctgtgctctcctgacaaggggattgggggtcagctcaacaaatgggaggtgctggtgggagactggaggttgggccaaaggtagaagtccagcacttctacctctccacttccggttgtggctctgacagtggctgtatctcctctgtggatccaattcccacaggtggctgccctctctcgatctctctaaagtaactccaccacagccccagccaccttccagtggccccatctccctggctcggtcatggcacctacttcttttgttgctctaatcccagggctggtagcaccttcctgctcttgctaatccttggatcacttcctctttccctgacttttcaacttctccaacaccrttgtaaaggttccttacattaaattctgtgaatagctggcaagtgctcagtttgcctgactggcccttgacagatcatctgtgtttaaatcctagctccgcaagctasttaacctgtgaagcctctgtattcactcataaaattgggattttagaattagaattatgtatgtatggaacctaatagagggcttggcacatagaaggtatttaatgactgacagctctccttattttattacaagtcatttaggaagagagtaaggtgctctcagggaagaaacctggtttttttatttttcacctcctaccaggatgtcacacacttattaaaggaaataaacttaataaatacaattatatatctcactggaatgggttggatgaattgagactgccagtatcattctgggacttttaaaggaggattcacaaagagttatctggattttctagtgacattatatcaatatttccacattggaagcccactttaaatgttaattgccataaggttaacaaacagaaaatatcacggcaacctttggaaggtccttcttttgcagcagcatcatcagttttttgttttctgtttctgtcgctatttctttctcttccccagagtgattgtcaaagctgaatccttgaacagttctcagtgatcgtggctgcactccgggtgcacaccgcctgttccctgcatcagaattcttgagggagtggccagatgctccttgctttggggtagggaattgtaaggtttcattagtcacacttgctaaaagtgtaaaacctctggtgggcttgttgaacatggagaaatccctacatgtaaatatttatggattaggaatcaaatattaaatatttacttcagcttcttggaattataaatgatttaataaaccctgtggggagttggaatggctttggtttaraaccaactcttatatttaattgttttcccactcyccgctctcatagcacagcagcatgggggagcgtgggatacccatggaaaagacagagagcccagctgtcaagttggggtttggttcttgttattttcccttctgtgtttcccgatatgtgttttggagtgggcatttatccaataccataagagtaraacccatgccctttggtgctctggacctcagtcctacsgtgtagtgcaatgacctgaagcatctgtcaaaaaacaaaaacaaaagcacaggtgccccaaaattcagaaaggtagaaccagaggtagaacctgggcacctgtatgtttcaggtactcgggctgcgaagtgctggaggcatctttctccagaggctgcccttgggagggattatgataccayagacagtatgaagtcttcttcggcataagacaggttcagatctgaatctcatagcttagagaaaacacttcctctctcaacttcagcttccttgtctttatgacagagattgaaatatctctccgtgttcatttcctgaggctgttgtaacacattatcacaaactgagtggcttaaaataacagaaatgtactttctcagcgttctggaggccagaagtccacatcacagtgtgggcagggttgcactcactccctgtggaagctctttgctctctgcctcttcctgctctcggtggccactggcattccttggctggtggttgcatctctttctgctctgccttcacgtagccttctctatgtgtctcttatgagaacacttattattggacttaaggcctaccagaataatccaggatgatctttcatctcaagattcttaatttaattacacctgcagaattatatctttttccaaatttgttcacattcataggattggtagattaggacatgacagtacctttttgggaccaccatttagcccactacagtatctaaagggctgacatggtgtgtcactgacatcagttgagattgttcagtgcccataccataaatttacttagagcaagtctattttgtggaattgttgtggatgatagaattatatgaacctacccctgcatcggggacagggtatcattcattaaacaggagcttcttttattatagtttactaagtatttatacatattgctcatcatttctttgatcatatatccattcattcagtattcattcatttcattaatttattaagtacctgtctgccattggacagtcagtagccagaccctgaggatattaaatataaaacagtgtttcttgaaacacaaactcgttgtgaggatagataacaaaattgctgtagtccagtatgataagcacctttataaaggtatttgccagggattaaaggaatgataaatgtacctgggagattggagaaggcttcacaggggaggtggcattgggcctagatcataaaagttgattagaagtttattaaacaaaaggaattcatgagtgaatcatctgagacactccatgtattgakatgcaaggaatcatagtgttttggaggaatgatgagaaattcaggatgctggagctcagggttcatataggggagcagtagaaatgagacaggcatgggaaacaaaagccagatgtcatttgctactcatgaagggaaaatattattaatcctattttactcatgaagaaaaagaaattaatttgcccaacatcacatacttggtgagcaggaaacttgtgcccactttcctgcctcccctttttctgatagccttgtgtaggtatccctcagtgcggttcttcccttgtgtgcagatgactctgcttgttttttattccctctaaattgggagtcccttgatttcaggagccatgccttgtgcctagcatgggcccctggcctgcctcatgtgtggcactcaacagccatgggtaagtgaattttactgcagcagcaattctggcatcaagcagaggagctggagaaattatttctgaagtcctctctaatctyaagcttctagactgagtttgcttacatgagaagttgagatttttgtttggggtcaaaatacatagataccacctgggacctattgctgcttatttctctgggggcaagggactagttccactccaagcctgctctccgtctgtcacatgcttttttattggtttacatgtatagatctatttatattggccgtccacgagtgctggtttttcaataattcatagaaactttgcacaaaattaatctacaatgagaactcaaacttgactaaagccaaaccccttgcctgggaatgtctttgttactgacggcatccgtttgagctgcttttagtgttttgtaagttctgaattctcctttaagaagagccagattgaggaaatcattaatctctgacagttgtgtagatataattaaagatatatgaatataaaaatacctgctatcttaaattacttcctaaaagaacagggagggggaaagagagttctatttaaaatgtcagatacagacgcattaggctgggtagtcaaagcactgtatgtctgtcactcatgaaaactgacaattaggtccataaatagattttacaggcttccacacaagaacgcacatcctgcacatctcaggcgcataaaaatgagaaacatggatggcagtggctgactcaccagaagagagaagggtttgagagatggtgaatgagatgctttgagaaaattcaccgtgtctggaggctgggtgtggggcgcatgggaggagggagcccactggggtaccaggagagctgggcatcccatcctggggctgctgttccctactcaagggactctggccagtatcctcatctccctggatctgttttctaagccgcaaaatgaaattcaggtaaattcaaggtgaaacctccactattcctacttctaagggttatttaaggggaggattaaatgaggttacagtaaaactccttggaaacagacaaagactacaaatgtaagcagttattttttctgagattactattgttgatattgacagctgagatatttatatatgcaccatgaacagatacagtgggtgatcagaaagcatcttaagaccaagacatcagggaatcaaagaaaaatgccagatagtaaaattgaactttcctcacctttggtagtagggaattgacccagggtgagtgagagcctgggagggtggggagatcacgagacctgctctcaatgtttaggcgtcatgttcaggggtcctcattctctaggggttcaaccttgtttaaggtacaggacatcactgaccatcagtttccctttccacaaaatgaggctcatcattctataattgcctctgcaggattgccgtgagatcaaatgaaatcagggctatgtatgcggaaattgtaccaatgcggaatttgtccttgaaaatatgaccatgatcagattagaaagatatcagaatacccatcctccattctatcaatcattctctcatttattcaccttattcaatgatcatatgttgaatttacttatttattatgtttcctgttgagtatctgttttccgtgatagactgtaagttctaacaaggcaggaaatttttttgtgtgttttgttcattgaggagtctaaatgcctagaagaattttctgtgtctagtaggtgaacaataaatatttagtgaattaagtctattatgttttagatactatgatgtgaggtacatatacaatgagatacagaaaagaaaaagagttcacagtttgggaagctgggttgaggagacatattaataaatggattaatgcaaaaagtcaagagtatagcatgatatatatggaagatattcatacacaagagttgggaagcagaaaagaggccatccttccataccaggagggctccaggagctctcagggagcccacagtcctgatatttacaattttccccttgtggtacagggtagaatgtgggtttggaatgaggtactcctgagcttggggtcagactctcaccatcaaacagctatgaccttgagtaagtcacctaaccatttttagtcccaatttcatcttttgaaaaactgtcaagatttaatgagataacaagtgtaatgaaaattattggcacaaaactggctccgactaaatgacatccagtctagcctctattcctttgctattctctccaatcctgaagaattgcagctttttcaggtactttgcctttgagagatacattttctcctaatggctcatagcactcagaaaggacagatagcatcctaatcctttactgctgtggctgctaccactgctactacttctcctaataccgtgttcccacagccaccattggggctattatcagctactgttaataagtgcttactaggtccaggtatttcatgaaacattttatatacgtcatttcacttaatcttcacaacaactcagtaaaaaagttgtatcttcagccaggcgcagtggctcatgcctgtaatcccagcactttgggaggccaaagtgggcagatcacctgaggtcaggagttcgaaaccagcctggtcagcatggtaaaaccccatctctactaaaaatacaaaaaaaatttagcctggcacggtggcaggcacctgtaatcccagctactcaggtgactgaggcaggagaatcgcttgaacccaggaggcagaggatgcagtgagccgagattgtgccattgcactccagcctgggcaacagagcgagactccgtctcaaaaaaaaaaaaattttatcttcttattccatagatgatgaaacttagacccaaggggcttaactaacttgcctcaggtcacactgcttttaagagacagatgctagttggagacattcacgtccatgagctccttgagggaagatagccccttataccaccacacccttaatgtttgccatgtgttgtgctcatggaatacttcctgcctggctgacaacaccagccaggtgctgtgttctgagatacctgagaggtgggttttcacttagtacccttagggcacggggcccatattttcagcattggagaatgcttccaaaagaccttctctcagaatctggctgggagcaggatgctgtgctcctgcccattgtactcagcagaagaggctctgggatgctcttgatcacatttcactttatgggttccataccttttaaagggaagcatcacaccagtgatcagtctggatgcaaatgagtctcttacaaattcaaatgaatttcccacaaagaactccgggtgataagagcggaaagtaggtgtaagtaaaatcactgactttggggacttgtcagccaattgcaatgccacatcctatttggtggctgggctgcaggtaaggacaaactgtgggtttcagtgctctgtctgtatcttcatgggtggctctgggggaagcatctggggtaggagcacaggccttaggccctgaagttccaactcacagtattaaccatggcacccaatgtggctaagagctctcaaagagatgccaaactcttctttgactgttttgcctaatgattggagttgatgtgatttcagttcagttcagtaggcctggttcaaatgtggcctctrccacagaaagctgtgtgaccttggggaagtcatttaatcagcttccttaatggtacaatgggaataacaatgcgaaatgacgagagtggttcgtggtattaatagattcaacttgcccaacatgtagctttccaacccatgccagctgcatccttttcttccttgcttgtttgacagaattgtttcccctgttgaccagctggaaatcccttgctgacccctacctcccaaatcttcttctctcctccctcctccaaccggtaaactccttaaagacagtagctgtgcctcttttattttcattggcccagtgcaggtactggacagatgaatgataaataacaaataaatcagtgactatctgtgtccctgtcttccatacataatagcaatgacattttttaccgcacttcatcttggaaaagtatttttagtgctcacttattattatttaataggcataacaatctgtgaggcacatggtatgattatcattttagaggttgacgttgactcaggtgaaagtgacttgtccaaagtcactctgctagcatgtggtctgtctgatacttcattcactagtcagcagatgtgctgagtgcttactatgtgccaggtactgagctgagtgatgcttttggcatttcctcccttctctgtcacactctatggagaagtaggtctggttcrtgctaagaccaacatgtattatcaattctagctggttgggatacaccaaaatagacatggatcactgacttcatggagcttacattcagtcagtgggagcagagagcagagtaaacaacacacttgctaaataagtaaattattaagaatggtaaggggtcaaccatgctatgggggcgaagtggattggggcgagggagaaattgccctgagacctctgaaaggccttttaacctctagcatctctcattataaaataaacatttcattgttggatgcatagggatactgtataggtttgtctgataaaatatgtcagaggccaaggagattgattttcagtgaagactggtcaagaaacaccgtgaccgtgtttcttgcggaggttggggtggcaggtggggtggctgcaggctccagagggctggggtttgtcagtgtgtaagaacaaattgggagggtgggagtggtcatcataaagtagctaactattattgagtscttgctactctccaggtactgatttaagccccttatacatagtgactcatttaatccacacagctattatcattaaatgcgggagataaattgaggcacagagaggttaataacttgcccaaggccacagcagaagatggcagagctagagtgtgaacgcaggctggttgtcttcagagttagctcttttaaccatgcttccatgctctacrgtagaaaccaactccttctgactgaaagagctggcacagggaggcctgagaactgcccaggccctgcttgcatgcagtgatgggggaaggtatatggagaaatcactctgagtgtgagaaaaccaagagcactggatgctgcaaacctgctttgtgaccttaggtgagtcccctgacttctctgtgcctcagttgccttatctgtaccatgggggattaacttagaggatcctgtaaaggctcttttctgtgccatgcagcctcaggatctgtggggtttgtgtcatgtcattgactcttaacaggcagtctagttctcaggggttaaggtaccaggctttgaattcaaattgactcatgtttgatttgtggctctaygtttcactgctggatgtggaatccggatgtgtagcttaagttggacaaatgaagccttggttttatcatctgttaaatggatttgccaagagatcccctcccacaggttactatgaagatgaaatgagatgatatgagcaatgagctgactttactgcctgacactcagtaagcacccagtgaatgagggctttacccactcgtagtattaggtggactgtttggtcactgagactgaattatgatcatcgtgaaggatactagagactgtgtcatgctcttctctctgtgtctaagcacagagcacagccctggtgtattgttgcccttggtgagtatttgtggggtgaagggtttgcattgctaaatctctacactagcggggcaggctggtgaggctccttcttggccgagttctctatgtgcctaggatttaattcactgatgtttatattgtggggttcttaaagtcttctaaggataatttcagttgcgaattaacaatcaggaacaaactatgaaatgtgtaaacttgtgtcctgctttttaaaaaatctctcttcctcagaaaattagcaaataagaagaaatagaggttgatgttgaaaacaacaacaacaattatctggaaagctgtgaaaaccttctaagatagtgcttgatgtcttctaattttaatcattcagtacccatgtcagggttgcagaagctcmgaagtaattggcagcaattggcagagggaagagttcctcttaaaactgatgaataacctctttatttcctgtggcacactagttttgctatgacccacataaattacaaattgtgctcccttcaactgtgtgtcctttactctgtgttttgcagcatctcacgttgctctgccttgcctcggctaactaggaatcagcagggcctcaaatattctggaacctgcgctgcccctcattttttaagtctttgcacatgtggttcacccagtcttggaatagtcttcttcctctctcaagaccagctcctacttgatggttaagacttagttcagctacttttcatactagaatcctatgccctgaccagccagccaatctgaattacagaactgtcctccctactcttttagcatcttctgcttccctcactgtagggctcaccttactgtgtctcagtcacttcttcactggtcttcctggtctcaactgtgagtcttctgaggacaagggctgtgcctgtgttctctctccccagctggtcttactagagtttcttggctgaatgacccaaagaggtcagacagtggcctggttgcaaagagggaaggcagagaccaaaggatagaatgttggtacagggagttgtgactgtggtttatatttcacaacagctaagtgtgtaacattagccagatgccagtgatctatgtagtgtttctctccaaggtgcttaatcaaaaccatctcattaatcctcacaaaaatctaccaagcaggcatgaaagtagagaattcattttttgttgcatgagaaaatgagacatcaaagatgctgaacctgcacattcagaggttgatacaattagctccccagctcttggggaggtgggtgcagaactcaccctcctcaccaagcctgtgcctcccattctctccctgacatcatgctgacatattgctacccccacctcccaccttcccactcccatctatttaagactcgatgtgtcacatccaggttcacagatgattttagaagtggagagcgagcaaatcctgtcgaacaatttaaccagattcaaaaggatttggatcatttgcgtaattgggctagcagatggtaaatgtagttcaaagtacaaaaatgtagaataattacaaggggagaaagtaatgcaatttatggatgaggaaagcgatttgggagaaaagctcatcgaaatcatgatctcgatgtgttacaagagaaggacaaacagcacagctccgataaacaaaaacagagtggccctggtgactctccagctgatgggaatgcaggggagaggacacatctgtcctctggaagtaagaagggaaatggttggggtggaaaaccatcccagggaggatgatgattgatcaggcaaaaaaatgctcacactcacttgaaagtcaggaattactgggttcatatctcagctgcctccttcttactgtgtgacctttggtgagaatctctcttccctgagccccagtttcctctgctgtaacatgggcatactaatgcytgcgtccctactgctttgaagaatttatgagatcatggatgtgagaaatacaaacaagttttatggaaatctagaaaattcactttgctgagtattaattttatacctgcaatgccaaaaaaccccagtgctttcaactatgaaaattggaaatggattatttactagtgtcacaggttgaaaaattgacctttcaaatattcctattctaatccccagaacctgtgcatgttgccttacatgggatattgcaggtgtgattaaactaaggctcttaaggtagggacattatccaggtaggccctaaataaatgcagtcacaagtgttcttttaagaggatggctgagggagatttgacacagaggaggaaggtaatgtgaccactaggcacagagtggaatgatgtggccacaagccaaggaatgcctgcagccaccaaagccttgaagaggcaaggggtagattctctcccagagcccccagagggagtatggccctcatgataacttaacgtcagcccagtgaaactgatttaagactcctggcctccaaaaccttgagaaaataaatttcagatattttaggccaccaagtttgggggaatttattacaatcacataggagacaaatacaaatagaaagagaaatgacctgtcaataaaagacatagatcaagtccaagttctgataccatcacctatcttggcctcagtttcttcatctttaaagtgggataataatacattttctatatggattattgggaggatgtaaaagagataatgcatgcacyttatccaccrtagatacwtacaaagaaaatgctaggcattaagtttttaatcaggctgcagttagcatggcagaatgtcacaggtcctaacagagcacacttttggagactggatgtggcagttggcattgtggaagcagctggcagtgttggagacatctaggcaatttgtttgcaggagatacaaccatggccaccaagtaggggctaatgcccagytcttgtcctagagcaggcctgtgtgctggggaaggcaattcagcaaaccccaagagtggagaccatggccaagaggggtttattatttcagtttagggaaacaaggttttggcaaggaagtcatcctgargactcttgatcccaggtctgattgtcagtgaaggaaactcatgtaggacagctgagcccacatcacagctttctaaaaacaacttaaatgccaaccctaaaattctgaaaccatggtataaatcctgcttcagtcagactaggtctaggcactgggatgggtctggtccaggaacagtggctgctagactgccagggcttactggaggctgctttggcaaacagaggccagctagtccaggaagtctgagctggaccccagagtccagggtgcttctggagaaagccaaggcttgtcccatgtcaggaagaaacaggctagctgagcagcaaatacaaatcttgatgaagaagaaaattgagaatacagaactggcaatattattcaaggcttggagtctgaagaacaaggcaagatagtaaaaggaagcaaggcataaggtcagaatccaaagagatctgtggtgtctagaaagttgagtgtcacatgtgtaagagcaagcagttccaggctgaggctgtggacaaagctggggcttgaaggactctttgtgtatctgagcgtggtgctgrctgtggcacagggaagcctccgatgggtaaatgtggaaaatgaagaccagagaggtggagccacttgcttaaagacatgacatgtgagagtcagarctggaccccaaacctttgtcctttgccagatctttaaactgatcaaatatgacctttttatgaacctcagagaccccttactctgggatttagataaattattttccagatcctgtctctattctaattaacatccacaatttaacaacttttgtgatctctgattacacttcgagtttttgagtatcatttaaggaaagaatgtgcagggtgtaagagaggattcaggaacaaaaagtaattaaacataataagccttttgagattagccgttaatttggatgtgaaatgtaaaattgcctttaaagtaataagggataatatcaagcaattgtaatatccagcatgggaagtaacgtgctgataacaacgcacagggcaggataacacacatgtcggttccttgatttttgtggaattaatgatgttggtttcatttcactgctgatttaagatatacatttaataaatggcacattaaggcaagtatatcaaaattgcacctaaagagctgaatagtcaggaaatggcagcctcttgaatgcagtaattttaggatatcttaggtttaatgcttaatcagtagatatttacaactgtttattttaatgccttcagatggcagctcaacagaattatcagaaatactgtaagaggaccttgtgagtatgctgggataatattctggtttagtctgtagactccgtaagaaggtagaatattcttaaagaaaagccttggtttttttgtttgtttattttttgaacctgggtctctctctgttgcccaggctggagtgcagtggtgtgatctcagctctctacagccttgacctcctggctcaggtgattctcccacctcagcctcccaaatagctggaattatagccatgcatcaccacatccagctaatttttttgtatttttggtacagggttttgccatgatgcccaggctggtctcgaactcctgggctcaagcagtctgcctgcctcagcctcccaaattgttggcattacagtcatgagccacctcacctggcctgttttgtttttttaacaatatagaagagytggatattagttgtcatgctagaggagwtgcattrtttgggattcatagaagataaagtatatgataaaatgagttaagacaatttcatacccaggtttggctmaacctgtataaacttgagaaatgattgttatggagcctgcttctgacatatttattggtttcttggagaagcagtgagttgtccactttacctgacacagttttcagagggaaaaccattcattcattcctttgttcattctagttatttcatttatccattcatgagatgtttattgagcacctactatttgtcaggcactgttttgaatgttggggattcaacackaaaaagaaaaaaaatagtagtcttttgccttctacgttatggacataaagaatgctgtatgccattttttttaatgtttaaggacttgacaagatacttatgatctaagtggaaaagcagaatggaagtcagaattttcaattgtgtgtgtgtgtgtatgtgtgtgtgtttggagatgagtagaaacattatttattggagggaawtatcccaaatattaaatatgtatatctctataccttttttttatattaagcatgcattttgttttcatccttgtatttaaatttttcaaattttccacaattaatattcattgcttagcaacaaaagaaataacctagacagttactggagccaaccaacatgatgagtggagtgtttttaggaggttagccatggtacatacrcatctttgtgtaaaacagtgatttatttgaattcttagtgtatcatcctgaatttgcccttgttttaaagccaagaaatatacaccaaacaagaagccctgttgtttcgtgtatacttacctctagcaagagcaatgatttctgatgtgataaaggcatttcacaccagtgaaggattatttaaaaatagctgcttttggtaattgattattttgtgtgtgttaccctaatgatgctgtctgaaggatgaaatatcttttctacattttccaaagcagccttcagtaaccctggtgacactgggttgtcctcactggccttaattactcaatgcagaagctcctgcttccgagcctggtggcttcacccacagtgagagaagcccagctgatgaatcagcccaggagattgtactgaggtagtcatagaatttggaaaccgttaggaagctgggcaatttcattattcattcacttgaaataatcctgggactgctttcagtggcatggttccttcagcaaataaagataagccaaatccctggrcactcaaaagaaggggaagattctctaaattaattccaggctgaaataattcagcagtatttgtaatattctgtgcataaattggcaatttgctggagagatcaggaaatgataaaggctttctttcccctccccctactcatcttaacaactgctgaggcagctattgggataaaagaaatgttttatccttaataaatgtcctatcaggtaatgcactgattaaggaggtccaaacatggatggcatccttcccccttcaatgcaattatttttcatcacagagactaaaatatatcrggagtagaggatggttgtaataagatttttgacacaagaaagttttmtatgaaaaatagatacactaaccataycaagaaatatagaaataagagtgctaacttatcggactttctatttttcatttcaagggtgttttagttgttttattttgtggtggttttgaaagattgcttgtcctttactgatgatactacatcctggggatcactaaattcaaacttcgttatctctggactctctttcctccttcctaccctgtctgccactgtgtgatttgggcccttgctggggaatctttaggagggttggttcatcatactcctctccctctgcattttgagccaactgcaaatcagacacaggagccaaacagagataaaaatatatcttttgtgtctggcaaagctgggctggagcacgtgacttagatccctcccaggtctatacctggagtcctacttgagttaaaatgaggtgtgtagaactaacagtcactcagccggtaatggggatgaggacagtgctacccttccgtcctcccgtggccgcttctgttaatgcacatccataggcagagcttgccctggttggcctgacccgaatgtgccccctgcccttatgcagatcccgaagcagaagagctccactcctcccagctgttcccagcctcaaggatcagatgactcactcctcatatgggacactgcagtagggtggaatgaaagagcgatgccaacttcctattaattaaaagagggcaagggtgtctccgttgtatggactgctggcctctttctcccatcagacttgatttagcccattcatctatctgggccttggctgtctgaaatgcaaaactggtcctgccactttcctgctttgtaatctttcaggttagcatgatttttaagccccttgatctgcctaccatctgcctcccttgtttcataactgtactccagccatcccagctgtcgacagggmcttacagggagcctgttctctctcagctctgaatctttgcctgtaatacatgcccccgttttcctgggttgggtgcccttctcagtgaccaaatcatctatatttattttacatctgttgtattactgatcacagcatattttcattgttggtctatttctctgtttgtccaactagaacaagagacttcatatttggcacatagtaggtacaaattaactgtttgttgggtacataaacaaacctttttttaagaggacaataaaccttacatttaatctgtgttaaaggagatcaccaaactgattattttgtttaattttcatggaaataaactcagtgcatttacagtctccttgaaatagtcctgaggtttattgttattatcaatggaatcaaatagactcagggccctgacytcatctagacttcttcagggtaagctacgagttgctaatgcaggacttagattatagggactgggtttactgtagctgaaatttcatccacctgctacagaatcaaatgggagaatataggctgtgggccagatttgcgctgataattagtcagtgatggatgaaaaatttttaagcgcaagggaagggcaaatgaatgtatctttacattggacataaatggaatttccccattcttaaatctactcttttaagttatagaaaactcttctttgaagtcttcgattcactaatattggggtaacaatagctgtgacttatccttaaggacttaaaggaaaagcacgacagcttgaggtgtgtttcactttcatcttgccccatgaygtatgcatcaattcacaggcctgtggcctaggargtctttatggggtgtgtgtgctggggggctgtcacgacagaggtcattccctattggtgcctcagcacaccatgtgcccattccaaatcatctgatctcatagaaagttcacagttttctrtttccaaaattattgtctccaaacaaagaatgaaaacttctcccagcaggttttgtttggtgaaaaagggtttcagagactggcaaggaaaaaattccttctatttcaataagcaagttaaaagggaagatttttttttctttgctttctgttgaaactgagctgataaaagtcctgaaatgagaaaatcaagggggcagcagttataagccctgtctaatgatgtctctttttgcctcttcaagagtatgtttaagcttcttactggctgtttcagtgtactcgaggtgattggctatataatacactaaacctttcaatacttattttacaaaattattcagctctagcaggctagacaatttcataaggttggtctctaaaggagacttatctgcctataagatgaaacggtgtacatcctcaccaaaaattcttagcatttcaataagttctaaggacactcatgattaacagtaatatcaaggcaacataatgactgggttttcagaaatggccctgtaagttggcagtcccaaagccattcttcttgcagcaagacctttcacttaaaaagaaatttcacatttacacagacagttaaccatttaaactaccatattcaaggacggtcattcacattggtaaaatctggtagcatttctggtggcccagaatgacgtttggacaactacacacctcaaggtatgaaaaccatgtacaataatatatggtttctctataaatccaataataccacattttgttctttcaaacaaataatgctgtgctttcccacatayacctccatgtccctcataccaccacacatataatctatgaactctgagatagtaagaagagcatgagctttaattccagaaagatgtaagttcaaatcctggctgygaaaaatgccatctggatgacgctagtcatgtctccatggtctcagatttctcacctatataatgagaagtaaaagtagcccctctgaaaagaygacatgataatatgaatataaaggatttagtaatttatccaggtaaaatattaaaaaattatatttactaaaataataaactagtgaacagctgttgcctggtgagcaaatcttaggtgtgggcctaatattctataatgataggcaagtataaattatgaaaagctatggattcttactagagtatagggaaattaaaaattttggaaagatttgctagagttaatttattttaaatacattttattggaaggcagttttctgtgctaggcaataggaatgtctctaaagaaactaagactgcccttaaagattttataatgtgatagaggaaggaagataactrttatagcttttaatatgtttgcyggtctctgcctagactggagtacctcctcgcgtaggtacaccagtattttacttttatatattttattcctcaataattataacctgaatacatacaaagatatygaaacattagtgacataaataattatactaccagacatagacagattggcgtacagcatcctgccaactgaggtgaggaattaacatttgtgttttcatgcaaaattcccacaaaccacatggtccatggcaaggaatctgattaatctgggcaagggcactgatctggtttcagctctgctactaactagttctgtggtcttgggcaagcacttttatttctttgggatttgatttcctcctctgcagttgagttcagtatagcaaaagtttgctgaattatttgtgtgccagtcctgaattcagactttgggatttaaaggtaaataagacacagggcttgccttctaaaaccrccttttaagagggaaggtaaacctgtgtatatttataacaataaaaatgcaaaaataaaattmatgcaagcaatacatactaggatatgttttaatctgaaaacaatagattatcatagcagcataatagaagaggaaatatctgggcagaagtctgcatggagtaatagttttcagatgtacaaagctccatcagtgggattaggcagtgagtggaaagagcactagagcattctagggagaggacttgcaaaggcagaacaagtcatggygtgttcccatcaaagtgtaagtaggaccataaggttgaggctgggtgtggtggctcatgcctgtaatctcagcactttagaaggccaaggcgggtggatggcttgagctcaggagtttgagaccagccwgggcaacatggtgaaaccccatctctaccaaaaatacaaaaattagctgggrgtggtggcatgcacctggaattccagatacttgcgggactaaggtgggaagattgcttgaggctagaaggccgaggctgcagtgaactcttgtttatgccactgcactccagcctgggtgatggagtgagaccttgtctcaaaacaaataaacaaaacaacaacaaaaaacaaacaaaaatgattgatcgctttatgaggttgggggttttattcactgataaatgtccagcttctagaataaggcctgggcatgatactcaataggatggggtaaataaattgccatagtgcaaaatgtggattttttctctatacatacaagatccacatcaaaattcagttactgtgctactttgactatttgttttattaccttggctagaacgtaagttcctcactggcaaaaaaacacttggaaagccttcagtagacacttgacaattgaataattgactcaagcctgaagcactgtgtgaaacctttataggcggtctgacttggcactgcccacatctagggatcgtgaacttaatatgcctgtcttgtttgaggggcagcaaaaagcaggtggcttaactctgttaattatcctgagacctatgatagtgactaatgctgcaactgcaagggactcaactggrtctcatgaggaggaggaaaaatgctagcraaagattcattggaggttaaataacatcccatatacagtaatgagggcctgagcaaatgcagatacctgtggttaaagaaaatcacagttcctacacaactagcacaattgtgggcataggagaccttcctgcttcattattctgaggaatagcattatcagggaattgcaaagatttgagcttcaaaatcaatatgtgctgagaattacacggcaggaaatccaggaactgtaatactttgaacactgtttttgtagtcaattttcagaaagtccatgaattcaaattcaaggacatgttttcagcaccggcacttgttagctgatacagtcatatgtttgtttggtttttaaaaagtagtttagaagcatagtatatatttaatgaatatatactatyagctaaacactgttctaactatggggtggatttattgctatagattcagccctaaaggagtgtgcagttatgttagagtaattatggccactgtcataaaaatgtacagttgaccctccatatctacaggttcctcatctacaggtttggcattctcaggttcaaccaaccatggattgaaagtatttttwwaaaaaaaacaataaaaataacaaaacaacaataaaataatacagatttaaagaacaataaaatagattcactatttacatagaatttatgtcatattcattgttatargtgatctagagatgatttaaagtrtacaggaggatatgcacaggttagatgcaaatactatgccattttatgtcagggacttgagcatcctyttgttttggtatccacaagsgtcctggaactaatcccccttagataccaagtgatgactgtataatcattcaggcaaaattgaagttaatttattgctcatttgacagtactgagtaggtgaaccagttggagggtgtctcttttccaggcagtcattcaggaacaaaggccaaggaggctctgccattttctacaagtagcttccaaggttttcatggggctggtctgcattccagccaactagcagggagaatgggcataaaagagcatccatataagtggtctttatgggccaagcctaaaagttacactcatcacttctacttatattatgtgggctagaaccagtcacaaggctttcctaacaacaaggaagcctagaaaatataggctagttgtgtaccacagaggaagagctgtgcccttaggggttttagaaacatcctacagtctcttccatagcaacctactacatcagttaagtgaagttcacaattcatgaaaatacaaaatrtaggagcttatattagtctgttctcacgctgctataaagaactaaatgagagtgggtgatttatgaagaaaacaggtttaactgactcacaggtccacagacttaacaggaagcatcactgggaggactcaggaaacttacagtcatggcagaaggagaagggaaacaagcacatcttaccatggcagagcaggagggagagagaaagtgaaggaggacatatcayacactttcaaatggtcaaatcttgtgaagaactcgctatcatgagaacagcaagggtgaaatctgcccccatgatctgatcagctcccaccaggcccctctcctgacgtgtgacgattacaatttgacatgagatttgagtggagacacagagccagactatataattttgcccctagctcctcccaaatcgcatgtccttctcacatttcaaaactaatcatgccttcccagcagtctcccaaastttcttaactccaacattcacccaaaattccaagtccaaagtctcatctgagaaaagacaagtccttctgcctgtgagcctgtaaaatcaaaacaagttagttatttccaagatacaatgggggtacaggcagtgggtaaatgttcccattctaaaaggaagaaattggccagaaccaaagggctacaggccccatacaagtccaaaacccagtatgacagtcattaaatcttaaaggttcaaaataatctcctttgactccatgtctcacacctagggcacactgattcaaggagtgggctcctatggccttgggcagctctgcccctggagckctgcaggatatagcccccgaggttgctcttatgggctggcattcagtgcctgtggcttttccaggtacacatgcaasctgtcagtggatttacctttatgrggtctggaggacagtgtccctcctctcacagctccactaggcattgtctcattgaggactctgtggggtaggggggctccaaccccactttttccctctgcactaggttcttcatgagatctccgtccctgtagcagacttctacctggacatccaggcatttctatacrtcctctgaaatctatgtggaggctctcaaactgttgccttctgtgcacctgcaggctcaacaccacatggaaggtgccaaggcttggggcttgcaccctctgaagcaatagcccaagatgtaccttcatcccttttagccatgrgtggagctggagcagctgggacatagggtgccatgtcccaaggctgcacagagcagggggcagcgggtggtaggttcttgcccatgaaaccatttttctccctcaggcctctaggcctgtgatgggagaggctgctgcgaagatctctgaaataccctggagacattttccccattatcatggctgttaatacttggctcctcattacttatgcaaatttctgcagctcacttgaatttctccccagaaaatgagttttattttctaccacctagtcaggctgcaaatttaccaaatttttatgctcttcttcccttttaaatataagttcctatttcagaccatctctttcttcatgcatatgcatgtacacttttagaaacatctgggtcacctcwtgaatgctttgctgtttagaaatttctcccaccagagagtgtaaattagttcaaccattgtggaagacagtgttgtgattcctcaaggatctagaactagaaaataatatttgacccagcgatcccattactgggtatatacccaaaggattataaatcatgctactataaagacacatgcacaagtatgtttattgcggcactattcgcaatagtaaagacttggaaccaacccaaatgtccaacaatgatagactggattaagaaaatgtggcacatatacaccatggaatactatgcaatcataaaaaaggatgagttcatgtcttttgcagggacatggatgaagctggaaaccatcattctcagcaaactatcacaagggcagaaaaccaaacaccacaagttctcactcataggtgggaattgaacaatgagaacacatggacacaggaaggggaacatcatatactggggcctttcaggggatgggggcctgggggagggatarcattaggagaaatagctaatgtaagtgacgagttgatgggtgcagcaagccaacaatgcacatgtatacctatgtaacagacctgcacaatgtgcacatgtaccctagaacttaaagtataattaaaaaaatagaaatttctcccagcaggtaccctaaatcatctcactcaagttcgaaactccacagatttctagggcaggggcaaaatgccaccaatctgtgccaaagtatagcaaaagggacctttactccagttcccaataagttcttcatctccacctgagaccacctcagcctggacttcatttccatatccctatcagtattttgttcaaaaccattcaacaagtctctgggaagttccaaactttcccacatttccctgtcttcttctgagtccctcaaactgttccaacctctaccccttacccagttccaaagtcacttccacattttcaggttatcacctcctaccagtaccgtcccctgacacatggggattacaattcgacatgagatttgggtaaggacacagagttaaaccatatcagaacgctacgttagtttattgactactatatgttaagccccttgctttatgagtctacataaattatagcattttttcctccagataattttatgagttatttattattacctcattttacaaaagaagaaatggagactcagagtgtttcagaccactttttatggtgtttatttgaagccacttatagaaagttaagggaggatttgatgaagtccctgtttccctaatttgcagagtaactaatattgtttgtttacattggtcaagagtaatagtacaacaaatgctatcctgcatgtctcaagacagagttttccacctctaatcttcagctggagattatcagtccttgttcttgtctgttcctttggtgatgtgtggttctccaatagagtttatttggtgatactctaagtcatggaataaagactcattactcaatcatttatcttctcatctatccatctttcctttatcaacccatttgttcctttgttcatttattctttctttcagtaaatatttctgatatttactgtggccattaaatgtgcctaacactgtattgggtgtttggagtacaaagacagaaaagtatggtgccttgccttttgcaagctcactgtttattcggagaatcgaacatggtaaaagacaatggagatagtgtaaggctttaaaaagggcatgggacagaaaatgcaattggaataaaaaataagagagccaaatatgccagagagtagttaagagagaatacacaaaaagagaatatataggttttgggaaataaagttttcccaggttacagaaacaacaagtggaacattctggatagaggaaataacacagataaaggaaaggaggaatgtgaaagtggattatgttcaagaataatttttaaaagaatgatctagtggaaggtccctgggaggaatagcaagagatacggatgaattggttccaaatgtttacaaaaggtacacccttgaggctgatgtccttttaatttgcctccatgataactagggctcctgtgtggttgttggggttggtctatgccattggtgcaggggaagcgaccaccagcgctgcttatgtctcatggtgtaggcagtgccgggattcatctgcctccaatgaatttctctggagacccaagtgaggaaaggaaygattaaggaataaacttccagtgcattgaaaccttcctggcctagcaggcaaacatgatgtatagaatgggagtcctggaagtcagaagtgggttggatgcaagaacagagagagtgaacaagagggtagggagtccgggctgtgggtttgagcataattgactctcccctcctcattcctagcacacacacrtgcatacacacacacatgcatctcattggaagctatatggttagcttagtcaggagaagataaatgaaacagagagttgaggggcaaaaagtattgggaaaagccacagtcccataggtctgtgcatgtctgtgggagagatgcaccattaaccactaatcttctatggattttttctcaagtacatctctcagctgctttttttcgttcacagtgatttcagggaccactcataattacaccaagtgaggcagcccttaagaatgattaaaataaaaatagtcctaataaacatgtaagtattgatccatcatggctgatcaatcatatcttttccatttagctgggtagataattagtgctgttaacaggctttgtggctcacacataaactggagttaggcagtcaggggaacctcagagtatccgctttaggaccctccagtgctggtaacaacccatttcaggtcaattcaacaagtatttattgagtatctactaagtatgcaaattgtgctgccacaataacaatgatcaaaggatactgatctaaaattgcccttgaaatttttccagtcggtttattgcatttagaatagtggctctggggaatgacraatggagactgtctacaaacagttctctttaaatatgttttgaaatgcttagcgagaaagggttttggctcttttataatgaaaagcaggtttaaacattgcttaaaaaatggtcagtagattatgatatttagcatttgttagtaaatatttaggattcttaatcagaaatgacttcaaaaaatgttccaagagttgaggaaactctgttaggtagagaaaaatctatacattgtaaagttattatcaaaggattatatgcagaccaaggagttgtgtgtatgttgctggtattgttgcagatctgttcatttatttttttcctgttcgtatttctgcttttaccttgagaagtaaaaataaggaaatcagaaagacccatatgtgctaatcgaccacgtgttatgatcacctccttgagaaatgcaggcaccccatgtgtatttacctacttcccccrtgacccttcccctctggaaaagttgctttgtctctttttctctttgcccaaggaaagacctttatgaccccttagcccagagttaaaagatgaaaggcagaagaaaagcacctgaaaatgcttttgtcactaagatgctctgaatctccaaagggaaaaaaactataaagatgttttcaactcttagaaaaagttcagggtaagttgaagattattctaggaccttggagttggcttgtaaaatatgctgtgttctccaacctttaacaatttcagccataaacctataaccatttacttgtgatcccttttcatatataatatatagaaaaagtctagtctagtttctagtctaaaaccatatggttgtcatcactcaaacagactcttctatgagatgttctaagtctttaatataagattgagaaatataggaatgggggaaatgacttgactgtgactgaagtcactgacaagtagtattcataagagctgttggaaacctgggccttcctttagcttagctggcattagaatgcaagggtgttgatatgtggatggggcctagcagtagacatatgaacgataagtgtttgaagcccagcaggttagaggaattaaccccaaagcttcccttccatggaagatctcagccaagagctcagagtaagggaagtgaggtccttattccaaggacaagatctggcaaaggctagactcagaagggctagactccatatcagtgggtggcattcccattccagatgaggagcaatgtacaactgcaaaccttggtggcagtggtacagtgatatatgctgaccaaatgcactgaagagtgccaactcaattattatttcratgtccagactccactctaagcccaacagatattgagtctatagcaacgtgatcaattctaggccctatttgctaatgaggctgatggtctattttktgccctggttggtaggctttagatttgatagaatgaaacctgggtgttttatactaaggtcataatgtctcaattagaaagacactgataaggaagggacaaactgaaaaaggtcataccagcatatagcagtgtgtttctcagttttatctctgttcttctccttccctcaattacactgtatatttgtatattcacccttttggctgttatgcagcagagattagaactgtgttgactgatgggtgacaagagaaaaaagctaagttcaataatttaatacatatttatttattgagcatctaatcagtgccaaataccttactaagtactggagatactatgattaataataagacaacctctgccagatttctgcatctcatccctagttttcattcttagcatatccactctgctggtggatgcgtgtatagtgcagatacatgcaaatgtaactattgtctgttagttcatatgagcagatatgcatagctagaaaaatcccaccaggagatgcaagaaggggagaggtctgcatttatcttaaatagggctcttcccagaacaagggtaaatcccagagggaaggttaatataattaaccaagcattgatagtaagggtgtttcttatgctttaatcacatcagttgaatctgcaatagtaagctcagtttaatgactaaaattttaatttccgtagtagcatcatattcatccttcatttctcaagcccagcctcctcagctcattctagcccatgttcatcattcttgtctcttattcattaaaccatagaaatagaggcagtgttatacaatgtaagcaatattgggcatacaatcagaagacctgagtttgagtttgcatgtctctaattatttgtgactttggtcaagttaatattttctgagccttsgttatcctcatgtgtagtgtagggataataatgctggcattttagtattggtatgtctagacgtatatggatgatgatgtatggaaatttcttaatayttcagctgtttttcccaaatacctagcacagtgtatgaccactgtagatgatcagtggaggtgtgcaagaaagccattatttaatgtgtttgttttattcattccagtttgtcttttttaagtgtattattatttgttttctgaaatttgaatgtgtgttttaagtgttgccctaatcagattctcatttccttagggaagagccttttccttatgtttattttgtcctcttccttttctcttgccccaggtcttattttggtactggaggatttaggaaatgctcagcaaatagtaatatattgttccttaatgatttaatatcaccagttaataaatatgtgtcatcagtatgcataaagacattacrtctaagcttagtgtggttggaggattgcattgtgccctagacagataaaattttaaaatgaatcacagtttaattcaaataatcagagtcaaaagacaagtcagattctggagaataaaggctgtttcctttttcatctatgaattcccagggaagggactggttcgcatcagaggcactttaaaagtttcttgcctggacgggcagataaattaattagttatttgacaaatgacctgacagatagtaaaagtctttgagagtcagaaaagagagaatttatctgggaagtgcaatgttttgatttttttttaaagaggaacctaattaattgacctgggttctttcaggatgaaataatcttttgggtaaataaaaagaaaaataaagagaagacagttctctaggcagggaaaacagaacaggtgaaactctggaagtggaaaggtcttattgttttgaggacagatggagaggcctcttgctgaaacagtgtggaatgtgaaaggccggctataggtctggaagataggcaygtgggaccacactccccattgcctaaatcagctagatattgtttatttatatatccatggtcatatgccatttgccaggccccattctaggcacaggagatactgcagtgaacaagagatgcatcttctttgtccacatgaagcttacattctagtggggaagatgagcactaaccagtaaaacaaattaatgacatgattactgtgtacagcagtaagtgctgggaagacaataatacagtgatgggataaaagatgactgtggcaaatggtggattcttttagatggacgagacaggacaggcatttctggagagatgacttctgagtggacatttgaatgacaacaaggggcctgataggtaaagatctgggtggaagtctatgtgggccaaaagactggctgtgctcaagggtcacaagggcartgagcttaatgggcttgaccaacagcaagagtgtgtcctggacttctgtaaaagacagagtttccaaaccaaaactggggacatgaagtcaaaagaagtattttcttctatgattggtaaatagatttacagaaaaaaaatcttattgggccataaaaaattatattcgggactcacctttatagctaagaaaaccatttcaagttaggkgtgtgtgtgtgtgtgtgtgtgtgtgtgtgtgtgtgtgtakgtgtgtgtgtgtgtgcgcrtgtgcacaygcctgccagtgtgtgtatgtgtgtattattttttcttctctccccttatttctgcccagtactatagaactatttccagtcattgtacatggattgttgttcacttatatttcttcctagagctttaactgacagtgaagtgcagrtgccctggaggaagggattaactagggcttaatctgaagctcctcttaggatgcaggaaggacttctggaggaggctgtgataccaagaggattgatacccaggaaagaacataggtgacctcattcatcaagctcgtgcttcatcacargacsttactgacttcatccctaaaaactctccaatagaagtgagcaagagagcgaatcttcatcagacggacagatagcagcatctaaatatagagtttgctattgtctttgtatggatgacctcataagttctttctgttccctgtatcctctggctctttctcctaggttgctgtggcacaggtgcatggctgtaagcctcttgctacattcctctaagctggtgattctcagggtatcataactagagggcttgccacaaaagagttctggctccatcccagagtttctcattcaggaggtctcaggcagggcacagaattctcattcctaacaccttccaggggatgctgatactgctggcccaaggaccacactcagaaccactgctcgaagccacagccttggtttcgtggtctaggaacacatctccttgttctaaaaccccttttggttcctaaagaccacagagccaaggctaacctccacccagtattcagcaccactcaccctgtcaggcctggacttgtcttgtgtcccctgctgcttggttccccatcttcttgcccctaccattcaccaccaatttgtcttttctcgttctttgcctgaactaccttcctctccattaattktatgtccatatccaatgcactcttcaagatctatgtgtaattcatcatccctttgccccaaagcattttccttacacagaataggtggctttttaaataaatgtggttttcaagtgcaaacctctcagaatctttgtatttttgaacaatttgagtaatctctctgagcctttactttctcttctagaaagtgggaatgatgttttgaaacttacaaggctattgatgggctcaaacccatcagtgcatgagcaaatgtttcataaaccatgaagtgatattaaacagtagttagttaggttattgtattttcgcttagagtatttcttgtagtccaggatattagaaaaatatataatgaatgcctttgcttagctagttggcagtagaaaatgggagtgacattctgagagagaaaggaaatctatttcagagctctgatactgaaaagaagtaaacaaattcttttggatgaatgataaaggtagcagggataatttattttcctatctggcttacctccaggctattaaaaaagtctaggaagtggtttgtgtttaattgtaaagcttccctaagaaaagatgaattgtctccccatggggacaggttgtcttttatctggacagtgcctgcttcatcccaacaaatgtacctcatgttaggtcccatgctgggcacattgggcttattcagatagaaaagtcacagtcctgccctcaaacatttcaaatcatgtcagaattactcctaaatgaaacaatctctctcgtcttcaaagagtggcagmccggagcatttgggaggagaaaatggggacagaaacctctgggggaaattttagctctgttctctccagtacagcagctacagcagtagtagcactactactatttagatgtamatttaaattaaaaatacagttattcagttgtgcttgccacattttaactgcttaaaatttacatgtggccaatggctaccatatcagcacagaatatttccctcacgatggagtcctatggggcagccctgtgactctgcctcctccgcattctctcgtaagacctaagggcctggcagggccagtgacctcagtctcccaccagctctctgccccttcagtttgacttgctctaccatggcatcagagtgatgtttcagagtgatgtgttctactctcatatatcaagatttctcattctacatgaaaatcagttgttggcttcctctgcccatgagaagaaaagataagctctgtagcatgacgtaaaaaggcattgttgatttgtttctcctgtgtcatccctgtcccatgtcccattaatgttactggtatactgaattcaccatttttcagtcatgccttgaagttcgttcttctagcccattgcctagaatgtaaccccctccctccttttcacgttctttgtgcttgtccttcaaggccccagttaaatgtctgctacaagttggccccttcttttctgtgctcctgtaactctcctgtagcgcttttcaggtccggccgaagtgatcttcatctttacatgtttcttcccctactcaactgtgagcttgtggtcttgcccaagtttgtgggttagtcacatttgaatcccctgcttctgacaaaggaggaagttgaaagttacatgttaaataaacagatcctgcaccaaggaataaattggtatgcaggtagtgaatgaatgatgaacaaactatctccctaggccaaatgaggattaatgaactccgtaaaagcctttgggtacccagtccaattctgctctcgtcttctttctgtaaaactctgggtgatcactcagcatccagagccaaatacctttgaactcaagatgttaaactagatatcagggtaccacccccaagtatgagttaatcattttaggaataacgtaggtcaggagataaagagactgctgctttcaatttcaaccgatattgctgacaggctctgtgtatgctcctaatggagtggaccataaattctgagctatgcagactgcagcaaggtgggatgctcacattgtgatgcgtctacattattcttcaagtttaatgttaaggagattaaaatgcaagcgattcctttgtgcctactgtggtagatgcaacagatgtgattcaaccatatgcaggaagcttgtttttttttttyttttttaaagttttgaatggaaaacatgggactagagacagagacagatttagattcaagctttgtctctgttctcacttaaccagggacactgagtaagttacttgaaccttaagttatctgtaaaattcaagtaataataattcttatctacctctccacccaccatggataatgtgatgcttgacagagctgctacacaatcatttaaatcgtaatcactccagaggaaaaggagctaatatatatcaggcatctatgaaccaggccctgtgctaggcccattaggtacattatctcatttaatccacatcgcaatcttcaataggcaaatgttgtcattactacaaataacatctcttgtgtcagacctattagtttctgtgtacctactatgtatcagacataaattctctaaactaggtaataatgtcccttattttaattttgatgatagagagatctgagaggttaaatcacttgcctagaagcacacagagaataagtggcaaagtgggagtccaaccgaaattcagagactcctctcacttactttgttggacataactctgtgttaggcaaaactttccaaatggcccccaaatggtatttccctctgatccctgaaatctgtgaatatgatgagtgatcacgttatgttacagggcaaagtttaccttaaaatagggagactatccaggtggtcttaatctaatcacgyargtccttcaaagcagaaatgtctctgtccgatgatataagaggacgtcagagacattcaaagcaagagaaagattcaatgtgctgttgctggtttgaagatggagggagtcactttagaaaaaataggctgagcccccagcacatagtcagcaaggaatggggacctcagtcctatagctcagtcctacagctacaagaaactgaattctgccaatagcctggatgaacttaaaaatgggttctttatcagagcctccaggtaagagctagcctggtcaataccttgattttggcctagtgagaccctgagcatagaaccttgttgagcctgcctggacttttgacctacagagctatgaaacaataaatgggtgttaaactaccaaatctgtggtgactggttacatggcagcaggaaactaatacaaatgctttatattagtttatattagttattaataatagcagttacctgatmgggttattttatggaaaaaattaaaaacaaaaaaaactaaagcactcaatacaattattgacacctaaaaaatagtatcttttatttttatcaccatactcactttataaatatggaaattaaggctccaaaaggttaaataacatgcccaaggccacagaaccactgagagtcagggtgggaatattcatgaattcaccttggaattatctgtggaacttactaaaatagggattttcatgtcctgaccataatcwttatgattyaaattcttgggtaactatattttttaaagcctcatgaatgcttttaaagtacactcgtgtagtattaccacactagactgtgaactccttgagtckggccattcttaatcatatttgtacaagcaatagtacctggttcttgtgtatactctctgcatgttcactgaatgaaacaacattgaacagtattctttctgtagtttttaaaaataatatccttccaatggattgcacaacaccattaaccttggagtggttgttagttaatatggttttctacctctcttctaaattgacccgttttggcakctggcaatgtaagccctacattcatgataactgacagctttcagtttatgaatcagctcccagtgccctacctccccactcacctccaagtatatagtttctctttmctttctcagtttgcagaggaagccgtaccactcacctggcagcaggtttatttttttatttttattttttttgagacagaggctcgctctgtcgcccaggctggagtgcagtggcacgatctcggctcactgaaacttccgcctcccaggttcaagcaattcccctgcctcagcctcctgagtagctgggattacaggtgcccgccaccacgcctagctaatatttgtatttttagtagagacggggtttcaccatgttggtcaggccggtctcgaacccctgacctcgtgatccacctgcctcgggctcccaaagtgctgggattacaggtgtgagccaccgcacctggcctgcagcaggtttaaaataagtttgttaagaatcggagcaaagcaaaaaattagccaggcgtaatggcgggcgcctgtagtcccagctacttgggaggctgaggcaggagaatggcgtgaacccgggaggcggagcttgcagtgagccgagatcccgccactgcactccagcctgggcgacagagcgagactccgtctcaaaaaaaaaaaaaaaaaaaaaaaaagaatcggagcaaagcttgaagckgcattgctgagatgggtgaatccttcctgaaaggacagagctgctggaggaaggcagataaaaagcagtgaattccaagtgggatcccaacttggaagcgtggcacttggttttcctttttagtcttagcagtggatgccagagtctttccggttttcctactcagctttatttttwaaaacagtttccctttctcaggacagcctacacagttctactaataacatatcatgcaatgaaaaccttcaaggagggaaaggaaggtgactgaagttcctcataaggatcagctgcctgctgaacattttactggacatggtcataccaatgacaatcccattctaaaaaatttatatggcacttgctgtctttccaaagaaattttactacactgtcaaattagtttccattgcttgtggtggagctgctgacaatggaattgaggtctaaaagtctccattccccaaatgccaggccttttgaaatgtctctgctttcatggtgcctaataaatgtcagctcacatgttgctcttcagatgggcgccatctggtgtattggaaagagctttggattgagagatgggagggaaattaccatttactagctgtttgacttctgggtctcggttttctccctaaaactgggaagagtgcatttaaataatctctaagatacatttagtctgttagagctcaaaagtgtgttagagaacgtaagtttcatgaggcaggaggaaccatctctcttgctcatttttgtattcccgttgtctagcagaatatcctkcaggtagtagttgcatagtaaatatatgttgaataaatgactgattgaatgaataaatacatgaatatctatgaagctaatacagaaatcatcmccatgtattactgactttcctgtctatttcaatgaggttcgtgcaaaaaaaaaaaaaaaaaaaaagtggccactgcctttgagaagtggtatggtggtgcaggaataataatgggtttattgctcttggccttgtcagagccctagacaattagtctccttattggtcttgcatgtcatataaaaacctaaagtataggccattccctgaatcacatgtcttaatagggcatgggcggcagtggccacgaaaggtgggaagagagcctagaacccagaggcttacctgaagcctcaggtttaagctaccaagagttgaaatctggggaggtcagcccaggcagagtagagaggctgcacaggtctccacaaatggagtacagagtcactaagtctgaccctcaggggaagcagcaaaaagatagcgggctagaaatctgatatcagaaaagaggctggatgagtcagaaacagatatgcttcacttctagagtcccatgcttgagggtctttatcctaaaagtacctatttgcctgccctttccccaaatatacttccttctgcacattgggtgacacagattagtagagagaaaaaaggttttagaattaaaagaaagtgaacttgaaagctgataccatcacttactacttctatacttttgaaggatgatttatctctaagtaacagtttctccatctttaatatgcagttaataatagtcccttcttcatagtgttctgaggactggatcaggtgatatatgtaaagcgcttagctctgtgtctggcatacagcatgtaatcagtaagcacttgttttcttttctctttttcattcctactcattcattaaatattcattgaacacccagagtttgataggtactgtatttgatagagggtgtacagacatgaaagagacggtctcatgaagctcagagtggaatggaagaagtagataygtagcagatgaaaaaccagtaagtaacaatacagtatagttatatctgtattagaaatataaatgtattaactatggatacccagaagaagaaattcccagccttgtcttggagagtgagaaggtattcagtgtactgtagctcaagtattttgaagatacttatgctcaatctaatttkgggaaagaatgttctctaatattttgtatatgtgggcttcgcttttataattttttaattttacattttagatatagaaatcaggaatgcttggttgatgatctattgaaaatagcaacaaggttgcctatatatcaattgtgtgtcagctgatggtaataatatctaacatttattgcaactattaataatactaataattattaattcatcttcaatatgtgacaagcatttttctactcacttttgttcattatctcagttaatcctccccagattctcataacatagatacttgtgttattcctagtttacaatgtaggaaactggaatttggagaagttaagtgacttcacgaagttaccagttaataatttgcagtagcaaaataatagttaataatttattatatatttcaaaatagctagaagagaagaattgtaatgttccaaacacaaagataaatatttgaggtgatatatattccagtttccctgatttgatcattacacattwtatatatgtgtcaaaatatcacwtgtaccctcaaaatatgtaaagctatgacatatcaataaaaaatacaaagaaaatcacaaagttgtgacatgaaccgtggtttgtctggcttcaaagctcatgtttaygttcacttcagaaatctttttttagtaaagagaaatagcatgtttgggtttgttaacagcaaatccaaaatagaaaatgagaaattatgtttgtttgttactatataaccacttaattttagtaattctatttccttatcataatgacattttttttgaaaatctgataagtacgtttgatagcttgtcatttaattcatttaacatctttagcagctgttttkttttttttttttttctctgaaggggtggtagttgtaatcttcagggaaaatttttcttttttgcacatcgccaatgttgaaagcaaaacaaatggttaaagcaatctctgaatggtagcttacacaatttcagagtagttgttagcttgcataagaagtcagaatgagagttaaagagctcaattttaacttgctagagaaatcatctgtaatcacaagaaagactatgtgggtgttcattgagttcagaactgaaatttgaaaggctatgcaatcaccatatatttttcatgggttctgaaggagaaatatatgcttcaataaacaagtcttgattacaaagaccaaataaggaagctgagaactccattactcttcaacagtagccagtatcttgcatatttccctactgttgattggggagatggacttaggaaatcatgtcagaaaccctcatttcagacagaggtcaactgagagacttttctttaacatgaggtgacctcacatgggaaacaggcaaattcaactcttccaacaatgaaagtaacaatgtgtttccttttgcttggaagcagaaatataattttgggacaattcaaatggccatatagtyctacagatggccaccagaatgttgaaaaagtctcacttgcaaaccagtaaaatcattctgatgttttattgttgctttttaattataaataattcaagcatacagatgattatagagaataatacgataaacatcagtacagtcactatccagttttggcaaagcttgaaattttaccttatttgcttcagattttttttttctttaataagtaaaatattataggccgggcgcagtggctcacgtctgtaatcccagccttttgggargctgaggcaggcagattgcttgagcccaggagtttgagaccagcctgagcaacatagtaaaatgccacttcaacaaaatacaaaacaattagctgggcatagtggtgcacacctatagtcccagctactctggcggctgagatgggaggatagcttgagccctgggaggtcgaggttgcagtgagccacgatcatatcattgcactccagcctgcatgacacagtgagagcctgtttaaaaaaaaaaaaaaaagaagaagaagtgaaaaatattacagacaccagtaaagccctctgtagttctacttttgtttaagtggaaaacagtattttgagttttgtgtttaatgtttctaagagggtttctaaaaaacttttattgcatattatgtacctaaaatgaaatgtactttaggtgataagtattttggaactttataaaaatggattcacactgaacatagacatatctttctactttttggctcaacattttctgtgagatttattcatgctgatataagtagttccattcatgttgatgtaagtagtttattcaactgctatatagaattctattaaatgaatataactattttatctaccgagtcttctgtttacgagactttaggtagtttacaatatggggcttttaaaaaaaactttaataactattctatcctttggcctcatgtgagaggatattacaaggtgaatatctagtaacagattgctggatcttactatgtatatgcatcttcagttttactagatattgccaaattatattttaaagtggattttccaatccatataacccaccagcagggtatgagtgtttcctacgctccatgtaaaaagcaataattaaatcatttagtattgtcacacattttagtttttgccaaactgatgggtaaagaatgattcctcatctttgttttaatttgcatttccctgaatacatctgaggttaggttattttcatgtttattggtcattcaggttttctcttctaaattttatctttatatctttcatcctatatttgcattctttttcttactgatgtgtttttttgagtgtattctatatacacatatttttggtaccatcataaattttgtcgttgcaaatgaaatcatagattcagtgcaatccaggtcaaaattctaacgtgtgtgggtgtgtttgtgtgtataacttgacagattataaaatggataccaaagtgcaggcatccaagaatagtgaagactatttcaaaggagaacaaagttgcagatatcatatgcccagatattaaggcttattgagcaggtactgtgttccaggccctattataggcacttcagtctgttgatagaggaaaaggttaatgtatggtgaaatgtttgaagcattccctttgatgcctcaggaacaacaactatggctgcatctatttcaggttacacggcagaccataactaatgcctctaacttaaccattcaccattagatatgtttactccttccactcgcccataagttattcccctaagttatgccctcttgctcttgcttcagtgcatcaggaagatcctgcctattggctgggcacagtggctcacgcctgtaaccctagcactttgggaggacgaggcaggaggatagcttgagtccaggagttcaagatcagcctggcaacatggtgaaaccccatctctacaaaaaaatacaaaaattagctcagtgtaatggtgcacacctgtagtcccagttactagggacgctgaagtggaaggctcgcttgagcctgggaggtggaggttgcagtgaaccgagatcatgccactgccctccagcctgggtgacagagggagactcttatttcaacaaaaccaaaacacacacacacacacacacacacacacacacacacacacacacaaaagaaaaaaaatcctgcctccacttctttccctagtcattctctgttgctccttatctatttacccagctttattactctttaaagcttaacacatggacattatctattttgttttactgtgtctctctctctcattagactataagctctgtaatgatagtctttagtcttcattgctggatccccagtcctagaatactgccaggcatagaacagattctcaaacaatatttgttgaatgaattcatgaattgagtctatacttttaaaatcttgtcagggtgaagtartatatttcaattccactaaggcttaggatacaaatgtttcctggattgattgattgattatttgatcactgtcacccatgctggagtgcagtggtgcaatcacagctcactgcagacttgacctcctgggctcaagtgatcctcccccctttgcctccaagtagctgggactacaggcacatgctactacacatggcaattttttttttttttgagagatggtgtctcactatgttgcccaggctagtcttgaactcctgggctcaagaaatcctcctgccacagcctcccaaagtgctgggtttacaggcataagccactgcaccaggcccatttattggatttaaagaatgaaatggtttcatggcaggatgggtgataatttagagtatgggctttggattcaaatggcgtcaggtttaaatcttaaatcatccttgttccactgctgattactaattaccacttcttgagggtatgactgtttacttaacctttctcagcctgtttcctcacttctaaacactgatatatatatatatatatatatwtttttttttttaaccacttttgagtgacaggatctgacttgctttttgaagggctcactcttgtttttaggttgaagatcacttattgggaagggaatgcaaatagaaaatactgaagatgcaaatggctcagaccaaagaggaagtggtggaggggctgagaagcatcagattctgcctagattttaaagatagagyctatggagcttagcaggagtttggatttggcatatgagagaacagtgattgagaatgtctccaagggcttggggctgagaaactgggaaggatggagttgccactaactgaaatgagaaacgtggaaggaagagaaaattgggaggatgttagtttgggcattaagtttgacagatgaattagacgcccaagcataattgtccagtagacagttcaataaaggaatctagaattcaggggagaggtctctgctagcgataagcatttaagagattacatcatgtagatggtattaaagcccattagaatggatgatgtacttaaatattgagcttgggaagagaagagaagaactttgagatctgagttttgagggatctcaacatttagatgaagaggaaccagtgaaagggactgagaaggagtgagcattgagggagaagaagtctaggagaatgagaggccaagaggagaggtgtttcaaggaggcaggagtgattggctgcacccattgttgtgggaatgtcaaataagatgacaaccagaatggaacaatattaggtgatatgtaaatttttttacattattattaaaagttaatgatgtagtagagcttgactcagcaaacttctgaaaaaccattttataaaaaaaacaaaaacaaaaacatcactacctccatggtaatgtctaaaatgttaatgccccatgcttttcatagagggttgatttacagctagacacacttgaattaactatcaattagctttgctttttaggaatgtatctctatcactctgtctgtacagtaatacattgcaatcttgtatcatacccattatgactttatattgaatttatctgttgtcatctcttaccgtacaccgtgagcttcttgagagcagggactgtggctgctatcctcaaaaaagctgtattgagcagaactgaagtcagataggcctggttgtgatgtatkctgtgtctttggtggcatgggtgggtggtgaaaggtggaatttgtgatyacatttcagtaccaattcttcagcaccgttctctgacactactgaattgtgtccttcaattcagttcaattcagtctagtccaattcagtccaatctgacattacacaggttaagcacagaccccacaacttaaggatttagttctacaagactgtccccactccagaccccagtgacaagtcttgtgtatcacaaaactacctgcacttctacccagctgactacaaatttgtgagttcccatgaccccattctgattgtagaattccctggaatgactcacagaactcaggaaagtgccacacttagattgtggttccttttatcacaaaggatacaaatgaacagcccaggaaaagatacacagagtggcaagatcttgggtgggtgggccacagtagcctcttctgtccctaggtgtccttgatatgttaaccatccaagaagctcctgkaacctcattgtcctgagtttttttaatacaagagatttgtttgtttgtttttgttttaatgtaggcccactgattaaatcttttgaccacatgattgaactgaatctcctcagaggtctgggggcctggctgaaagttccaatcctttaatcacagggttggtctttctggtaaccagctcccatcctgaagctctctcagggccctgccaagagtcacttcattagcgtaacaaagacactcctatcaatgggggaatcccaagagatttggaagctctatgccaggaacaagggacaaaaatcaaatttcttaaaattatgccacagtgrttacgttaaccaggatgaagggaaataattgagctccagaccttccccaaagggagatgctgttcagaggaacacagaaactttgatatgacccatcctggcattgactcaaagtagccttggctgttggatggggcatgggaaagaacagactggttagagagcagcatcttggctcagtcaggatggttcttcctcttgaagaaagccttctaccaatgctaaaagtgggatgagagataggctgatcctattctctagacagaggggttsatgcgttgtatctggtgggctacagtcaaggatggccataattccatcagaactcaggtggtgatcaggggagacattgggtgagattaaggaaaatgagattaattaagggctcaaatcatggcctactgtaccaggttctttacacataaccacaacagtcctttgaggtagtgattcggttttcacccacatatgcttgttgagccactgttgtgttccatacactatattaggcactgagaataagcctgtgagtaagcctgmtatggtgcctgccagttaaggagctcttagtctacttgaggataattacaaactagcaatagcagtgtaaagttctaagtgcaaggcagggtgttttggaagggcaacaaaggaatcrgagggggagtacctcacataaaatcatttagctagtaagggctggayccaggaattgaacccagttttttctgactccaaagccagttttccccatgatatcacactgtccagcctgcagaagcaaggtgtcaggaaggagagaggctgtgtagcacagctcaccatcccctgaggctgtggcagcaggaccagctcaggccctgcccattggtgggtcatgattggcatattgaccacctgagtttgggggtgtttattgaagggttcctatgttggctgccaagtagggctgctgtctgcgaatccactaaagatgtttcgggttggttctgccatactgcaaggtgttcgtacagcatcttcctgcttccacctagtgcctgcccagggatcatatccttgtttgggcgtggcttccatccactcagttaaaaagaactgctgtctctttctacttaatgatgtacgtagctctgctgagcatagggaccagagacacggctgcagtctggtcactggtagttcaaaggggaggtggcagacatgaaatgacagcaggattctctcagtttctaagccagcgaggtaagttttcaactctagaactctagaagggaggacttgggctgcatacccctggaccaaagttgtggaccaaagcattcccattgccacacaaagcaccctcttcttttaaaaataaaatagatgtgctacgcttctggaaagctccactttcytgaatgatgttaattcccctcagtttcttggtccctcccctctcctggttttctaamaaatgaccrcattgatcatacatctgaatagcacttgcctttggtttctgaagaactgaaggaggagaggcattttggcggcaaaaggaagttatgaaagagccctacatgtcagctggtggagatcttctgcaggagcattcagagaaaggacaggagaagtgtcagcctgctggaaggaactctgcagggctcaatggggaagccaggcaaggtgccctaatgacccaggaggcgtgtgatgtggtgcagctgtttccagattcagtgtgttacaattcactggtattaatgataaagtatgaacaagtgcaaattatttactttgtaagaaaagttaaactggatataggattattcctatcataactcccatgaagacatgattccttcatttcgtaaatgggggaaataaggaatggagttacaaccaacatgcacaattgagcacaattatacctatccctatgacaatgggtctcgtgtatgtatgttttctccatgtgagtctatagaaagacagtatgtgaacctgtactgtagtgaatcaggtccagattccctggcrttgtgaacaaggcccagcctggctcaccctctctgggtgtatccattacaagagctttctccccatttctccctaagcatgctggccactaaactggcagtgccccaagcctactcagctcatctacttctgaactgtgttactcaaagctccttccaccccagccccctgttctcttggagtcctgagctcagctgagcctccctggaagctgtctcaacagccatctccctgacttattattgctcccatgtttcctctataacaacacttaggacttctatattgtccaccacactaaagcacctcaggataggaccagaagtttctgtcattgtatttctgtaaatgtattttctgttcatgtattttgaaggagcaaggaaggaaggaaaggaaaaaggaaagaaagactaaaggacagactatgcccttgggttccattgtagcttttctgtagcttgacctcaagcaagtttctttacctctcgaccctttgtttcttctgctagaaaagaaaaaaaaggaacaataacaacaataataatatttttctcactgaatttttgcaaagatctaatgagaaaatatttgtaaagggcgtaacagtgcctggcccttggaaagcagtaaataaatgctagtttctggccagtttctcctaaatggttactttgggcaaataaaaataaaaagtaacacatgaaaagaaccagggacaataatctataaagcaaaaaaaaaaaaatgacatttaactactggccattttaggatagaacatttctgttatttaaatatgaagcagagggtaatgttgcagttaggagatgtcttggggcattttgcaataggaacagaaaaaatggatattttttgtttacccttctctgagaaaatgaaccacaaatgtctgtctttctcaaggccaaagtagggagagtgtgactgctgaaagtacagactgagtatcctcatgatgttattctcaaaggccttactaattcaggagggaaggacacaggaattatggtctctagaagtcatgcatccaagccccatatgtgctaggcagttcaattccagagtatcatagttttgtgaaaatagtattttgtaacgttttgtgaaaatagatttgggtaaaagaaatgtcgctatcaggtgaccttaagcatgtctttttttttttttgtaatgccacatatggtcataccgtgttagccttttttwaaattattattatactttaagttctagggtacatgtgcacaaygtgcaagtttgttacatatgtatacatgtgccaagttggtgtgctgcacccattaactcgtcatttacattaggtatatctcctaatgctatccctcccccatccccccaccccacaataggccccagtgtgtgatgttccccttcctgtgtccaagtgttctcactgttcaattcccacctatgagtgagaacaggtggtgtttgaatttttgtccctgcaatagtttgctgagagtgatggtttccagcttcatccatgtctctacaaaggacatgaactcatccttttttatggctgcatagtattccatggtatatatgtgccacattttcttaatccagtctatcactgatggacatttgggttggttccaagtctttactattgtgaatagtgccacaataaacatacgtgtgcatgtgtctttatagcagcatgatttataatcctttgggtatatacccagtaatgggatggctgggtcaaatggyatttctagttctagatccttgaggaatcgccacactgtcttccacgatggttgaaccagtttacagtcccaccaacagttttgttcttatttctccacatcctctccagcacctgttgtttcctgactttttaatgatcgccattctaactggtgtgagatggtatctcattgtggttttgatttgcatttctctgacgatcagtgatgatgagcattttctcatgtgtctgttggctgcataaatgtcttcttttgagaagtgtctgttcatatcctttgcccactttttgatggggagcatgtgttataacttctctaaggctctgtttccctggttgtacaatggatatgctaataatrcctgctattagaagactgataaaaggaccacaggttatgatggataggaagtcttatgtgaaatctgcaagtagtactaatgttaattatggttatggttgttaccawccaggtctccatttcaaacctcaccccaccaagccctcctgggaattgttttacattgcatgatgaaacgatgcagctgaatgattttagctcagagcayactctctatgggtatgttccactagtgtccttggaaagatcctcctggctttccagacagattatagcaagatgaccaccagccaaatgaacccctcaaaggacttttgaaactgcaaagcctaccatgtcacattcttcccagtgcttttggggcctgaaaaacataaattattactgacagccttgaatcagggccagtacagttcaccctggagcatttattctttacatttatgtgcagacaaccattctaggccttgtgagatcttccctcaagaagcttgtagtctaatgtattagttagctactgctgtatagctaattaccacagacttagtggctttaaacagcacacatttattatctgacagtttccatgggtcaggggtctcggcccagctttgcagggtcctctgctcaggggtctctcaatgctgcctttctttcmggattctgggctgtgttcattttgtggagcttgggatcctcttccaagtgcatatggttgctggcagaatttagttcttgtggttgcaggactgaggtccctgttttcttgctgactaccatccagggcttgaactgagctcctagaagtccccaaattctctgccacagggtcccctcacacaccttctcacaaggcaccttcagtaggagaatctgtcactgcagtctgctaaaatggagtcttatataatttatgtaatcctggaggtgaccatccaccatttttgctgatttctattaactacaagtgagtgtcaggttcccctagccctcaagggtgtggctcagtgggatcaccttagggtggatctgccacatatggtatgggagagggattctaaataaatagatttgaaagcaccaatttgcctaacctgaactggtctcatttgaaatgagagaaataagagcaatatcatggcttctaaagccatactgattgaatggaaaggctatcttttattctgagattttccttctggagtgtttatgtgtgtgtgtgtgtgtgtgtgtgtgtgtgttgaaatgcctctttttagatgaaatgactgtgatagtagataatattttaaaaactattcttgattagtaaaatataaaggtagcaaccctataatggtcactgtaaggtatttatttttaatttcactaattcataaaaatccaaactgtataactactaaggtattggctcccaatctactttagaaacagagactatcctctatccatgcgatagaaaaaggaatgtttagtgtggtttgcttagattatttacagatcaagaatgtttttgttaggcctttacccagcttccaaagctttatcttccccctgtataattccagaccagagcaggatgttctgctgtggctagataagcccctcccctcaccgctgctggccgtcctcatcttgacagagagaaataggtctaaggccctgcatcctttatctcaccaaagctgctttatccaagctgccctttctcatctgccacctacttttgcacccagctctcttgaggacacttagttacttttttttctagtcactgtgaacacagaacaggctatggaatgtgctaaaatatggattatgggagcatttatatatgctctgtcaccctggttcatgatcatggctcattgcagcctagacctcccacgctcaagcgatccttccacctcagctttctgagtagctgctgcatcatcaccgcacctggctaatttttttctgtttttttttttttttttttagagatgggggtctcactatgttgctcaggttggcctcaaactcctgagcccaagtgatcctcctacctcagcttcccaaagtttgggattgcagatgcgagccaccaaaccctgctctggttatgamagctttaggaaagaaaagataattctgcccaggatgttaaacaaagattatttataagagatgttgtttgaactgggccttaaggtgggattttgagaggccagtatactgaagatgttgtggatagataaatgctttaaacaagaggacacacagccagggaatgctttccctttcctcggtgcctttgcatgtgctgtgtcttctgccttccacggctttcccaacctcgtccggttggtagataccatagttaactttcaaggcacaactcagacggctcttcaaggaattcttctctgcattcctacagcatggtataatgcagtattttggtacttgtcacgtttccataattatgggtctccctcattagactgtgagttcctggaggccactgattactgtttgtgtttttttccttgggacctagtagtatctgacacctgtatccttgtttggatgaatgaaaatgaatgaacggtgattacgcccctgcagcttgagtagaaggtatatagggaggtgtagctggatagtggggtggggtggggggattggtaggtgtgatcagatcttagagtttaaatgcaagttcaataatttattcttcagattgatgggtcagtggatatccctgaatragacagtgtcaccatcagaactatgaattagggtgaacagttttatcaggaaaataaaaaatgactattggctttagtgcattctgtggccctgtggttccagtcacctagactggaggttttgccaaataactcttgagattttggtcaccttgctccatttacatggactttttgtgtaaaagatagggatgtgtttcagtgataagcttctctttttttcagagtatttatttgtgttcgttttcttttttggcttcctctagttggagactatgataacacaaattggaggtagctcaatgtcatttttggaccgataaggacatataattcaggtccttcaccttgcccaattcattctagcaagctgactttccctcaggccccataaggctgaccaagcaatagaaaagaccagactttataatacactttgatgcagaacttaaagaacatatttttaatttaaatatccttatcttcaaagagtttgaagaagttgattaagatactaagccatttaagcactgtgatagagataataggtatttcaggaggaaactaagagtgatcccatcscttctgaaagataatttattttcttaggcagttctttcaatatcgttatctgtgccatcctgagaaggccagttttrtaggtcatgaaactaagcaaaatcacccaggaggtaagaccctgcaggtgattggatggaaaactcaccataatatcaggacatgaagtccctggatggcccagtaaatagctgttgaatgaataaaatttacacagcctgaaattctactagagcctctctagaaaggaagtcagaaaaagcactggttttagaatgaggagaacctgagtagaaatcccagtcctgccttacgtcaagtagtgtaggtctatgggcagtttctagaatcttgctgcttccaagttctgttgtctgtaaaaatgacaataaaatatcttgcaaggttaccttgcaaggaaatttatttaaatgtaccttttcaactacaaagtggcatataaataaaagggatgattgtaaatatagtgactgtgattatcttgtactttattataggtctctctgagtatgcgttttcttctaaactagattacagtctccttaaggacatggacctggcttgcctcaacccacagtgacaatcttatttagagccaaaactggcaacctctcatttgataatracaagttttacttatagggaaactaaagggaatgtttgaaaatgacatcatcttggatatccagggtatacctataacttttcccgtactttataggacctgggataatgccacaaacttaatgagtatcagtggaattatacttctttatgattatataaaggagttactttaattgactacctgttgtgctaaaggtaccctgctggaagccatatgtgcacttacccttatagcaattccagagaggcacattcacyccaccttataggtaaggaggccgaaaggatcagataaggtaagtaaccttcctaaggctacacagctaataaactgaagaataaaatctaagwccacatactagatttttaaaggccatgatttgtcactgagtagcaacttaagtggtcccaacacacccatgcaaaccacagtattaatgtgtagaaagcaaagagcaagccaaagacatctatttccagaattaattctgattagttccttcctgtctgcctgctttggtctgattcatctggtcctccaatcagttggggcctactcttcagatcccagtggggtctcccacggagtcctttatgcacatgctgatcacaaagaggaggctgtgtccccccaggccctttcacacacagctactagtgtaagcttggccttttccaaataggggctttcagaaatgcatggacattccatagcaccagtctgaattcatgtcgaaggaaaaaagtggataagaaaccaagtgcctgcctaagtctagttggggaggaataaaggagatggagggaggcaattttttactttcagtgatcactgtgtttccattcgaagtgggatgaccttctaagaaaggttatagaatcattattaaagatcgtcagagctgactagacactggattaatggggatttggtagatttctataaagagcgcttgaacacaaaattcacggtccaacacaaagacgtttttttcaaactcaaagactgtgtgctcagaaagtttctggttgcagggagttaatataggacataattcagggtgcagaattttcagatgaagctatcaaggctaaggctggcattcttgagtggcactttgtttcctcttctcccatgttctgaatgcggtgtcaaataacggaaatggtttgttttagcaagtcctcacagggagcaactgtttcttttattaagcttctccttgcagattcttccctgcttgcctttactctgatttggaaaacattgctttttcccaacacttttcacatcaaactaatattatgcattcatcacagtgagggaagctgtgagattgcagctcaggatcaaaccccaaatacaacagtctctgtgggataactggactctcacagggtgaatttgagtcatgaaagagctttttgttaggtcctgggatgtgaacaatattcaagtgattatttagttcattgtctcccagtctggaatcttacatttctctccattctcaaatttaatgaatccttcagcaattttcaccatgtgttttgttttgttttgtttttcttgccttttttctttcttttttttttttttttttttgagagggaatcttgctctgtcgcccaggctggagtgcagtggcgtgatctcagctcacgacaagctccacctcctgggttcacgctattctcctgcctcagcctcctgagtagctgggactacaggtgcccgccaccacgtctggctaatatttttgtatttttagtaaagacagggtttcaccatgttagccaggatggtctcgatctcctgaccttgtgatccrcccacctrggcctcccaaagtgctgggattacaggtgtgagccactgcgcccggcttgttttgtttttctaaggtgaaacagaaagtgtgctcccttcctcttaggctagrtagggcaacaaaaatagcaattgctattgggttacaatttatcaactcattgtgactattctggatggctcttgcttatactggtttaaaaaaacttgagaaatgaaattatgattaggtaactgtagtgtgacagacaagaatctctcttctattaatctatttatgatccacctcaaaccaaagggcagttgagggttgctgtgatttgaatgtgtcccctccaaaattcagatgttgccaatgtgatggtattaagtggtgggcctttaggaggtgattaggccatgaggacttctccttcattaaagagaataaagcccttttaaaagaagctttacatagttccacttttcactttctgccatgtgaggactcagcaagaaggccctaaccagacaccaagtctgctggccccttgatcttggactttccaagactccagaactgtgagaaacaaatgtctgttctttataaattgtcctgtctcaagtatttgttttagcagcacaaaaaggactaagacaagtgttttcttcagtgactgcattatacttaatagatcccactgcattgcaattaccttttggtatacctgcttccctgactactaagggcaaacagcaaatctgactcatrtctaagaccccagtgcctagcatggggcttgcctaagtacatgcttaatgaatcatggaattttatagggaaagaagaccagagagagaaagtggattgggaggaagagattgggacaagaaaataacaagcaagcaaaagaaagagaaaatggtgaaatattgaaatgttcctgggttggttgaactacttcattttatggtaaagcaacagggtccraaagaggttacctgcctgtagggtgatgctacccaaactttgttgtgcagttctgatgttttcttcttcctctccttaattcttcacctaaggagaaaaagatggaggtagaaagaaaacgtgattattatggcaaacttcctctggggcctggtggagccagcattttgtatgactgtagtytgagatgaactgyagggaaagtgttttttggatcattctttttctagatctgcccagggcccaaaggccaggactctgtccaccctgaccctatctctagatctacactatctattttggtggccrtgagtgacatgtggctgttgagcaccagatgtatggctagatgaaattgagatgtgtagtacatgcaaaatacatgcagatttcaatgccttagtactgaaaaaagaaaaagattgtcaaaaatctaagtaattgtttatattggttgtatgttgaaatgataatagttaagataggttaaagaaaatacattaatagaatcccaccccccatcccccatttctttgtaccttttaaaatgtggtyactagaacatttaaaattctatctgtagcttgccttttttctttctkttttttggacaatgctgctttagatcacccagctgggccctgggcagcacagtccactaggacctagactcgcctcccactcactgcaccttctgcctctattgtcctctagtcctttgcaccatagcacgcctctgtgcagccccctgcctgccacacttcactggctagattctcaggccgtcagtgttgccttttctgtaccttacagctcagcgcaggatggcagaagggttctgagactggggtgacatccagccttgagtccaaactctaacactgattagcttcttaaacttgagaaagacagggcacctatttgaatgctgggttcccttggtttaaaatgaggtaacaataaaaccctacctatttcataggaagttgtcaagatgaaaatcaaaatgaattagtgcatatgaatgtgctttgtaaataatgaaataaggcggggcgcggtggctcacacctgtaatcccagcactttgagaggccgaggcgggtgggtcacraggttaggagatcgagaacatcctggctaacatggtgaaaccccatctctactaaaaatacaaaaagttagccaggcgtggtggcagccgtctgtagtcccagctactccggaggctgaggcaggagaatggcatgaacccaggaggtggagcttgcagtgagctgagatcgcgccactgcactccagcctgggcaatggagtgagactctgtgtcaaaaaaaaaaaaaaaaaaaaaaaaarggaaataatatatacatgtaatattaccagtaattatgttttagtttttatatcataatcattattgtctttatccagcccctttctctaaccacctaatctcggaccatttgcttctcctcactgggggtctggtcattcgtaaaacagggggatgggctaggtatcccttcagctctgtgacttcatggccagatacagaatgctgccttgtagagaatataggtttaggaggcagaccacttagtgttaaatcttactcactcttaaaattatagcatgcatgcattctctggctctgcctgtgtagaggtctattgtagcaacagttatggccacagtaaaaacaaaattgcataaatatatacaggcattcctcagtatctttgggggattggttccaggatttctgtagatactgaaatccacagatgcccaagtccctgatataaagtgttgcagtatttacacacracttatgcacatcttaccatattctttaaatcatctctagactacctgtaatacctagtacaatgtaaaggctttataaatagttgctgtattatatttttatttgcattattgttattgttttttactttttctaaagtttttggtctacatttggttgaatcctcagatgtggtacctgtgattacagagggctgactgtacacaataaaatcttaactttgtgtagccctttggaayttagttttgacatataacattttttatttgatgtttccacaacactgaagtaagtatatccatcatcccagtttgcaggtaaataaatggagacacaagggttaagtggtgtctcttgggtcacccatccttaaagtgatgattcaaagcaaggatttgaatgcagcacctctcacttcccagccccatactcttccctatacatcataccatacctgtgatagaatgagaagagaacagactttctttgttaagtttgttacaaaagtgatacaagcactctacttgtatcacttttaacaccatggcctctgtgtggccatatccctcaagatggtccttggggtcccaccagaccgcagcagtttagtacttgggaggctacagctgtttcctccaaaagatcttcactgaagagccttaacgaactctgagtgttttcattgacttttctgatcttccaactcaagttaaaagcatcattttgcttcgctgtcagtcaatttcacttttgtgagaattttaaagatgtataagcccctaaggtgacagtctcagcctgatgctgtcacactgagctgtgtcatattgaattctgtcactgaagagaaacaaaatgaaatgcacccaggtgtaaaattccaggacttgttcattcttatcaataccagattagaatggcagagtctaatattttgaaattgatatgatgaagattgatgttttaactttaatgggttggtagtaaaatgtattatttgtgtatggatgtattcatatacatgcatacacatgcataggcagtgaaaactatttcatctggccccgtttttaaatttttaaaatattttctattggtaactaaactcagtacctgctacaatgtcaacaccctctcttttgccttccttttgaaaccaaatgaactcgattgcaactacatggcctttttcatcaaatttattgataagcctttggattgagatgaacttttatctgtgtgtgtgtgtttaggtacattttttgtagtgttcctcaaaatgcagattattttttgagacagtaagttgatgaatgaggcctttggtataccactaatgagactcagcagtctaggagacacggcccttttataacatttaccaagaaatcactatgcctcaatttctgtgccctccaacactgggatatgtaggcccctgctgtctttacctaccaggacacaggctgaaatgttttatgcattatttttgagtttcatcatttttcagcagaacattttatttttaagaattatatgacagaaaatttttaaatgactgttctaycttattgtcctttgcaagtgtgcttttggttatttttaaaaatcatagcagtagacattattctttaaaatrttaatggaaatgttacatccccaaaccatccaataatgatggctctagcaacacaatgcttattaatattaatactggtgttaatgagagcagctaacataggtcaagattttaagcaccgttttagacatttttctgccttcccatttaattgtcataataatcctagaagttaggcattattatctcaattttattaatgaggaaactgaggcttaaacaggttaagtcatttggctaagtaaggtcacacagtttgtaagaagctaaaatgagatttcaatttaggtctttttagtccaagccatgtggcttttctgtaatcatataaatacctttgcctgtgaaatttcattatgttcctattacagtagaccaggtaggttgagagagggactggtgtgtgtgtgagggggagagggaggatacaaataytgggaccagaggagagaaacaattgagagccattgaattaaacaatagggagagggcgaagtattatgaactaggcattacacacattggtttctctcactttgcagttgctggttatccagtaacagtagacaaagttcaagagcagattaaggtcaaataaagcagcaaaatgttagctgtcagatctgttcaactcagtgatgggagatgtgaattatattacagggtggtcctcttaccttgaaaaacaaaggtgtggagtagaattgaagctggccaccaggcatccatcttttcttgtgattaggtaaagggcattattgacagcagcaagcacaacttatagtagaggaacagtgttcactggaagcttttatccctgcaaatasccagtttgcaacgtgaagaacagacttcccccaattcatttaactgtctttgcagcagcggaagagcatatttttaagcagaaaaatcagtgtgtttaaagcatatggtttaggctttccacactttgctataaacatagtagtgttcataaatgctgttagaatgaataaaaacccaagctagaracactcagtgcagtaatgcaacttccctgaagaatcaccatccctcatggccctcccatcccctcagtttattcttccatctatttcttatttactcaattgcttgttctgttcagtaagcctccatcacatatttactaagccaggccctgtgccaagtgatggacataggtgaatctgacatgccatctgcagctcaccttctcaaggagaaactagcagttgaactgtatgccttgtgtgtctccagcaacaccttgtgacacagtgcatttatctctgaagcttacaatagagtccaaattccttgtgtcttggcctgaacgcactgtctgtaattctcaaggtttctgtttcacagtcttgcataggtcaaggtggctttggaatctctgtggatttgaatctcagtcttgccatgtctttagctcttaacttttctaggcctcagtttcctcatctacaaaatggggatgaaaattaataaataggtgtatcatgtaaactggagaaagaaaatgcattaaaatcacctgccacagtacctggccctaaagtcccttcaaggaagaatggattcattattttaaaaaataactactcatcacttaccatgtgccagatactattttaggttcttcaactacagagatggttgaggtacagatagttttagtggaatgctacatatacgcctaaggagacagctgctgaagaataaggaggagtaagccaggtgaggtggtctgaaaggctgttgttcctaagggaagagtgtgatccatggtacctaaacaggaaacctcatttgaaaggggagcagatgctcatccctcactgtatcccttggttcctgtcattccagtgctaactgctcatagctgcatttctgaactggcttcccaaaaactgaggaaggccactgctgatctgagcacaggtcagacatttaaggttcttgacatacttgggagcagcccttgacatatgactcttagaaattagtgtataaataccccaactccctcaccctttggggatcaaaaatctgaggagtgtgttttatgctgcttttcagtttcctggcatctggcttaatgatgcaccttttatggtctactttctctttcttatatcgtttcctcactcccatgacagtgttatttgcaactcccaaataaattacttgcattacaatccttatttcagggcctgctttagggcagctcaaactaagacaggaagtatttccccaccttgggttccaggaaggtcactgtgcctatttcaaggtctttgatcttcatagacactttttatgtgacctgacaagtcagccatcaacttgttttgaactgagcctttattaaacttataaaaatcaagccctttaagatatgaatacatagcccatcccaggacttgacaccttgctggaagaagttactatctagagaggcagttgagttctctttgaaaggaaataaggtgccgggcgcggtggctcacgcctgtaatcccagcactttgggaggccgaggcgggcggatcacgaggtcaggagatcaagaccatcccggctaaaaacggtgaaaccccgtctctactaaaaatacaaaaaattagcygggcgtagtggcgggcgcctgtagtcccagctacttgggaggctgaggcaggagaatggcgtgaacccgggaggcggagcttgcagtgagccgagatcccgccactgcactccagcctgggcgacagagcgagactccatctcaaaaaaaaaaaaaaagaaaggaaataaggtatgaattacagtaatctattctaycatttttataaatgaacatgaaagtattttctgctctttctttaggggaactcatgaactgaagggttcaaagttttatcatctacattttcacgatatctggagcaaatgctatttgttaataatgaaaatgagtgtgggctgggagcagtgtgtcacgcctgtaatcccagcactttaggaggctgaggcgggtggatcacttgaggtcaggagttcaaggccagcctgaccaacatggtgaaaccctgtctctactaaaaatacaaaaattagccaggcacagtggcacatgcccataatcccagctactcgggaggctgaggcaggagaatcacttgaacctgggaggcggaggttgcagtgagccgagactgcgccattacactccagcctgggcaacaagagcgaaactccaaaaaaaaaaaaaaaaaaaaaaggaaggaaggaaagaaagagaaagagaaagaaagaagaaaagaagagttgtgtttgtcatttaagtgtctgggatgtgtcacatatcatatacatggcataacactcacacccttgttttacacatgagatgaaaaaggggctaaatcagggtttaattccaggtctttctgactccaaaacgcctgtgtccttttctgtttctacatattgcctcttgatgaagccccttgcttaggactcagttctagtttatagacactggccagcaaaagaaccaaaaggatctggattttaatatccagaagcaagagaaacagtgtgaaactcagacctaagcttcaactccgtttttgagcaaagagagaaccatgagccccaaactggggtaaatggcaccaatttgttcagtaagaagaacaaatgggaagagacagygaggaggcacatgcgacctgagattttaacttatgtataaaagggaggtaaaaaataagcccagtggtgttaggtcactgccttttttaatagaatcatagactgtttccatattacaaatcttaycaatgaggtagtgggggctaggaatttgtgtggagctggaaatagaacccaaatcttttgactgccaagtgcagccctgtctggtagagggagataccatctcctttcatgccacaggctgtggagggaggttctccttactaagcattcttccctatccctctccctccttttctccctgcctccctcctcttctcctccaaagcctttctaacaagctcttagytccctaaattgcagaacaaagccagcttcctgctaacccctttggaattcaattacagacatactcaaatgtgttccctgctccagcaccctcagcactaaatagcatataagcacttttgcagggcttaatgtatacttgttgaaaaatgtacattatttttcattgactttaaattggacaaatgctyattgaaaagaataaagtgaattggtgttggagagagcattaaaaagagagagagaaagagaagagccaataaaaacatgtggtttctaaatgtagatccactaatttctctttgtggcagtcatttggtctatattgtttgaatgcactaggagacattgtacatattaatgaaattaggtttgttaagcttgtttgctagagatgtaagccctagtaaaaaaacttcaactttgagatctgacagtctcaggtctgccacttactagctgtgtgatcttgaacaaggaattttgcctcttttgagcatcagttttctcttctgtaagacgagagaaataatacctagcctagtgtggttgttatgaaaattatatgagatgatgtatttatgcatcctacaaagtctctgacacatagtagttgatgaatcactcttagttctattttcaagtaagtaaagctgctgatctcatagcccatatttttataaaaatgtactttcctccttggtaattgtgattctgctgtcttctgtctacttcttgggactctggtgccgagaacctttctgaccccttcctgcctgccccatggctacgctcagagagtagagacttcgcctattttgtccactgctctagactcactaccaggtgctcaataagtatttgaggtgtatatgtaaaagaaagaatgaatcagccaattactgctggggtaggactttcaggaaaccatatgtcccgagatgttttggcttccaaggctcatagggaccctgcctctcattagattggtctcaggaattctctcctttgtgttgggtacagatgggcctcccctttatgcctttgataacaggaatgctgcaataataagagaacaaacaaaggaggccaatgccttcagaggagtgcccttttcactggaattccattaacactctcaaatgggtgagcttgaatttcccacaaaacagccttattttccaaaggtgagtggctcatctgagaaattgtttcaatcatcttttagccctgtgttgaaagttctttaaaattagtattgctattggtatttcaatggaggtggaggttgaagaagaattgtcatttttcaaagccttctaggcctacaagtgatcacaaagagctaaagaatactttagtcaaagtaaatggcaataataaatagcacttcagccataatcacaattgctaattcaccttatatttgttgtttgcttattatgtgaaatactttacgtacattttaatctaatcagcacaattccaacgaagtctttattrtgatttcccccatacatataaggaaactgaggctctgggaagctgagatgacatcctttaagttcatgctattgaatacatgcccaagtcagaaatcaaacccagrtgatgccaaatctaagtcttccttgatattttagatccaaactgagagctaatctgatagaccagctgatgtcaactcttagagtttatctatacaagtcctttttttttttttttttttaaatctagaccagtgtttttattttgtgttctgtggaatcttaggtctgtggaggtgccttagggtctgcgtaggtgtgagagatcagggragagcctgagtaactggttaccatgacccccactcccatttcaaaataactgtgctttttttagatttggggatttccaagttacgtaaattgcagaagaaaaccagcttccagatatgatttcatatgaaataaaaaatctgctggcattttttaaagaatactactccaggccgggcacagtagctcacacctgtaatcccagcactttgtgaagctraggtgggcagaccacttgaggtcaggagtttgagaccatcctggtcaacatggtgaaacctcatctctactaaaaatacaaaaattagccaggagaggtggtgggcacctgtaatcccagctacatgggaggctgaggcaggagaatctcttgaacctgggaggcagagggtgaagtgaaccaagattgtgccactgcactccagcctgggcaacatagtaagactctgtctcaaacaaaacaaaacaaaacaaacaaaaaacactacactaagaagaggttgagccacatcaaagaggtcttagctccttgtctaggccagttgtccggaaccggtacagtttgcataatgtccttcaagcaaataggcaccaagagacagaacagttgaaaaacacatgagtatgggcttggattagaatagagacaatgcagtccagtgcagaggtcacaaaagcaatgagcactatcaccaacaaatcactcatgaacctgttctccactttcaagcagggatgttacaagaacccccactggccaatttgtccacagtaagtttagctcagagcctaatccaggtgggctttcagttggctgtccttgtcacacatgccatttttgagagcagcagcatggatgggcagtgtcatggcagctagtctgtgggccactggttcccactcaccaaaacccccctactttctgtcttgggcactgggtccctgctctgctcacccactgtgtattaagctcacacttcactttccttgtccccaaggagcttatggttcggtaggaagaaatggatgtacaagcaaaaacaaagcttaatggagaagctgaggaagcaaagaaaaatgacaagtgagaggggacttgaaggattaatgartttatctagtggagaaagaatgagggatctttctgttagattgtccaaaacttggaggtgtgaaagattatggggcaattatcctgtatggctgtggctaagagaaatggtgctgttttttgtgttcctctgttcccactgtttgctgttactcaatcatctgtgctttataccccaatctgctgctgcacatgtcatctgcctaactcagaatccaatgaatagatttcaacttaaaccccctttcaggagttactaacatgcatttatctgaagtgactgtcttcctttgttgtactggaaatttttggtaagctagaactgtgcctatgtgttaattaccagagaatgaatgaatgatagaagacatagttgtgaagaggggataagttcagatatggtggccttggttttggacttcatcctgagagcaacaggactcctctgaacttactaaagaagggaaattacatgatctgatttgtacagaaaaaagataattggtaccagtgtgataacttgattacagggtttcagggaggttgcaatgaaataatggatggatgtgaaaatgcttttctaaactgtaaagtgctgatccaaatggagggtataactactacatcttatttttcgaagcctacagttcagaattagtatttcagtgagtaaatcttcccaccttaacaatttctaattctaattcagctggtaatttaatggttaattcctctttccattttctcttattacagagtgaatgcaggtaaacggatcttagttacagacctggcctctctttgcatttcaatgggttcccaagtggaactgccagattccaatgtgctatgaaaatgggcagcagaccaacaaaatctgtcctcatcaaaaattcagaaaaataaaattaaaaatgtaargctgcacattcaaaggaatccagcctgacccccttgtatttttatgtatgcaaaatgtatttttttgcacctgcaagcacagtccctataagccaactatagcctctcaattgccaaggctttttaaaaaaatctgcctttcaaattcatcccagaaactcagtaatgaaacaaggatgaggtagagggctgcctacaactatttataggaatattgggggagataattgctatcttgtgatttgttctgcaatacctctgcttggcagaaatatgtatgctgcacatcagagattgaagggaatccttaaagatggtgaattacttgaacttctgatgatggaaacttgaatactttcctgttcctccacctgttttttaaattacgtagtctgtgtaagatgctatagaaatttaaaattcatgcatacatgcatgcatgcatgcatttattcattcatccttcatctaaaatcttgtagaattaaacctgctatgtttcaggctctgtgctaggctctggagggaccacagaactgatccctgttctccagatcttccagttgaatatgaaagacatccagctaatgattattaaaataattaattacaattataagagctttgggagaaaatactatgttccactagaacggaagctccttgagggcaggtttttgtctgttttgttcctgctgaatccacagttgttagaacaatcttggcgtgtgtttttgcatgaattttgaaacatagggtacacatcaaatsgtaaatagggccctcacataattggtgaagtctagaaaagtggacttccccagggaagtgatatttaagctgagactaggaataaattggttaagggtgggcatggtaagtggcagggataaagaaactgtgccctcagacaccgagagaaggctggggtcctgaagaagtgtgtcctgggtcttaaaggactggttcctgggaaggatttggatgttgatggatgccttcattcaataaaggctgtagacacacttaagtttcagaagagcatagtagtgcaggattttttttttctgttataccaatgaatgaatgaatgcttgcttrctgcctactatgtrccaggaagaaagggggtgtcattgataaagccacaaaaaccctatagcaaggtggtctcatttagtggctttgcagaagcagcaatggctcctgaagacacagaccttgctatcacttagctgtgyggccctgagagaatcacctaagctctctgaattaaatgtatgtaatgcatcaagcccaatgkttctctcacagtgaatgctgcctcaattctctcatctgcatttattccttcaacaaacatttgcatgcctagtagacctgcctctaggctaagtaataaggaccctgtaatgaattgagatgctaagaaaaactacttgcctcatctcctcacttcaggtagcttcttttgatgatcaaataataattttgcatgaaattgttttgtaaattggaaagtactttattaacatgagttgtttttaactctataaacttgccaatttattgatcctcatcttcaggcatttacttgcaaaattacaagtgaaatcactgtggggctggtcaaataaagctataaaagttttagtagcacttatttgcattcttattattaagttccaggcactatcctaagggctttacgtacattaactcatttagacctcaccacactcctatgaggaaactgacacccagaaagattaaaacactcaccccaagttgtagaatgggaagcagcaggttcagatttgaaccctggctctctgcctccacactacatgctcgtaaccactatactacataacacatagcaccaagactggatttttatttctttgtgaacttaatcattgcttgctaccctactttccctctcacagactaaattgcatgtttcatgcaagagaattgagaccatgttgattttacccatcatgcctagaatagygcctggcacataatatgtgctcagtaaatcaatgttgagtgaatgctttctggcagcttaaggacactaatagatgcaaccagactgtcttcaggctaaagggmaacagaaccatatctctgaaaaggcttaagatggtaagggagagacaggagtatagtcaccagtaatttcagaccagtgaggggacagtatacagaaagaggtaaagttccctgcctaaattcattctgatgatctagtttgaaataaggacttgattaaatggaatagtggtttcagtcacctagttctctgaggccatgacattgatagtgatgacctttgagagactgggattccttggtcccatgctcatgtactgcagcttgtgcagcttggactcatttggcccktccataggctgaacttcttaggactgcttggtaccagactgtatactttccaagtgcatttgtgttacttactccttaaaaccatcctgttaagtcctgatcactctcctcatttaacagccarggaaacttggactcagagaggtgagaatgattgactcaaggtcacagagctggtcatggggttgcagttgggcctcggacttctgacttcaacgcccatcatcttgacttttcatgctgctgaatcttyggtagtaacagttttattccccaaacatcttcatttccctgcagatgatccgtgatttccctgtagtcagaattgttcttgtaccagaagatttagaagaaatgacccgtgcatagcccgcggtcttcttccttactcacagttgacatggctatggttacatttcccccagtgtgatagttttccatcagaagacaagccagctgccacctcccaamaagccctttaagtaaaggtgacaaaacactgcttctctccaggtgtttgcacctctctctgggacaggccctatgtggcctgtgcctctggaagaggcagtcctgctgcccttgctgaagtctctgtgtgggttttttaaggtaaayrctagttgatcttcctttttaaaataaattattaattagaaattttactttaataagagaagttattaaaagctgcaggaaccctattcttttaattcaatttccaagtggactccttaacaaggtaacaaagacactcaccagagccttcagtgtgtggagtggatgtggagtcacatgctgtgacgygagtcttttcccttcccccagcctcaggttcctgttggaaaaattttagtctctcctctatgcagttcccagaggttttttctttaaaaccaygttcacaagaccagtggcctgggggtgcccatggtgcatatctctgattgcaagctgctgaccttcacaggcaagaccttgaccttgggatctaggccccaacttatgctcttgtcctattccacactcaacacactcagtgccccacacttccttccattttcctaatgtgctatgctttttcacctcccgtgtcctcttcctgtcttgtctttcctttttctctcctttgaaacacctaatcacctcctctcctcctccagagtccagcttacaygtcacttcctctggaaacctttttttactctcccaggaaaagttgatgggtgtgtgtgtgtgtgtgtgtgtgtgtgtgtgtgtgtgtgwgagagagwgwgwgagagagagaagatgcagggagggagggaggaagagagagagttaagccaggatatggatggaggtggggggcattccaggtagagagaacagcaaatgcaaagggaaaaggtttggtgattgagggattgagagaaggccagtgttcttggaatatagtgagagtggtgaaagatgagtctctagacttagggccctggggctyggggcagggggatgcccagcattctgacttttattctaaatattgtaggaagattttgagaggcttcattacattctatttaattctcctgctctaggactatgtttctcttccctgctacactgtgaactccttgakggcagcaccattcctttaagcctgcatgccttactctgtcacagcgtgggtgatttckaaatgtacagttcatagacactaggaagggagggagggagatgttaatgagttggttttattttcaaacccaagcctgctagaagttgcttataacccttctcattttttccagttcgtattttaatatccttccaccttattggaggtttggcagacagagtttatggaagaagcatattttcatatattgtagtttatgtttattatatgtatatattctcattattttatgtgcaaagagggtttcttatgtggtactctttagggagataatatgcaaagagatcttctatttcatttttactaacactactgcagtttgctaaatcatcaccatcaaaccatactttaatttaatctactttattgccttccaaagcatttcctatgagcaagattacattccctgggttttaaaaataactgactctaaaacatgcaagtgaaattaaacaaatgttttgtcttcttcaacctttttgtgtctttgtgtctgtctgccatgtgtgaataatggaacttactgacttggggtgaggagaagaagaacatattcaaaggggatgtaaaaccaygtgctctcctgagtagtccgtggatttggaattagatgaatctggcactaaaatctggctctactgctatttagctgcgagaccttgggcaaattacttaatatttcaaagcttcggtttcttcatttgtaagatgagaataattgtacctagytcatgttgtggctttaatgtcagtttttaaaaagaaaatatataaagtgctkcacraagttctagtacatagcaggagctaaataaacaacagctgttgttmatagttaaaatgctgcatttcatcatgtggtttcggtcaagtttttgaactttctttctttctttttttttttttgagatgragtctctctctgtcacctagactggagtgcagtggcactattttgccttatagcaacctctacctcctgggttcaagcgattcttgtgcctcaacctcctgagtaactgggattacagacacgtgccaccatgcctggctaatttttgtgtttttgtttttttagtagagatggggtttcaccatgttggccaggctggtcttgaactcctgacctcaagtgatctgcccgcctcagcctcccaaagtgttgggattacaggcgttagccacggcgcctggccaagttatcgaactttctgtgcctctgtatcctcatctctaaagtgggaattttgatggcaatctgcctaataggtttgctgtgtggatcaaatggacccacaaagtgcttaggaagtacctgatgtatggtaaatcttcaggaaacattgacctctattattactaatctcagttattatcatgtatagttgtcccttgctttcaaacgccaattaaaagtgaattttcaaactacataaaggttaagttttgaattgcacaagcaaaaaggactgtattggcatcactgattcttcacttattatcgtatacctccaagtgataaatatttttaatttctgatttatgttaacaattgactttgytgtggcaactgtaatattctggagtctccattgccacttagtgtggttgacccctttgaaaggtgcacagtgactcaagtgacaaaaattaccttaattaaacaggattgcctacacccgtgttgggctaagaccaagaattattaaagccctttctttagccaaagcctattatgctgtctgggacttcaataaatggtcaaatcatgtttgctaaycttcctggtttgccaggagcccacctgcctcccacactcactgccaggtcatctcctgctacatgatggacaaggaaagaaaagagagatttgccaagaaagtgccttggcagcctcatgtccagctctaggtattgtactatggtgaggatggctacactgagctaacgtagataaaactggctccaccttcaacagagagtacttgctcatgtgccagaaatcctttcttaaaaacagctttatgcaggtaaaattgataagcaatgaattgtacatatttaaagtctacattttgagacatcctaactcaaatttatgtgtatacctatcaaaccattaccacaatcaaggttacaaaacatccatcacttccaaaacattccttggcccttcttcatcccactctcccaccccttcctcctactccccatcaccaccccatcctcacagcactgactgctttctgttgctttacatgttttcattctccacaatttatctataaattcatacatgtactattttttctctggcttatttgagtttgcataattatctttttaaggaaaatttgaagccacactgcctacctacaaagctgggcacttagactacttctagtaatagccaccaattgtcaagttggtgagctacttacagggattccatgaatgcatctctttaaatttgcacaacaattctcttctttaatgccatttcatggcccaggaaactgaagctgaggcatagtggcccaaagtcacacaattaggagatgctttaatgaaggctggtctgacttagarcatgtgttcttcccacctggctagtgtctggaagcaatttaggatccggttaggagcctgactgattttagagagaactgggttcagccctcagctgcarcatctcagtaatgagagcttgcacaagctacttaactgttttccagcttagctttcctcactgtaaaatgggaatatgatgggmaaaggccagcatattcttaaaataaataagagagtgtatttaaatgctcagccttgtatatctgaagtattccatgaaagttatgtatctttattgttaaagtaatttggttcctcaaatatatgttaagtgaaggcagaaaatgtcctctttagtattgaacagactcccttgtattaaggagggtgaaagcaacagaaagaggacaggaaatcatgttgaaccttatattgctgtgttagcccagtggatcattgcctgacttctactagattccataaacgtttgatgaatacatgatggatggatgaaggaataagagtgctaygtcagcagtagcaccagcatgattcagagagatagggaagcccaaatcaggcaagagtatattatgctcacacatcctattgaaggtagaacttggaaactcattttccattcattaatcattttctgtccatttccctaagacccaagacccaaagttattacactttccgctgttactagttagcatatataaaatgggcatgtggatgagaatgagcctcttgtccctccatctgtctataaacaaagyctcaggatgctgtgttggttgcattctcgtgtctgattgctgtggccagcaatggctgtggctgtgtttcatgctttcctgagtactgattggagatgcgctttgaggactggctggaaatgtgcttctccatgcctcccatggaaccaggttgtctgcatggcacacaactgtcactagcactcaggctagtgggtttcagatggtaggagaattttaatttgtcactgagagttggggatgtgcaaaggcggctagctgagtgaaagaattttatacacctcaggtgttaatggattttgtttcttaaccaagactcagaaagggaaagggcttttccacgtgatatagtatgttggaggaagaactttatctggcccacttgttgtgggactgctcttttcttttgcagcaatcatcaaactcttttattttatcactgtctttgaagcatcaggaaaagcatctaatattaaagtatttaggacttactgagtgcttaccacgtgccaagggctgttctcagcaccttacgtgaaatcrctcaggcctcactaaacaggarcatccattaaaaagacagacagacttgtcccaaactcaggtgcgtggccagctctgagaagcatttccacatttgttggcagacaagtgcaaagggaagataaaagaaaaaaacacaatagaaaacagccgtaatggtcagttactctgggtgtggggttcagcaatctcttctttaacaagccctccagatgattctaatgcacactcaagtttgagaaccactgctccaaagtaacctccctgtgggccctgctcttgttcccagatattgagctaggacaaacattgatttgaacactgtctcaggtgcccagcactgccccataacaccaaattctgttcagtccttcctakcacargataaccctgtgaactaagaatcactgttrtacscattttgcagataaggaaatggaggtatagacaggttaagtaacttggctaaggccatatcactaataactgctggatccaggatttgaaccagagtctggcttaagtgaccacgttcttatgctatgctgtggtgtttctcattctaatggaatttgtttgtgaaaactcattaattacctaattagttaaaagtggaaatttggaaatatttctaaaaaccaatagaaaaagttgattggtgctttaaaaaatacatatgcatggctcaagcctacaatgccagcactttggaagccgacgcaggcggatcacgaggtcaggagatcgagaccatcctggctaacatggtgaaaccccgtctctactaaaagtacaaaaaattagctgggcatagtggcgggcgcctgcagtcccagctactcgggaggctgaggcaggagaatggcgtgaacccgggaggtggagcttgtagtgagccgagatcgcgccactgcactccagcctgggtgacagagcgagactctgtctcaaaaaaaaaaaaaaaaaaaaaaacatatgctacggatgaatctggaaggcattacgtaagtgaaataagccaggcagaaaaagaccagtactgtatgagtccactgatatgtgggatctaaagaagtcaaactcatagaggcagagagcagagtggtggttaccagggaccgggtggggtgggtggtggagagggttggggagatgttggtcaagggcacagaatttcagttagacaggaggaagaagttcaggacatctcttttacaacatggtgactgtagttaataacactgtgttcttggaaattgccaagagtagagtttaagtgttcttgccacacacacaaaaagataaacacaagaggtaatacgtatgttgtttagcttgatttagccattccacaatgtatacatatttcaaaacatcatgttgtacactgtaaatatatataactttgatctgtcaattaaaatgaattttwaaaaattaaaaaagaaatgttctagaattagattgcaatggtggttgtacaaccttatgagtatactaagaaacactgaattgcacactttaaaatgatgaatttcatgatatgtgatttaaaacctcaattaaaaaaatacacataataatgaaattctgtgatttttatcaaggcagggctgacctgcccacctgcatgtcatcgatgttgctgtgcctcttgctggaagaggataggaaggtacccagtgaaaggctgccatggtgcaggtagagaacacagaagggagattgcagtactataataagaaagaaaaatggccaaatcagagtaaggatgttgctgatggtgatggtgatggttatggtaacagcagttcacccttgaytgaacccttacagtgctcctttcactgttctcaatgctttccttgtgttaactcaattaatccactttcatggatgagtaacctgaggcctaggaaggttgagtcatttacccaaaggcatacatctagtaagtggaagggctgggatttgtatagatgcagtgctcmtattttagccccatcactcttttttttttttttccrcttttgagatggagtctcacttgctctgtcacccgggctggagtgtagtgctgctctctcagctcactgcagcctctgccttgtggattcaagtgattctcctgactcagcctcccaagtacctgggactacaggtgcccaccagaatgcctggctgttttttgtatttttagtagagacagagttttaccatgttggcaaggctagtctcaaactcctgacctcaagtgatctgcctgcctcggcttcccaaagtgctggggttaaggtgtgagccatcgtgcccagccttagccacactactcttaaccactgtgctgcttgtgtgaccctaagagcagcgattatatttgtggtattagctcgtgccatgctgctgttattacggtatggccctykgttcaatttcacatccatcctattcttatctttctcaaccctgggagatgaataggggtaggtattatcatctacatactgtgattaggattttgggactcagggacccaggaagagtgagtcactaccccatgaggatcaaaagtctgtctccctactccataccagtcagtggtccagacaccatggtatatgataagyttttccaggtgtgctccaacgttttgttcaagatggaaaattaattttctrccctgaggcaccactgtttttggaggtgtctgtggcacagaactttragtacagcccattgaargatgagttgtagaacactgttaaactttctatttgcaaggagggaaaggggagcggggatatagttgagccatcaacagaggaggagaacatggtcttggagctttgctttgacagaatctaagaggccatagtcatggtggtcctcaagaaatgagacagtggtaaagggaaggctggtgatcagcaagacccaatatagactgtgtttgggtgtaattattgctgatttgttttgagtggttaagtccattgaaatatcccctacaaattctaccctctgaaaatgtgtcacatgcaccctactgtgaggcctctcaggtgtgggcgtctccatatctcagaggaagaaactttggccaggaggataataacttgaagaaatacaaatcacaaagtagagaagccaggatgaagtccctaatgaagaacacctatttgcaagttcctctctcattagcttgtatttaccatcactcatgattcacagtactttttattgttatgtcagcaaacaactcaccagatakatacgtgtgcaccatttcactttatgctgtcatgaatcctgtgaggcagtatagctgacattaatagctgggtttttcaggtaaagagactaaaattcaggtaagttatgggactttacctctggcaaataagtacttatctayggacttgaaatctcatctttagatcagaagtcctttgtaccaaaaccacttgtaagtctgaagtattcctaaatctgcactttagaggattaaattactggagcccctcrgtcaacagtgtagctcatcacctgtcgagaaccccagcagagtccaactctgagtgcatggagttgcctcttggtactgcctttgggatgatctctgagtggtggtggtggtgcgggggatgctgcattcctctgtgcatttcatcttagatgcatttgatgtgggcaataaagacgtgtggaagtggttgacttktgcatactggggaaaggtgggaataggcattttcctgaagacagagtagactctggagacagcagatcttcctgatattcacctgaacaggctggagctttgtcttgagaagaaggtggtcttaaagtcttgaaaacctggattctgatcctggctctatctctccccagctatgttcatcatgaccaggtcacttcacctttctggacctcagttttctcatacacagaatagggtttataaagcctgctttcacgtttattaggaggattgaatgagaccacctttataaggtgccaacacttggcatatgttggttacagctgatgctggcttcttccctacttgcctttcctgtgaactctcttttctaaggcagtgctctcaaagtatggtccccagaccagcagaacagccttacgtggaaactgattagaaactcaaattctgaagtccccaccccatacctactgaataaagaactctgggtgtggggttcagcaatctcttccttaacaagccctccaggtgattctaatgcacactcaggtttgagaaccactactctaaagtaacctccctttgggccctgctcttgttcccagatattgagctgggacaaacattgatttgaacactgtgcctcaggtgcccagcactgccccataacaccaaattctgttcagtcctagcatcagctgctgtacactctcaggtattctgcaggagctcttgggccrtgacagacccttatggttgttttctgttgtgtttttttttttttttccccttccctttgcaattgtctgccaacaaatgttggcttctcaragctggccatgtacccgagtttggggcaagcctgcctgtctttttaatggatgctcctgtttacctccttggaaggcctgtgaccatccatcctgtcctctctccagatggttggtccataggcctaaccatcaccagtaacaatgtgctggcaactttgtatctctaggcttgacattgtgacctgcctgcccttttactgtcagagatgacagggggctcaggaaagcaggtggtaagggcttgggataatctattagggttagtgattcctgcaaaaccatttgctccagacgagaaatttcctacaaataactctctgtctcagcaagccagggtctgttatccactaattatttttggattagggagggctaacacgacttggccttggaaggtcagaataatttaagtagataactaggttgctaccttccctgggggaaagaaggatctctaagaccaaggtttcagcaactttgattgaaaggaaaccatgtactttggtttctctgataaatgttgataaaagactacattgatamgattttccaaatgtcagctattatatcttgyggtgaaaccacttggatggagctcctgtaacatcagccgttaagttattatggtggaaaatcagattgcaaggggtaggaaaagaggaaagaagaggaaagagaaggaggttattttgatcatggagacaagaggtagcaagggtgttgactaaggcaatgtcaagtggagtccaacaggcctgaattggaatttctactccccacccttacccctcctccaagctatgagaccttargcaaatgaccgaacttttttttgagattctgttgctgatttctcaactgagggaaaataactctgcctatggcatcattataaagattaagtgagaaaattttttaagatgatctattttagtaacgtgcctggtacacrgtaaagatgcaacaaattttagctctaactattgaagtagtatagtgagttaatgtsgaaagcatagcaaagaatcaagtcaggaccaagacccaggtttctttctcaagtcactgattaatggaacaatttttggtaatgaataaaacaaaatgggagaaaacctcaagaccagaaagtggcaaagagcagtgtagatatgctgggaaagcattgggactttgactatttttctgaagatcacagatacacacaccatatcatctttgatgacagtaacagataaatgagatgtgagaatatcccagtgacagctcttgttttctctgggtcattttgaaacactctgcaattagctgagagccaaattctggtcttgcttattttcattaggtctcactatattttctcaggatactttattcctcccattgagccatttaatttttttttcctgcctttttctgtcgattacwcacactgaaccactatcacatgtcatgatgactcaagatgaaaatttccaattccaagtagaaatagtcaattctttaaagtggataggtgatctaaattaattgtgaggtgagttatcaatgggacaacttgcctggagaagcctcagcactctaatcaggcacggtgcaggggtatccttcagaaaggccttggtagaaactgtttcattaatcagtgactcgagaaagaaacctgggcccttgtcctagactttattctttgctatgcctgccacattaactcactacactacttcagtaagttagagctagcatttgttgcatctttcctatgttccaggcactttactagtgcctgcctgcatgagcagcggggaggggattgctgcatccaaagaggacctctctctccttgtggggtgtctgtctgtctctctttctcctctcctccctccttgcgggrtctctctctccttgtgggtctttgtgggggatctctctttttgtgggagtctctctctctctctctctttcagtgactcaatcagcgctgagacaaactgggattagctgaatggttgagaacttacctgcatacaaaatactttgagtagaatcccagcttcacgatttatgacacaagtcgttgttggcaagtttcttaacctctttttagccccagttttaaagtgtagataagaacatttatataaaagtgtcatgtattttcaaattcttaccttggaaaygtcaaagaacaagatagcaaatgcaggaggactttgtcagccccaagggaagtgcagtgtcagagcagtagccacctgccccagatttttaggcagttctgtattcatttacctattccaggagcccatagyacatttacatctttggtatatacactttccagaatcatacrcaaattgctgtgtagactgtggtactttatagtaagatactgtgcttttttatactgtaccttgttacatagatgatgtgaggagatttataaagatgtctacataataaggaatgttgttagataactcagatggaagcaaggaaataggtaatagaaaaaatcatgcaatgagatcctattggttgtttggtgtgagttacagatttggatccgagcttcctartggtcaaaggaaaaaaagacaacaacacatttttaagattcaaggtgtttataaaaaacaaattggcctagggaatcamagaaggtatgtacttcatttgaagtatgtgtgtgttttagaattttatgtgcaatatgaagttttagtactactttaaaaagcagaaactttacctsctggtatcttttagatcccatctttttggggggacaataaccataaaaaattgacagtccagtcaattgacaaaatagaaatgacaaaaattgacaaaatagaaatgaattagcctggagctgagcttctaggaattttcaagacctccccagttgccagtctgttattcagttacagagcataattattccttaagaaattgacacagaatagttaatttcccagcaaagcatcctaacactccagacaagccatcacttggaatacaaagtgtcttattctgctaatgaaactttgctaattataaaattcttgaagtgggtactggaagaaaaatgttttgcacactttacaaataatatgcctctgtggggtaaatgctgacgcgtgcatttcaggttttggccttagttggatattcataagggtccctctttgckgattatgtcagcacaacctctttattgaattatggattgggtatttaatcaaggcctgtgccttattattagccatgtaacattccattgtttcaatggaaaatggaacctgtaaaacctgattcacatgaagatccattggcccactaataaataatgttttatagcacactctgctttttatatccctataatccttatctkccagagaagtgagaataaataagcacacctcacactgatcgattggggatggtgcttgtgtcaaagtggtggagagctggacacaacatgtgggtttttgtgagttggtttttcccatactaatcctggacttgagagctggggctgtttttggagaaacacggatacatattggagagaatttacattctaatgtaattggtcagtaaagaggtttgatttagttagtaattctaaccacttggttataccctaaacttacatagaacacgtaataaaccattacctgggcccaacctgcagggacattgattcacctggtctgagtggtcccaggtggtattgatatacaggcaagactgaggatccctaatctctgctctcaggaaaccaaacagttaatggacagtgatttcgtggctgtgagctgtgagtcccaactccacaggaggctttctgagtttaaaaattgtccacggttctgcttctggaatctcgtactcggggagggagtttgttccggcattgtggcacacaggaaaggtctcaacttggagtctttgagatacagygtcckggtacttcctagctgtcagacactggaaaacttacctcactctctggaaaaaaagaccaaaaacaaaaaaccagaaacattattatgaatttggaatttcttacttcggagacagcattgttagttcagtgtctgagtaccaccttccatctgcgctaatactgctgagtgtgaggtgctaccaagaggatgtccctttttacttctcaaggctgtttgaagatttaacggggattatttcctaaagggccctctatgcgtgaggttgcctgtgaggtttgtccccattcttgtgtcttggttgcctaggattcctgcctctctctttttctccctccttctaactcttgaacatcttgcattgtctctcagactctgtcccctaaatgctcccttctctttgcccaggtattcaagccagaagcatgtacacttaacaatctgcaaattctgtcctcctctattctttgccaccattaccaacttgttgtaactggtcttcaggcctccagactttctgttacctggtggcatcataagttccaggagagagaatgcccagggtactatggaataacaaaggaagttcctaacatggtaggggtaggagtggtgatgggactgtgcagaattgcagaagacttccctgaagaaatgccatctcagggagttcgcctggcacagagagggggaagcatgtttggagcaggggaggaggatgatcaaagacccaggggtgagcaagaggttggtggtctcaagaagatcaggatggcaggatcctggggtgggttgcaatgccaggacaatctcaggatgagagtcagtgagtttacgaatgttgtgatccctgtttgtccatctctgtgccatggatgcctgcggggtccatgtgctcagttatatttgttggatcgctacactcctggagttcagtgggtgagagcataactggttgagttggggagaagccatccttgactaggcagtgtttgaaatgsatcatgaaaaagcgtctatgggacttttatgggcacaggagtgagtgtgtatctctgtgtgtgtgttgctgtgtggtgccaggcactgaaagcacacccaggagcacagggtttgtggagtacatgatccaggtgtgatttggtgggattggagcataaaccatgtatgagagaggaaggcttcagaataggtggggagaaatggaaatgtcgtcaccgtgtagaatcagctggcccagcagttcttatttttggtaaccttgcattctttactgtgaaatctgtgataatgagggtttgccaggttaaggatttgtggctttatcctatgggaagccacagatagatttttaaacagaggacagggttggcacgggagtagcatgatcaggtatgcayttcaagatgatgtgccagctgcagaggggagaagaatgaatctgagaagggcaagaacggatgcagcgtaaccactaatctgctttctctcccatctaattaaaagaatcctttttctcctaaatgtattatacactttgacctgaatcagattattgtagtttgctctggcctgaaacacctgtggtacacaaagggctttcacccacattcttgtggagggtactagcttctttagyaccaagaccctcctgttaacagggtgcctggatgtggggcagcaggatttctgtgactccctttacctctattcatataatgggctcttaattctttttggaaaagtcgtgttgttgatttctttaataatggtaagaaaaagtggagagcagtggctttatagctcaccagttagaaaaattgatctgttattagctaagtcccctccccaacatcaatcttgtctmctgatatcctctatgtccttttctggcttgagctaatggtgtctcctccagaaaacttccatgattcttcctttcccatccttgtcttcattcacccagcccttagttgatcttttcttatattcttaattgtggtatagctgtaatatgatatagagtactgcctatctctcctggaaattgtgagtcctctgaggagaggaagttttgtcctcattttaaaaattactttcccatatagtggagtgcttggtgcataggtttattgttccagatgagctaatgtgtaactggcaagttattaggaacaaccatagtttgaaagtatcatcttgggattcctgcatccagtttcctcatggacatctccatcagaatgtgacatgggacaaggatcaacatgcccaggaatggactcatcaaccctcctaccctctttcaaatcacctccttccctctctgtttcatagcccaggacatggaaccacatgcattttctcaacccataatcgtggcaactgttgcttctttcctcattcattgcacacaatattgcttctctgctttcattgtctctgtatttctccagtgttcctccctctccatctctacagggttttgtgtcagtgtaactgtctttacctccagtagtatctaagcctttctctgccttgtgatatggtctccaacctgaggtctgaaagacttttctaaaatccagacccattcacctcacccttgtgtttagaatgctcggcagttccccgtcagtttcaggctctccataatcaggcccctcactccctcttcattctcttctgtttgtattctaaaatttcacattttatcmtctcaggttaaatacccccagtgctgtccacaaggactttctgtgatgatgggaatgttctatcatctacgacagaacttctatgtatcagtgctatccagtgtggcagccaccagccatgcgtgcctattgagcagttaaaatgaggctggtgtgactgaacaatcaatttaaaatttttagttaattattttagttaatttaaaattaaatagccatatgtactagtgtctcacatattagacagcacagccctggactctggatatactattctatcctctacctctgtacctgggctcaaggttctctctctgaaatgctcatttctgcattctttcccaagataatttcaactggtcctataagaatcatctcagctgtccccctgcctccagaacacctttccttaccccgagactggcctgtgctcacctccactgtgaaactaatatacgttttatagttacattatactatctcttaacactgtcttttcactgctagtgcccccattagaaattgaggttctctagggtaggagataagtctttcctcctggtatcccaagaatacagcacagttcctgcctagtatgtaaacagtaaggggccttgtgatacaatgtagagtgcacaggcagttgtgggctctagccccgtatctgctagtttccaattctgcagcttcagccagatccacctgactgggcctcaatatttttacctgcacatggagcattataattccttcaatgttcaagagatttattatgagcattactgataacatacaagtacctgggacactagtaattgatagctgctattgttgggggttctgtaaatgtttgaacctctattactacaattcctcaagtacttgagtgcctgtcagtgtgttgaatacttgacttgcagctggacgcggtggctcacacctgtaatcccaacaatttgggaggccaaggcgggcagatcacaaggtcaggagatcgagactatcctggctaacacggtgaaaccccgtctctattaaaaatacaaaaaatcagctgggcgtggtggcatgcacctgtagtcccagctactcgggaggctgaggcaggagtatcacttgaacccaggaggcagaggttgcagtaagccgagatggcaccactgcactgcagcctgggtgacagagcgagactccatctcaaaacaaaacaaaacaaacaaaacaaaaaacttcacttgcaatgtaacatttactttttatgacaaccctaataaggcatatctccatttgatatttaaagttatactccacagctaggaaggggcttagctgggattcaaattcacatttgcctgtcttcaaagcccttgccagacttccttattcctgcttgcatacacatttgtacttaattttaggcagcaatgcacatattcaattaataaagcaaatcataaggggaaataattttaacacagccagcagaatttccttgagctagttgatttgggagattgcatattgcattccttgtacagtatttccattccctgtttgcagtttttgggtaaagagataaggaaacatgtaatccattccttcaattaggttgtgtaatagattgtcatgggcattttcaagataagtgttcratgatagtgttgtgaagtgcatcgatcagctgcttctcagaagtctcattgattatcaggtctgtgtaaagcagacaggctgctagaatcttacctttggaggacttaaatttcagttttgaaggcaactcttaggaccgtcaagtccgaggcctcactgtcctcatttttacagcaagcctttcttctgtagagactctactgaaacctggactgtgggacattttatttacaccactggattcctttccctacagctgctatttgttttctgaacatcacttcttttcccttccacttttatcaagcgtctactacatgcatagcaccgggttacatgctctggaaagacagtggtcactgagatagggtcagacatttggcatttgagcagcggacagagataaagatgcccacacacatgatggtagctattagctgtagtgagtagcatttgccacamatcaggagccttacacayagatttatgtgggcaagtaggtttgggcatcaccactatgggaaaagaatgcaccaagtgctatgaccatgccaatgaaagagcaaaagaaaggttacttcttctacaggagactggggtagaggagacaggaggtgttaagaggagttggcatttgaactgaatattaaaatatgacccttagtgagccatgcagagagtagggccagcttttgtttttccatgggagtaaatctgggtcattacggaaggttgtgggtactcaggagaagtgtgtgtgtgtgtttgttgtgggggggagtccttttatttgcatttcagtggaagtgtatctaggaagctaagtaacatattttgtcattgttatctaggaacaaagctagtagaagactatcttaggccagatgatttcagaggccccttaaaattacttcagaaaatctttaccccccatcygcaagtcttgaaacctctccatcagagctctgcttttttagtttgaagtctttgctttcagcagaaaagcaaaaagtcctgggttgctgacacatgaaaacattaaacattaacaatgtgatgagtgcagcyattttaaattttagagcatatactcctagggatataacagaattgggaagtggtgtgatttgaaaactgttactagccaaaacagtctgcattaaaactattggagaaaagcaagttagaaggtctttggctgggggaaaggggaaggtgcagtttaggggtcacmgggcagactcagtgaggatccccscttctccttttctgtgtcctctcacctaaggytggccttaccatttccaaagcaagtttgcaaacaaagttgttcttggattctgtagaaaagcaggagtgaagatttacagcttggtaggaggattcacacttgagccaggatgcaaacagtgtgtgttaacaaagggggctcttgcagggtagcctttatttttctttcctttttttcatcccggaaaaactaggacaaaaagaacatagaaaaggaagactaattccaaacaccagaactagtttgtgaaaattggcatgctattgtaatcctctggttcacaggttaatatcctaaggattgatgtccaccgtctgttccaatgctactcttgtttaaatagtacttttccttatgacatgtaaagcaatttcaattcaatagctaatcattgtctcaggtgcacaaaygtgtttctagtatgtatttttttaaaaaaagaatttcaccgtttccccaatggctttcaaaccaggtaggatggagcattctaggtgatttattttgatgatttcagtaataaaacccaakggaaaaattggttcatagtgaatacagccacttttcaataaatgcagctaaaggcccaagaatgaatctgaaatggagacgagatctgccatttaaatcagggacagatatacaatgtgcatctgacataaattctcattgggttatgttaagaatatggtctggcagggaatgaaaattaaattgacttctcacctattgttgtccctccctgagctctgctcctctagaagtcattaatggctgcaggtacgaaggtttggatgtagccctttggggtttccccagtcacggagatgtttagtagattgctgctttaggcgttgatccaccattcacctcgctgctgtgccagaatctcatttaaatacaagcagtgggggcctctttgagcaccactgcctggaagagcagctctacatcattaaatagggtgtgtagacctctttcctaatccsccccaaaccccatgtgcccatttgctgcatgagtctgaatattgaatttcaagatttctaaatgaggttgaaggtctgtttgacatctgctgatgactctcatgttgaatttcctcaagtagtggattccctgagagtctccttcccaaataaatacattttacttctcctatatgaaaagcaacctaagtgagtccattgcttttagttaaaacctttaaaatatggtattttgcatatcattttcacctatcttttattctccaggaggtggcgatgggggtgggaattgctatcctttttttttaaagcacctaatagctaccacacactatcttaggtgcattatatatgtgattgtatatttttttcatttattttataatacagatagaagaataggaaattgaataaaacataaatggttaacctcggagtaattataaatgaacacagataaaacacctacccacatcaaggcattataacataaccagcagcctggattttccccatgtctcttcccaatcataattacttcttcccctctaacagaaactctcctgtctttcataatacttccttgcttttctctatagttttatccataaataaataaattcatgaatagtttcgttaatcagatttcaaatttcatgtaaatgctggcacaatgcatattctattttcctaatttccttttatacaacttacatatctatgaattatccacactgttccatatattcatagttcacttatttttattgtgatttagtaaccattatatgaatatgctacaattttaaaactccattctataacatctgggtttgaagttctatgctatgaccattttttttttttttgcrtatatcttggtgtacataagcttgcaattatggaggatggaattgctgggtcagaggaagtatgtatatttagctttaagtagggtatctatattttcagctttattatatattaccaatattcccagagtgattatttccatttctaatcttacaaacagtgagttaatgttggttcctacccttatcaatacttggtacttttgaacttttatatggttttcgcccatggctatatctgcccctgtaatactgttgtaaggcaaatagtcatagccccattttacagatgagaaaactatattctcaggtttttataaacatgccataaaacacacaaaacctgaagggaggacaaagggacaaagtcagtaactgaatagtcaagagacatcaaataccaaaagtttactttatgcctatattgtgattttagaagagtatagactctgtggcatccaaagatctgatatagcttatattttattgctttggaggtgaagaacttttggaaaaagaattctagaaatggcctgtactttgatcagattaggaaaagaaggtgaaaaaccaaaccaaaacaaaataaaaataagaatgatgataatcctccacttaccttatatggaatagtgattctgcccagatactggactgagtagtttccgtaacttattactagtgtccttttccatggccrtgcgctttagagttcttgagtgaaataagagaaaaggcaaagactgctttggtttgcagagtcatgggagcttttattatggcttcagtgcctggatgtctactacctaattctatgtggacattgtaaatataggggaggaaaaacatctttttttccctctaccctcctagtttctcaggttggagcctggaaaattaggctgacaaaagacagattaacaagagaaaagcaaatgcaagtttattaacctgtttatcctacacaacatgggagtgctcaaagatgactgactcaaaggggtggttagaacttgggtgtatgtatawaacatcttaacaaagaacaataaaattttagaatagtgacaagataagggaaaaggactgattttctagggcagcaaatcacagaaagttaaatatatagggaaattaatagaaggtaagtgctggttgataaagtcagctatgtagattcctttggagtgatcttagggctaagttgtcttggtgatggacttctgtccctgctggtgggtagaggggaggacacatttacaaatttatgtcccgcttttaggcaaatgtgggtagtctgagggcttttttttttttttttttttatatctgctgctgcttcttttttttatctgcttcttcctttagctcaaaataatccttatgccaaagtgttcttttttgggtggcattttctgctattctccatggacaaagttcatattagaaagatagataaaccgcttcctcatcctgcccctgtgaccttattacttggagatgtttgcccccagaaggtctcctctcttctccaggtgagtttgcttgcaaatctttgcccataaccagaaggatcmagattttactagacctttagcattcaatccctcccaatgttagtgaagcaaatcagccaaattgtcctagtaatacagattttacatatcatgtaccaagaaaagaatataatcatctaaaacaagattcagattatggtggaggggttttcgtttaatatatgattcagtttggctgtgtccccacccaaatctcatcttgaattgtaactcccacaattcccatgtgtcatgggaggaacctggtgggaggtgattgaattrtggggggcgggtctttcatgagctgttctcttgatagtgaatgagtctcatgagatatgatggttttaaaaacgggggyttccctgcacaagccatcttgttggctgccatgtgagatgtgccttccaccttccatcatgactgtgaggcctccccagtcaggtggaactataagtgcaataaacctctttcaattgtaaattgcccagtcttgggtgtgtctttatcagcagcatgaaaacggactaatacaatayagaaggatattctataacattggttaatgctgaaactaaaatgtcataaargaccactgagggaagctgagaatacccccatcctaatatacagcctcttgtttgacccttgcagcagtcccatgaagtacctcttattatgccacactatggatggtgtagctttgctttrgaaagggtcaataacttaaaattacacacctataatataacaaagtctgcatttgaacccaggtctgtctatgtggtaataaactgctatgctataatgcttttaaccagagagaaaaaatcaaacgggaaaatccagtctactcagaatatcagcctggaagtactgcctttcctgaaaatgtggctttactggggctgccattttgatgggtttttagcaaagcgcccagtacctggtacgctctgcattgtccaatagcataagaattctgttagcagatagcaagcacctgaatcatctggaatttgtaccagaggactgttatctttctgagaaagtctccaagtttagccattgttatgctattttatagccctattatttcagagcagatacgccatgtaaatggttaatattttcctagtgttcaccaaggagctacatcctatagttgtaatttggatgtaattttttgtggttatataaatacggctctatttgaagtgggttgaattagaaaactcatgaataaattccttgacataatcagaattatatggcaaagaattgacctactttgcaggaaggctcccccagagttccttagctgatagtatgttaacccaacagagaaatcttcctgctaatagcacttatcagagaagattggaacctgtagtttgtcaggtactcaaaaaaaaaaaaaaaatttaaagtctgaaataataaaaaaaaaccctgcctttctttaaattttatttcaactggaaatataaatgtacatccagttatagatctttttatcacaagttagcataaggacttttcttgacattggaatacagtttgctaattggagtgctgcctcttggtaatgaagtgtataagcataaaacatatattctttgatttccagttttgatttctttaaagtggagtaaggatcttaaagcacttggaaagtaaccaaaatgtcrcgtccttctgagtccgtgtgctctgttgggggagtcatggagagtagcattttgttttaacaagttacccttttaaaattatttttaaatattgaacttgaayttcatttttcatagaaataacttcctttatttctgtactcatgtttccctgacttacaacatacctaactaattatatactatcccaactagtacaattatcataaacaaatttgggaacagaagtgtatgagattcttagtaagcgtctaacataggtttttgattgaaacagaaatcaagtagccttcctggcattcctgttcggagtagagcyagcatcagatagtgagaaagaagagtgggggtcaatccaaagcagtggtgagcctaacagaccttctcctgtacttcacctacagagctgttcagaggactcaaggcagtaaagtaaagcatataaataaagtgactggtattttaaaaagtgatgagtacaaagcaggatctcagaaaattataacttaatctgttcttcttgtttcaccctgtcaatccaatcaatacattattgttggattgttatgattggtttaaatctctagtttttctactagattatgagcctgctgggaataaagggcatattataatcattttgttctcttttctatattgcttagcacctggtagtccttctgaaaatgcatttaaatttattgcagtcaaggattggcataacttctaggggacagcaggacaatcctgggccaggtctgtatctggtattggaatgcccagagcagatattatggaatggttgtagagagggtggggtaagtcatgaaataccaatacagatagcaagtctggaaggccagtgatggaatactgataggaattgtggggcaagaagttctaaatcagaccagttttctccagctcccactctaggaatttccttccttttgtttccttctatcctgcttctagctaagatcagtttatcaaatttcatgtagctgtttcctgccaggcaagaggatgcttgcagaagtaaccaagcataattccaatccagggacttcataagggcagtgatcataccttgttcattttwaatataaaagataaattagatatttaattgggaaatcccatgaaatttcagacttacaaatcaaacaattaagaactccatagccccctgcaaggaatgaaattattgtaatttttccttcttggtgaaaaaaaaaatgtactctctaattgctgggaactctgttaataagaatcaaatcctctttatctaaaccatatctaaaaggtgaaatgctatttgggccctatgccaagtaacaaaagaaaatgtcttatatgaaatgtttgagagaaagaccatttttgtttcccgattaagcttgccttaatttaagaaagctctctagtgctagctgtagaatgtaaaggttgagtatcccttatctaaaatacttgggactagcagtgtttcgggtttcagatgtttttggattttggaatatttgcrtatacataggagatattttgtgactggcacccaagtctaaacatgaaatttatgtttcatataataacttacacacatagcctgaggataatattataccatatttttaataattttgtgcatgaaaccaagttttgactatgttttgactacgacccatcacatgagttcagatgtggaattttccacttgtgatgtcatgttggtgtgcaaagagtttcagattttggaacattttggattagggatgctcaacctccatttttctccctcatctgcttctttctctggcatttagaatctcttgaactggaagctgttgctggctttaataccatccttacttggtattcacactgctttgggggtaagtagctggtacccagggtgtggcacctctgatcactatacctgtgacatacagtcctgctttactgatgcttggagcttcagaagaacctttatattatgaaggactaatacttcataattgttgtcagtggcaacaggtagactaggcacccaagcattttactatggccttgatagttcaggttagcagtatgtagtggaaagggcatggactgggtgattaaatacaggctgaaatgttagctccatccttgctgtctatgcatgctataacttggatgtttgacccctccaaatctcctgttgaaagttgatccccagtgttggaggtggggcctaatgggagatgtttgggtcatggggcagattccttgagaatggcttcatactgtccttgtggtaatgagttctcattccattagttcccaagagagctggttgttaaaaagagcctggcacctcccaatcctgatcgcttcctttctttctcatcatgtgatctctgaacacgctggccctccctcaccttacaccatgtgtagaagaagctcaaggctctcaccagaaaacagatgctgtctatgcttcagtctatctacagcctgcagaaccatgagccaaataaacctcttttccttataaattacccagcctcagacatttcttcatagcaatgcaaatagactaagacaatgccatttggccaaatcatttcaccttactgagcttccacttctttatcactaagaagagaaacatggtcttctttcttatggaattgttttgtagattaaatgagctaacatgrataaagcacctgtggcatgggttgcattgtgctaccccccagtcctcattcatatgttgaagtcctaactccctgtacctcagaatgtgaccttatttggaaatagaacattgcaaatktaatgagttaagacgaggtcatagtgacttcactatgactggtgtcctcataaataggtgaaatttggacacacagatagacacacagggagaacatcatgagaacttcatgtgaagataatagcagagatcaggataatgtgtctacaagccagaagatgccaagrttgccagctacccatcagaagctaggggagaggcatgaaacagtgtcgctcccagtctttagaagggcccaaccctgccggcaacttgatcttgaacttctagcctccagaaccatgagacaatacatttctgatgttttaagccactcaattcatggttccttattactgcagccctagcaaactaatatacacctgtcacttaattttatttctttacctttctyccaccacataactccttcttgtttcctttaaatatattcaaatcagcatgctgcaggacataaactgtgcagacataaacctaggtgtataacacatcctatttctgaccctctacggagaacatagaagagctgtcctgttttcctatgatatgtaatatgtatttttttaatcctctgggtagtgcctgcagtaatyttctgtgcacacatcctgctgtggaagatttgacagtaagaactgcctcatgaggccaacccaaaaaggaacagcagatataaacatgtcgccattcttgtcattttgaaacaacattatttaaagtrtcccagatagttgggaaaagaggaactcttttcttctaggccacttgtttctcctctagcagggaaagatctttgcaggtgttgcagagacagcaggagttatcaargagaacaggtttcctgcaaacatcctcagtgatttgcattgtactaagcaaacacaaaccacctcacttattcatattaattgagcagttttaaaatttaaagtagtattcctttggggtttgtgatcaaggctgtgccctagtgcttcactggcatcttcttgaatttggccctatttgatacagctttgctttctgttgatgttacatggaaaaacctccacctggctagacaatagcaccagtattgctactgtcagcagctttattgtaaagaaattccaactctgggaactggcagcactgcatccattgactctggggagattcttccagccacrgcacaaaatacagctttctcttttctaccaagccgtatygaactctttgccttgatctaaggacctgggatctccactccttcaagtgttctaggcagcagtgagggagccaggaccctgcagagcaagccacctgcaggttgcaaaattccagcagagattggatttttgaagtatcaaaagcctcacacctgtgggtgatctccacgcagataccgcgagcaagagtagccaacccctgacccctccaaaactcacatctgtatcagcctttcagggaagagaatgatcccttttgttttcctagacatttcaggaataaaaagaacataaggtgtgcatagggttgagagagaaaagggacaatggagccatatcagagagcacggaygttggactcagagacctgcattccaatcctgcacctgccaagcttctagctgggaaaccttctcaaagcccctgcacctccctgaatctcagtttctttatttrtaaagcaggttaatagtaagtacctgacaggtctgctaccaggattatttgcaatgtgtwtgtgaatatgccttgcccttgtgtgcctacctgtcaccctcttttctctccctccatctcttatgtgtcacatttattaaacacttattatgtgccaaacactttgcaaagtatgtaatgttcattaatcacatattgcaagcaggcagtgttaaaggaaaaaattatttaatgatacttgtaaagcatggtaagggctgggcatggtggctcacacctgtaatcccagcactttggaaggccgaggcagttggatcacttggggtcaagagttcgagatcagcctggcaaacatggtgaaaycttgtctctaccaaaaatgtgaaaaaattagcyaggtgtggtggcatgcacctgtaagcccagctactcaggaggctgaagcaggagaatcgcttgaacctgggatgcrgaggttgcagggagccgagttcacaccactgcactccagsctgggtgacagagtgagactctgtcttaaaaaaaaaaaaaagaaagaaagaaagaaaaagaaaaaggcatggtaagatggtaaggcagactttactcagaatcatcacagatataaggacaactgcagtggcgtcttgcagttggggagagagattgggctcgcctttaaatatagcatgggcaagaaggaatttatggctgaggagcagggtaggagtcagttaatagaaaattactaagaggaaacatcaggggaaaaggagactctgacttaaccacctaaaaggattcttgctgaagacaggccagggaagccagataccacctggggatggtggaggataaggagcctgattagttattgaggatgatcagatattgaggattgggggttctggctaaactgacttttgcagggttcttttgctacaattggatgttatgaggaagtacacagaagggtctaagagaagtttcagaggcctgatgaaagcatggctaagcaaagaatctttgtcaacagtatcttgttaatggttaaaaaggacatttcttggggtcagataaattcccgttggctatgtaaccttggtcaagtctctttacctcttcaagccttggtttcctcatctttaaagtagagataataacagtgactacattatgggatcactgagagaaataaatgaggtgatgcttgcaaaatatttagcacaaatcctggcccttgcaagtgttctgtaaatatgagtaaagataataataagagaytgttgaagagtgggtttctctataacttcctaagggatacatctacctgttaaggttgtcagacaactcagtcggtgacaagattttagttgtgtttagaaaaagttgttttgtatrtcartttctatggtgtaacatttgtgtttctatttcagtttaattatttgtctttattctattatttttaaatgtttatttacttatttatttatttgaggcagggtcccactctgttgcccaggctggagtgcagtggcatgattatagctcactgcagcctcaaacttctgtacctaagtgatcctcctgcctcagcctcctaagtagctgggactatggcacatgccaccatgccttgctaattttttaaattttttgtagagagagagttgcgctattttgcccaggctggtctcaaactcctgccctcaaatgatcctcttgccttggcttcccaaagtgctgagattacaggtgygaatcactgcacccagctgatttctctctatttcttaagaaactgttcaatatgaactaaagagaaaggggcatttggtaaagcctgagaattgatagattgtgaaagrgagatcaagggaaaaatcrcatttggggaggaactacatttattacttaagggtgaactgggaggcgagacaaccaaaaaatctcaagaccagkgaawgggaaggtgacaggtacagaggtgacctggcagacaggataaggggagctcttgttcttgacagaggaaatggtacagaaaaattcacagatgtgaagacatatgggatgtactctgggacttgggcttcatttggctgaagcaaaaagcatttgcaggggaaaatgggagtaaggataaagaaatgaggtgtcattccaatgggaaagactgtgatctccacaagagcagggaatttatctattgggttcacctccatctctctgttgcttactagtagatgtacaataactatgtgatgaaatatttttaaaaattgatcagaagttttcattttattgggtttgaagggaagtgagaaaccactgacatttcattttgaataatggaatgacgtaagaatacactctctgaagagtaatcttgtcattttcaatcagatggattggaggaagatggaattgtaaacaggtagaccagtagaccatataattatctaggggagatatgagtgtggtgactgttacgacattttagaaatattatctgcaacttttacaatctctgctagggggattttaaggaaaagaagaaatcaaaagtctctccagtgtttctagcctggacaaagtgtagactgcctgtgaccttcattcactggacaaatgttacctacattatgctggatattttgctggacactggagatttaacaatgctaagaattacaacaggtataccagacctgcaagtcactgcacaatatgctgagtgctgtggctaatgttgccacaaatgagttattagattacggtgactacactttaacttggcagggtaaggctacacaggggaggtggcagtggaactgagccttgagtgggaaaaactggtttgggtaaaggagaaattggtaatctcagttctggacagattaaatctggccgttgtaaaacattcagatgtgagcattagaaggcagattaaacggtggatgtagagctcaggaaaggagctggaggtaaatatgtggacttggacagcatctgagagagtgtgagattgtcaagtgaggaaagaccctggacacaccacaagagaatgctccattaaggatctagaagaaacagtgtgcaaaggatgagtcaagaaagagggagaaccaagatagtcrtagaagcatacaaggggtgactcttctaagaaggasggggcagtaaagtgtccagttgcatgcagagactaaagagtgagatggaagaaagaactattggagtaaataattccttgatgactttaccttcctgagagcatatcccatgtcatcaaccctccatagtggtcttgctgtggctgtctcgtttgtaatgattatggaaccaaattatttaatttgtagactatcaagttgctttgatatttttcacttcttattgataacttttcctaaaagagtgggtgagagacttatattcccagcctcaatttccctcacttcaaccagagtgaatttctctgtaatgcagttatgactatgtaataatgtaatgttcctgaacaaagacatacttaatatgaatggagaaatctgagctggcactcaaatttctccaaaatctgagcctgaactgcacaggtggtggagcatggtggagagactatgaactttggagtcagacaggcacatttgaaagcagctccccttcttcctggctgtctgacttggacaactgatgcctctctttgagtttcttttctgctcatgggcacyattcctgacttatgatgggtgcccaataatgtggcatagtcactactgtgcagagttagatgtaaggtcttttacaacagcttttctggccttgaatttgcctttaaccctagttgggaatggtcctctcatctcctcacactcagataaattgtgcgtattatttgagacctgacttcaataccacctctccctcaaaactttcccagacaaccctggttcaaagtcatcttttctttctccaaacccctatgatactgcccagtataatatatatgctagttattcctgggctgacctgggccatgacttctattgttctgaacttgtttttctaccttgattacttgtttcagttttcaaaggtttatgtgttactactctgacttgattgtaaattcctcgaggttatacaaaggccttataatttagtgcacctataatttgtatctctcttttcttcttcttttttgtttttcaattctttgcaagacatggtctagtagggaaaatacattatttggagtcaaggagagctggatttgaattaattggcagccaaatgaaggttgcatgatatggaagaagttacctgtctattgtaagcttttttaactcctcatccaccaaattaaaaaaataacaatacctacctcatagggctattgatggcataaacatagcataattgcttctccattatgatgtttattaccacctacttggaccttactgagtaaatatgcaataatgattatttccatttgttaggattcctttaaaagatttgttctggagtccttagcatcccttagtcctccactgaaatgctgcctgattcatgcagccagccctgacccatccatcagaatgtctaactcttcctcggtgcttcctttgcaaattggtggcacctctatttacatttcatcttaacctgtgtttcttccagtagactggggacttcttaaaggaggaaattttatcttacttatctccacagggagaaaagagaggtagagtggaaagcaaacagatgtggaaacacacatagctggggtgaattctggatgaatcacatctccttattggctatgtgaactctgggcaagtttcttgatctcaaaaagcctatttcctcctctgcataaattgagatcatactacctcttagggcagttgaaatttttcttcaggctaaatgaaaagtaatgtatgtgaaaatgtttatcactgtatctggaacacaatagatgtttaataaatggcagccccagctccttgcacaatggcagtcacataaaagatgctcacaaaatgttgactgaattaaactaaatgggatttaacacttatttctgttttctattgattgttttatcctattactgctcattatcaaaatttgtcacatttttcttccaggcaatttgctgccatggtttaagaagtattaagatcatgtttatagaccatattgagctctttggaagggaggtacttttttgaaattagcaaggctgtgtaggttttcatgcttttgttatctgattaaaaaaaaaacctattttttcttttgtttgcagaaaggcgacaaaaaaagttgtttaggagataattggctgttacatattaaattaattaaatgctaagccatgtkggggaatgaactacaaaatgcggcaatttgaggtctggggatgaaagaaggggaaagatcatccaaccgaaactttctctttttatggctgtattgcagttggaaagctaaggagggagaattagggtaaaccaagggtccctggggcagccaactgtggtgagactgtctccatcccttcccttcagcaagtacagagtaactgtctccctgccaccagatatacagaaactcatgtctggtattagtgaaagttttctagttgcaagtaacaaatcaacctgagtagacctgactgtaataggagggcatattataaggaaccagaggtgtctcacagaacccaaggaagggaatgagtaagcagagcctctgcaaagatgacccaggaatttggaatcagcaagagccccagcagtgctttctctctgtggtcacttcttctttcagaacatcctttctctttgccttttcataagattggcttcctcttagccaggccaatggcaggaaaagatgactactcagaattctacatttacatgttacgatgctggtcactaggtgagattgactcctctctctgcttgaatacccaattccccaggaaaaggctgtccctaatcaacacagcttggattggtgtcaccatctccaggtaaagtcatgctgtataaacatggtcactgtggttctattgctggatgggagggtcagctggtggttcaatcaccaagatctggagggtatctcaaaaggtgtctactcttgatgaatgagacaagtcccagctctcatgaagtcagtgagatagaagcaattttaaaaataataaatcagttgagaaataaacaaatccccaaaattctgtggtgcttttatatggtcatatctgtgctaagaagcagcagccatggtttttcagcattgacatagttcaatctgaaatttggcactaaatttaaactgaaaggaaaggaactcatatttatggagtgtctatccaccagacaggccaggcactttcccttgtcctcatttcattccgagacctcaaacctcatattgtctcttccatatgataaatgaggaaatgaagttcccagagaatgtgactgcccaaggttacagttccaggcactgaaacttaatcaagactggacccaaactggcagagcaggcatttggaaattgctctctctgctctgaatcctgcatactctccacacaaccagaatttgacaggccttcaatggaatattaaggcaccaggttctyttggcttttgatgcctttgtattaggaagtgaccctgccttccactaaggtgctcaagccaaaacccagagttacacttgttcttcccttttcctgtctcttccacaatctaaaaataatccctttctgctcttcctccagcatattttttgattcagcccatttcttatctagtgctgtcatccttgtctcgtcactcatctggattattagcccctgcttctacttctccccctttccacagagcattcagaaaaatctttacaaaatgtgagtcatgcccctgcataaggtaccgccgcccccaccaccagcgtggctttccattgcactcagaaccaaacctgccctccttaccttgcctcacaaagcagcacacgagggagccctgcctccctcctgacttccacctctmacccccttccccttgcttgctctgctgtgatcatactagctcctttctgttttataaacaggccaaacacattccctcctggcatgactgcccttttcttgttcacatctcctttcaaatgtcatttctacagaaatgccttcatggaccagcctgtctaaattaattgttccccaccctttcccagtcactccttgtttcatcagactattttatccccttcataacacttatccctatctggaatgatcttgttcattatttatttacttcctcattatcttccttccccctctcagatcagcagctctaggagagcgggagcttcctccctctggttcatgactgtgccctgggacttgggccagtgcttggcacgtagtgggcattcagtacatgttggtggaatgaatgaatattaggctgaccatgatagaaatccagggagtcagggctgaggcctgtgcccttgcattcattaggaacaactgtcgggtggggacacttagtcactgtctcttccagcacattctacttaaaccctctatcactgagatttatctctgagtttaatcaaatgtaatttatattgcagccttctcagtaaataattgatttgcactctctgttttcttcatcacaaatacccctttgtactctaaagaaataatttagtcagtcaatagtataacacagcactcttgtttagaaggcagatggaagataaaacataagagttgttcacaccagaatataccaagaccaaaataatctcctttacaaaaaatactccgcaaacaagttgctggcagagacacccacttaaatcccttggattttttctaatggaggtgaccccatggaagttgtagctgctacagaagaaagtttgtggccaattgcaggttgcacgtgcaaatagaaactcttgttcatttgtggtttaattaacctctgtctaggtccaagagcaagccttcaaatgcctagtgtgaacacacattgggtgagagctctaagttaggggttctgcactgcctatgacctcagactcactgagtaaatccaattctcctgcttcctccttctttkcaattggtccctcaggcttccatgggcaatgtgtccagagcttacgggcattcttttgtaatccaaattatacaaacactcctcctttgcccttctgtgcttctcccaaagcaagacaaccagagaggtaaattttgcatttgttttcacacatttgtctattttgagcccacacttttctggtgcagaagaaaggaggggaagatgatgaagcaacaactctgataagcgtgaaaggctccaaggaggcattctcgcagggaaaatgcatcttttcactgcctttagtaagaatcctcaatattgttttctttattctgttttcattggaaacatcttaactatccaattataggggactgcttaaataaattgtgatacatctgtaggatgggctattgcacagccaataagaatcatgtcacaaaaatatcaatatgggaaaacatatataatttacgctgccagatgaaaaaagcaagacacagatttatagtatgaactttttttttttttttgaagaatgggtgtttgcgtgtgtatgcacttagggaaaagcttggaagagtatacacttgaatgcaaccataaatgtacctgggtggtgttatgggtggctttcctctcctttttctcttctacactttccaaatgttaagtcttgaacatgtttccctttgtaattagaaagttaaaaaaataaaaagcacttgtttaaaagaactgaaatacaaaaattttaaaaatacatttgttattttttatttggaaaaaaggtcatattcactcctcatcagctaatacgactttgtcagtgcctggtacctgttattatgtgyattagccaaagggaagcaagttgtgaactttagaaaggcaaatttcactgcatctcctggttctggtggtagtgaggctgcctttggatgggtgatcaccctgctctgtcttacaggtgcagcccagctgcccaggatggctggcaaacacgcaacagttttgccgggggactttgagttgcctkgggtaggaaaagttttagctctggttgttctctttwgattaggcttagcctcttggaatctgatcagtattagtttacattatctgagcactcggtgctgcctctgagcaccacgcctgtcattcttggattattgcacgaactttctggcttgtctctccatatcaagactctttcagactctcccccaaatgcattgattttgtactgtctttggtggagtccctaggaaaccagtgactgagacaaagatttgctgtaggacactacagcaaattcccaataagggaatgtcctctgaatcagaaccgctggaggagtgaaggtggtaggctctggcagagggaagagttgaaccgtgatgcagttgcagcaaaggcgtcacctgctcccactatcccgtgggagttttccttcaggattgtctcaaactgagacatggggcctgggtgtttatacccagccccatctaatcaaccagttattgattggatgctgctactaggaggagggatatgattgcaggcagttccgacaatcatcctgcaaggtaagcattatttcctcaattgtagtgagatgaagtgacttgctcttgaccaagaagatcctgaatggcaacaccagatgagaatggaggtttctcctggtatctgtcctttctcattcattaccctggtcctcttcacctttgactgtagatccagctttcctgctgtatttcatgtgcatcattcagccttgccttcatccgtgcagcaccacaaccaaaataggaccctttggttacaaatgacagaagcacaaataaatatcatgactgtggattcagatctggcctttccctgtctcatgcagtcctatttcttacccagcctcaagctttggattctcttcctttcagcattcttttctttacatgcctttcttttttagcacacctgcccctgcctttgctagctctgtgaacttgggccagtctttatctcctggagtctcaatttcctcaactataagaagggattaataatgcatgtcatgctaggtggctgtgaggaacaaaaggacaatgaaaaagaacttacatattgtttaaagcctattctgtgcctgccttgcagagtggtatcaacatgaaataaactattatatacctagtgtaatactttactcttaatggcaacacataccaaaaaacctgctttgtttcttgggcaccaggaaaaagacacaagcccactgatgagaaaatctaagaagcaaatgctgtcacgccatccttaggctgtgggtaagcaagtgtgtaaaaataaagctgcagatttaaagtcagactagtcactccttgatttgcccagatgagcaggataggctacgctcctcaagccttcatgggaggacgtcagaaagactcagcaactgatgattatagctgtctttaccgtcttaaaaccaagaggtttttcctttttttttttttttttttttgtcttgctgcttctaccttgtacgtgaagatattattggccatttttctatgattcctggctttcctttgtctggaaaaattgctgggagtcatagaactgctgagcctgattaatagtacctgagacctttgggccctgtgactgaaatttaaacttggttttccaatgttctaagacactatgcatatgtgtgttgggggtggcagggtggcgttggaaactctgtgtacagaaacagcaatttcccttttgatatatatttatttattcagcaaatattaagtacccactgtatgccaatgactgttcttgttgtatgggatacacagaaaacaaatttaagaaaatgttagccctcataaacttacagtctaccaaggggagattgtagggcctggctttttcttgctttaatttgccattgcatgtgggaaccaccaccagggatataagcatgcccttaactgatttggcatgatcatctctttagtcttttcctcagagaaactagaaaatggtgcttcaagagacactgctaggagatagtctaagggtttttgcagagacagaatgtggctgatgatcattttcttttgttattaagaatttattaataatgtcctacagtcttaaaatatatttttcaaatacaataaaagacccagaggaagaaaaaaaaaacctgaaataaatactagtagacctttgccagagaaatgcaaaaaggaccaactattggagcagaagaattgggttatgcatatgaggtcccacaagcgtcctgtcttataactcagtggttcctgatctggttctgcctcagaatcattggccaaactttaaagttcagattcccaggttctcagatgagaatctctgcctggtaccatagcacttcactttctacagaaacgtgaaaattgattccagatgccttttatgcaaggcacttttcagaagtaccagagaacatttttaaagaaaatgtgtgcatgagtcataggttgaatattattttagctctttaattagtttaccttttagcaataatgacagcaaccatgttcataaaaacacattttaacagccccctaagtgtgtttttcctcttgttctgctcactacccagctagttaattacataaaatcagcattctctcctacacagccagcatacataattatttgtccattgcaaatcaacacctggataattgcaagatagaatttagagtaaaataagttatctgtctgctgggccctgaaattcccccacaatctgttcttaaattggatagcctaacagacaatagggctctttcagcaatggacagaatgatgtttgacagccaagggggaaagtaaaacaacctttcgaaattttcttatcatcaggatggatagcctctgattcagatagatatgcagaaggagggagaatctctctgtgttaataatttacaaggtgatctccctattgccttcgggaaggaacatcctgttcttaattgcacccttattcccaggcaacaacaacaaaaaaatcccaaacagctgggaccattccttccaatgcactacaactttgctatggttagctttgggccactgatgcttaatgtaaaatatattacttggggagaaagaaggcagtaaatatttactgaatgacttccatgtgccaggcagtgtgctaagagcataacatatattattcctatggtcctagtaactattctacagaggaatacaggtaaccacaatgttttgcatatgaagagcctaacactcagaaactttaacttgcttatacacaggaagtagcataccgtgatttaaatgtgatgccttccgacctcaaagggttaggcagctacgccctccttagcagcgtggcctcgcaccaatgacttcatttccctgtgcctccgtttcctccttctctgaatgtgttgcagttctttcctccaaggttgttgtgaagtttaaataaaacaatttatgagmatgggacaggcatgctcatttctcaggtagcattcagcttttcacatctccttcctaattctagcccccattatggatcgtatgtttgtgtctccccaatattaatatgttgaagccctaactcccaatgtaataatatttgcaggtggggtctttgggagataattagctttagatgacatcatgaaagtagagtattcatgatgggattagtggctttgtaagaagaggaaaggaggccagggctttctctctctctctctctctctctctctctttstcagtgcatgcacaaaaagagatcttctgagcacacagtgagacagtggcaatctgcaagccaggaagggggccctcaccaacaaccaaatcttccagcacttgatcttggactgctcagcctccagaaccatgagaaataaatgtctgttgtttaagccatgcagtctatggtattttattatagtggtctgygctgataagacatctccttagatgtttaagtatctaatgcacagaagtgaatactcagcttgatataagaaatatgttggagttgacccctccaagacagggaaatattgtaactgtcaaaagttaaaagaattcacagccagaatgaccacattaggaaaaaaaaatacttatcttggctgtgcttattataatctatgatgagtgggagagataagataatagtcttggatgtgaaataacttttatttggccattaatggtctttagagcgcagcctggagtgggaggccatttacgactccagtggactctgtgggctctgcttcagtgtcataaaaaatgckaattgccttcctccttcggatcctgactcctgacagaggcatttgattttgttgaagcttctgcaaggtgactcccattctgggacctcaacattggcagagacttctgctgcttctgctttgagacagttacttagtgtacttcctgacagaatcttcgaggtctgtggaaaatggggaatttactctgtgcccagaagaatcggctggatttaaattcagaggagagccattcccccggttaggagatgatcaggttgtgatgaggttgagaaatgctcttctctaatggcataaagcaaagccaatattaaaatgactatgagtgtgatgtttattttatcccattaggaattttattccttgaggactaaatgaatcatacttatggactgtataaaataagatctgtatgggaggggtttttaataaccccttagatgcctcccccaagtggtcctgactcctggagtccattacccactttagcataaataaattaattaaatcattttttcagttattcagcagatctggacaccgcaggtctgctctgttctggcatcacgctaggttcagaggacacagtcaaatgaatttcagttcctacccttatagagttcaagtgtagaggagacagttggagaagaggaactagcaagggcaaagggcatggaggtgcctagcccataaggctggagttaagggtgggggcaagagggcacaaatgaggtgagagaataagagggaggagagcctgtggcagctgggtggaagaggataacatttttcatttttggtcagatagtgcatgatgagatgacacttggtgtggatctttttggaagcagtgtggggcatggattagagggtgaaagcggaggcacatctactgtgactcctggaagcctccagactcttttaagtgatatatatgtgtaccccagccctgctacacattaaagacagcagcctacagggttccccatgatccattatgaaattcaaaatggttgattcttagggcatccaaattgggatggaagaagtcaaattatcattrtttgcagatgatatgatcttctatttggaaaaacctaacaactccacaaaaaaactgttagaactgataaaccagtaaagttgcaggatacaaaatcaacatgcaaaaatcagtagcatttctatatgctaatagtgaacaatctgaaaaagaaataaaggcaatctaataaaatgaaatacctaggaattaaccaaaaaaaaaaaaaaagaaagatctctgtattgaaaactgtaaaacactgatgaaagaaattgaagaggacactaaaaatggaaaaatattccatgttcataggktggaagaatcaatattattaaaatgtccatactacccaaaacagtctccagattcaatacaatccttatcaaaataccaataacgttcctcatagaaatagaaaaaaaaatcctaaaatttatatggaaccacaaaaaactcagactatctaaagccatcctaagcagaaaaaaaaacaaaaacaaaaacaaaactggaagaatcacattacctgacttcaaattatactacagagctatagtaaccaaaacagcaccgcactggcctaaaaatagacacatagaccaatggaacagaatagagcacccagaaacaaatcaacacacctacagtgaactcattttcaacaaagttaccaagaatatacacttgggaaaaaaaagtctctctaataaatggtgctgagaaaattggatatccatatgcagaagaatgaaagtagaccctttctcttgccatatacacagatcaaatcaaaatgggtaaagacttaaatataagacctcagtctattaaacttctacaagaaaacattggagaaaatctgcaggacatgggtctgggcaaaaatttcttcggcagtaacccacaagcacaggcaatgaaagcaaaatttccatgtacaaatgggatcacatcaagctaaaaagcttctgcacagcacaggaaagtaaagacataacccacagaatgagataaaatatttgcaawctaccaccctgaaaagggattaaatataaggagctcaaacaactccataggaaaaaatctagtaagctgatcaaaaattggacaaagatttgaatggacatttctcaaaagaagacattcaaatggcaaacaggcatatgaaaaggtgctcaatgtcattgatcatcagagaaatgcaaatcaaaactacaatgagatatcatctcgccccagttaaaatagcttctatccaaaagacaggtaataacaaatgctgacaaagatgtggagaaaaggaaacccttgtacactgttggtgagaatataaattagtacaaccactatggagaacagtttggaagttcctcaaaaactagaaatagagctacaatatgatctagcaatcccactgctgggtatatacccaaaagaaaggaaatcagtatatcaaagagatrtctgcactctcatgtttgttgcagcactgttgacaataactaagatctgtgagcaaccttatttgttgtccatcaacagatgaatggataaagaaaatgttacatttacataatggagtactattccgtcataaaaaaggatgagactcttgtcatttgcaacmacatggatggaactggagatcattaggttaagtgaaataagccaggcacagaaagacaaacattgcatgttcttacttatttgtgggatctaaaaatcaaaacaattgaattcatagagctggagagtaaaaggatggttactagaggctgggaagggtagtgggggctgcagtggggatggctaatggtacaaaaaatagaataagttctactatttgatagcacaacaaggtgactatagccaataataatgtaatcatacattttaatataactgaaagagcataattggattgtttgtaacacaaaggataaatgcttgagagatagatactccattctccatgatgtgattagtatgcattgcatgtttgtatcaaaacatgttgtgtaccccataaatacatacaccggccaggggtggtggctcatgcctgtaatcccaacactttggaaggccgaggcaggtggatcacaaggtcaggagatcgagaccatcctggctaacacggtgaaaccccatctctactaaaaaatacaaaaaaattagccaggtgtggtggcggtcgcctgtaatcccagctactcaggaggctgaggcaagagaatggcgtgaacctgggaggtggagtttgcagtgagccgagattgcgccactgccctccagcctgagtgacagagcaagactccgtctcaaaaacaaacaaacaaacaaacaaaaaaaaaaccccatacatatacctactatgtaaccagaaaaattaaaataaaaaaaccaaaatggatgattcttagaaacccaaatgtctcattatgattgttagtttgctgtgactccctgaggatttttcaagttgttatgtctcattcagagagatctgcaaaaaatcattgtgagatacaggtactccccgggttatgcaagataatctgctggtacctgagaaaaatataagatgtctatttatgtttgattttaatccaaaaagttctaagaaaaagtaagctttaataatactatatggggctgggtgcggtggctcatgcctataatcccagcactcagggaggccgaggcaggcagatcacttgaagccaagagttcgagaccagcctggccaacatggtgaaacaccatctccactaaaaatacaaaaattagccaggtatggtggcgtacgcctgtaatcccagtgattcgggtggctgaggcacgagaatcgctcgaacccgggaggcagagattgcagtgagctaagatcataccactgcacgtcagcctggatgacagagtgagattctgcctcaaaatagtaatgataataataatatatagattatcagtagtacatgtatgtaatttatacagaaatatatctatcttagagttacgtgctcaaaaatgttttactaatagtggtatgtgattgtaaaactggagacctaagttctgtggatttatgaagacctgggttcaaatcctagctttagcacttaccaactcagttctgttcctagatttaacatatgtggacaaccaccacataatgttgctataacaataaactgatatatccaatgtacatcatacagttataaatattagttataaataaattagttataaatatattaactattcataaatatcatcgtatacaattatcacttggagacacttttgaaaccatcttttccctatgaacattcattgagcagctggggagattgaacctcaagggcaagtgacatcacataggtgaaggtacagtagcagagataacatctgaatccaggcctctttccttctttctttccaggcagttactgcttttctttcagggggcttggtttccaggcaactctatgatgctgcataacccctatatcttcctcctttggaattcaaatcagtgctacattgaaaattcaattctcggattacttgaagagccttggattgagatcccagataaagcattccctattagttgttggcaattagtttgtttatggaaccaagtgaagcaggtgtatcagagcagaaatcttcaaaccattcgatacaggattgctttcctctgagccaagtaggaaagtgttaaggatgtggtgcaccctcccctaccgcactggcactcctgacytgccagaggtatgctcacccagacagccacaaatgataccaagtagtatttctcacacttaaggagatcccttytaaagattagaaaagacacccggcatggtggcttatgcctgtaatgccagcacttcgggaggccgaggcaggcagatcacttgaggttaggagttcgagaccagcctggccaacatggggaaacctcatctctaccaaaaatacaaaaatcagccgggcatggtggcgggcacctgtaaccccagctacccaggaggctgaggcgggagaatcgcttgaacctgggaggtggaggttgcagtgagcagagatcgagctactgcactccagcctgggcaatagagcgagactgtgtctcaaaaaaaaaaaaaaaaaaaaaaaattaaacattagaaaagaaattttcaggtttttaagaaaccagagttgaagtctatgaaagtatctttgaaatatattattactaacaactttttttcttcacaaatttaaatttttaaaaatatttaagagattattatctatttgaaaaccccaaattgaaactttggaaagttttgttctgaggaccccagtctgagaaatatcatcttacaagggattctctacattgctgttctctagtgatctttgagaattactctgaatcaattccatctgcttggtccctctggctggtgcagaatctcactggaagggatttaggaacctgttgttgctgttgtggtttttacaggggattcttcattacactaaacttagaaaattacagcaaaactccattgacttcccactaggatataagttccctgagtacagggatatttatatgttttgtttcctgcagcatctggaggaccttagaacacgtatatagtagacactcaataaatatcaaataaaggaatgaatgaatcaattaattacagccttatacttccccacatgttgctatartgttctttttaatctaatcctcacaacaaacctgggtcattaatagmccttgtggtctaagaacaatgttcaaaggctttaacttggcttccaagatgcttcatgatttgtctgccctttgagtgcatcgctctagccatgccctctagtactgtgttttgcaagtacattaattggccctggctcaccgcagacccatctaatcaaaatctgtaaggtgccagggttttttaaatttcttttgagacagggttttcttatgctgcccaggctggtttcaaactgctgggctcaagcaatcctccctccttggcctctcaaagtgctgggattgcaggtgcactccaccagtataggctctggggtggtgtttttaaaaaattcccaaggtgattccagaagataattaggattgctaaacagtctaagccaactactcactgttctccaaatatccttgtacattttgtttatctggaaagcttctcaccttcttccctacctcttgaaaccctccttttttacaaggctttactcaaatgccatctctcctctgtagctcttcctaatcatctccctaccaaatacagtttctccaccccttaggaaaacacattgcttaacaaaatatgaccagagctgtgagtgtcatatagtgccaaggggtggagaaattgtatatgacgccttttgaaatgtggcttcctctgggcaggagaaaggacactttttgctcacccatgtaccactggaagctagcacagtgcctagcatgaagaacactgaggcaggacagtatacaaatgatgatcatataattaattagggtaaccacacagtctcttaaccaaactggaatacttttgagaataatgagggatgctagtaacaacagtgtcagtacaaaagtttctggggctgtcgcagacaaactgaaagtatgatcacccaaataacaatgaccaatgttgattaagctcttactgtttgccaatcactcactgtcttgtatgctatttgtcatttctttaatactgggagcacccattartatctatacttaactgcttaggacactgtggcagacatgtaaaggaacttaccaacgattatacaactaaggaggtaggtcagagagctggggcttgaactcaggtcctctgaatccagaactcatgttctagaccatcaaggcctattgtctctcagtgggagaactcaagccttggagtaggacaggatgagaagtaactttagttacctcttgggctccagtttcttcatccataaaataataacagtggtggttttcagtaaccttggaagattaaatgacataaggcataagaagggcatgtgtgcttgtgaactacttgtctttaagagtaagacgtctgccagtttatccataagacatctactcaagtagctgtgacacgaaaaaatgaggctaaattctgtagcagaacacagaggtaggtcataggaagccccatagtgattcctatggttcctatggttcatggttaagaccatgaaattttacacaagacctgggttcaaactgaggctctgggatttgaatagatatttctccaaagaagatatgcaaatgaacaataggcacatgaaaagatgctcaacatcattactccttagggaaatgcaagtcaaagctgcaatgaaatatcacttaacacctactaggatggctaaagtaaaagagacagacaataacagatgttgggaagaacatctggtaaagaaattggaaccttatattttgctaggagggttgtaaaatggtgcagacactttggaaaaacaaattgacagttctccaaaaagttaaatatagagttaccatatgatgcgacaattcctttcttcggaataattttaagagaattgaatatatacagccacacaaaaacttgtacacaaatgttcatagcagcattattcataatagctgaagaatggaaacaacccaaagatctatgagctaatgtggtataaccacacaatagaataatattcagcaaaaaaagcattactgatacatgctataacatggatgaaccttgagaacatgctgctaagtaaaagaaaccaaacccaaaaaattgtatattataaaataacaattatataaatgtctagaataggcaaatgtataaagacgggaggagattagtggttgcttagcaccagagggaatgggaagatagggagtgacagctaatgggtacagggcttctttgtgggatgacaaaaatgttccaaaattagatagtggtgatggttatacaattctgtgactatactaaacccactggattctatactttaaaatggtgaattgtacagtatgtgagttgtatctcaatatagctgttatttaaacattcaggttatgctgtggactttgggtgtttgtgttgtcttctgaaaagaggactcattatggagcctaactcaagagcaaatgtgaagattaaatgagaaattgcgtgtgaaacccttggcacagtaactgtactaaaaactcaataacagtgaccatatgggtgatkttccttaaacgtgtggtctttctcttgcccatcttgaagcagagggtcagtggtgttttcagtaacatagtctgggattcatggtgacctaaaatgcatgaagactgatcctattcccaacacctttatattgtatgtgcctcagatagaattaaagccttatggctccgatatctgttatttatttcttaactaatataactgagaccttgctcaagatgtactcatgaaaaattacccttttaatggtgaagcatttaatgagaaactggattatctactgcataagtgcccttcatacaaattagcttggccctaggtcctaatctaaattgggctccctactttcctctaaatggcctaatattttcttattaatctctgcccttgttcacctgctatggctctgccttctcttatgaatcttctttctcggcagagttctgtgtcctgacaaatgtttcttaaggcttctttgtatctgactcatagacagttttttagagatgactgatgactggaatctgttccattttcaagctgtctctccatccttccatggagttttaatgctgccaatgtattgagtaccatcacatttgggccaggtgagttttggtcaagataaagatggggctttataagaaagttgcgtagaaaagaagcaactgatcatggtggttaggcgaacaggcttgaaaacacagaacacaagcaaaccacaaacgtgggttttgacatgagacaaatctaagttcaggttctactcagtaagtttggacaagttacatggcctctaacactttcagtttggagcctcatctatgaaacctgaatactcgtacctacctctacaattattttctggacttaacaagttgatgcatataatatgctttgtgatgaatgctacctggtattgtgattataattaaagtttggggaagtctcagtggtgaaagagatgttattatggactgaaatagtgtcatatgttgaagaggaggatgtttagctatgatataaggtgtattatggcaaatgtccctttgttcttagctctagtctctgacattcgctcttacagaatgctgaggcttaagtattatacggattatagtttctgactaatcatccctgtgttatatttgctttgtggaatattactcaaaggctttaatatatgaggagtcagcaggggtgtcatggaaaaaacaaaaagaaaactgggggtcaggaccacaggtccagacctgtggctggatagacatagacattccttctctctgcctcccaccctcccaggattgtgtcttctacttgcttcttttactgggcttataatagtggtgatactcacgcctataatccctgcacttggggaggccaaggtggtggattggttgagtctgaaagtctgagactgggcaacatggcaaaaccccatctctacaaaaatatagccaagtatgaccgtgtgtgcctgttgtcccagctacttgggaggctgaagtaggagacttgcctgagcctgggaggtcgtggctgcagtgagctgtgatcgcgccactgtgctccagcctgggtgatgaagtgagatactgtttcaaaaaaaaaaaaaagaaaaacagtgggacagctaccatttgtagaaaagttaccatgtaaatacatacttcacacatactatctcactgaagttactgctcatgctaatgctgtaaggtagatactttattgtcatccaacacattaaaaaactgaggctcagacagttcagttgacttacgagagggacctatgattccaaacaaggatgtctgattctaaagcttgaaccttcttacacacttagcgtaatgcaaatacatttgtatttgcagtcaccaaaaacttaagcttctaagggcacagatattgtctcattcatctgttgccagtgaataatagcaccggtacagaggagatgctcagtaagggatgaatgaataaatgaatgaaatgaaagttgtgttttgtcaatagaaaagtactatatgatggttagtgattgctgttgtttttttctattttaagcatgtcttccgataattctcaaccccacaatatagaaaggccttagtttgcacatctgtagatagagggaaacaggctgaattatctctaatgtcctcagctctgtgtttctgacagatgaagtaagcatgatgaaggagaaatcaagagttgaagttaaggatattataggagatgaataacagacagaaggacactccaggttttaagaaccaactgtacaatgtccagacctctgactaatcaaagtatgatgaggttaatgatgggtttgaattcctatgtattcatcttatttcagactatgtttacttgggcaagctacctaaactctgtgaccttcgacttcatcatctggaaaatggaaatggtttgcttgttgtgaagagtggggataaagtttacagaacatctggcatgaagcrcttgctcagttcagagttaactttattgtcctcacttcatgtagatatgcttgagctcctggttgatgtgtcttagcaaaatattatcttaataattattgagagagcctgttggaaggtgcagacacacaacagcacatagtgtggaagcctattttcctgcacacatgacttaccagaagagatgtcataaaaccattttttgataactgtcctcaggtaattactctggagtttcactgtgaaagagctcatggaattgggtgggaagagggtcttggaccctggccaagctattattgaatgttggcaatgccagagactcggtgctcatattattctaacaacaatttcggacatgaactcttagtgggtgattatgatcatttgttgaatatctcttgcttatcaaaccctgaattagatgcttcacacatattatctgatttatttatcataataccctgttggggtggttatttttaacttatttttccctacctgagaaaactgagtctcagaaaggagaagtaatttgtctcaggacttaaatggatggagtcagaatttacatttaggaatactgctattcttttctcctgagtccagtgatttgactttccgggaatgtagatgaaaccagacagcggatcttggaattgtggatactcaaagccactggggtctgcacagctacatatttgaatctgctttttctctttttaggtcaggatcgcagtgaagccactttgataaagaggtttaaaggtgaaggggtccggtacaaagccaaattgatcgggattgatgaagtttccgcagctcggggagacaagttatgtcaagattccatgatgaaactcaaggtgctatgcaaacgttttcttttcaatactttgtgtttaatgtgaatgaggaaaagaagtgattaccatcataattgtaaataactttattcatttattggtaaattacttggcttactgttgaatcaccatattttttcattcggaagatatttcaatcattcagcaaatgtttgttgagcacctactatgtggaaatattttggtaggcccaggtttacaatttttgagtgtatcacattttattccattttattttcattttgcaactcctgcaaaaataaaagcamaaaattatcaaattgttttgtcmcccacattttatgaattttgccatcttgttatttttgaataaataatatatatttttgccatatggtaagagatgttaagataaaagttgattttattcattcttacagtttctacaaatgtaccccaagcactttaagataatatccttaaagtaaaatgtaattatattttgggatttggggatatcatgaagagatttctgattttaaatgctataaagaagccttttctctgaggaatctaagaaagaaattagattttttttttctttttttttttttgagaaggagtctcactctatcgcctaggctggagtgcagtggcgcaatctcggctcactgcaacttccgcctcctgggttcaagcaattctcctgcctcagcctcctgagtagctgggattacaggtgcacactaccaggcctggctaatttttgtatttttagtagagacggggtttcaccatgttggtcaggctggtctcgaactcctgacctcatgatccgtccgcctcggcctcccaaagtgctgggattacaggcgtgagccactgtgcccggccagaaattagaaattttttaaatatacaaaataaattattttattaaacatccttaaaagcatacaaaaataacacttttctcagattctgatgtccatatattgtttcttttaaaaagttataaaatattgaaaaaataaatggtttagcaagaagtmtacaaatatcatatgtatttcaaacatatattatttatttttctgattacagagttcacttatgtgcattatggaatattttgaaaatacagaaaaatrtaaggaagaaaactgaaataatccacaatcccacaaagacaatcagtgtcaatatttttgtgtataatttacaagttctttttgtggttttacatatataatatatgaattatacacatatatgtaataaaattggaattaaaatttatacagtttcctgtcttgggactttttccccttcatctaacaatatatatgagcatatatacatatacataaacatatatatatacatatacatatacataaacatcttcaaatagcccatgaagacatgactttgtcaatgaaatattttcaaatgtaaaagaaagaaaaggaaaaaaaaaagcttgttaggtgtgtaaaagtattaaagcctgtaaaatgcataaatgtaaaatgtgataaaatcggcatcacctttactttcatagatgctgagtaaatcagttattatttttgtttatgctatacaaaatttctagtaggttagcatatatatcagatgctatatttccttatagtatggctctaagaatcatgatttttaaaacttaattttctacactggatattcatttatatgtcttctttttatttgttaacctgttatataaacaaactttaatagttacgtatttactataaagtatactagaaaaaggcataaaagacatcaataccatgatttcacaatcaccttggaagaagttagtgcatctttttttttcaataattaagcaatgttatacaattttagggtagtccaatgatgagctttcttctcccaagttcaaatctgagtgattaatagacaagagttggacaggaagaattccaaactctagctttctgactrataaatgctggcctggaggatgtgacttggatacacagccacagtgagctttcttgaatgagatgagctattccacttggcttgcaggggtgttggacaactgcagatccccctgttctcccaacccctgcccttgcccagagtaggacccatgactcgtgcatgagatcagatgagaatgcagtctgtctttcagcaggcaaattgcacagaaagccccagaagagactgatctttgtatgttcagctgctgcttcaaactctccaattagatagagccataccttccatcccaagcggaccctagtcaaagatggggataagggccaagatcttgattattgctgaagtccctcctcaatgaatatgaagtctggcaagtggagatttgctctaacaaatcttaattaaaaggcatgaagaaaatgcaaagatctggttctcatccagagccacaaatctgctgaggaggagaaaagagctcatgctcccagcatctgggagatgaccattcaccaggatcggtcacacagcacctcaatggccagctgccttcttggaaacactgaggactaaaaggatttggcctctgctccctgaacattctcgctcaggattaacattggcccaagctagctggactaggcctagcaatggctgccaaccgtgtgtgtgtgtgtgtgtatgtgtgtgtgtgtgtgtgtgtgtgtgtgtgtgtgtgacctgcagtgaagtgctccatctgtcacctcttataaccatgaggtccccaaagccctgagagtttgtcctactataacatactcctgtcagatgcactgaacttgttgaggggtccttgatttccagacaattgtgtttcattatttgcaggtttctgagaagaatgttgacatttcagctcccagtggtttttctttaggaaacacagaaacataaatgatcaattctccatttggccatctgccaggaaagtaagagagaagtacaaaatacctcttacccttccaaaaaggcccacttactcacgttaggccatatgagaaataaaaaattctgtttcctttgctagactctctgaagctggtgcgtgttcttgcattagagagttttctcttggattgtaggggattgagaggggattcatataatgagtatgagtgacccattgcctgtctaccaacaaagcatcatgatcatgatcatcatcatcatttgttgacatcatattttaatttacaatccataaagcattttcacatatattatatcttttgatcatatgagatacatattagcttccctgttttgtgaagaagaaatctgagggtcagagaagttaaagtatttgcctcatagccttcatttaatctatgataagatgaattctaacccagacaccaagagggcctgtgttcgacaagacacagttttgcccgtaattgtattctgttttgtatttgcgtttaatttattgaggttcccaaactagatcttaagctcccaccagtaagctactacccagtagtcacatcatgcaccattgacttctaaagtagtcagctttcggagacggtggcaaaatggtggtgattgaagttaaggaaaaggatgaggtctccaaaggcagtgcctggagagctaagtgcagaaccttaagtatgtcagtcagagtcctgaaagaaccaaaatctaccccagaaagaccagatgaggatactttaatgaaggagttacttccaatgggtgggtaaatttaaggtagcaaatgaggggtggtgaggtactcagaatctagcaacagtgggaagctattaccactcctaggaagatatatatttactgaaacacagggagagcagaattgataagaaagtctccctttctcaccacacaaaatatagctactacyagagatgcaaatgaaggatgataagggagtggggagcaatgccctgacctctctctcctacccactgatctcctgcctctgccttgcattggtggaacacaactggagccatggagaaggaggctcaggagatcagagaatgcagttctagtctgtaggaatcagtctctggtcaaaaacaggacagagaaagatacttatattcccctttttaactgggaaaaatgaaacttagaatgaattttttccctttggttcatatagctggtaactagctagaactgagaatggagaatggagaccgggcttattacatggggctttctggaatagcgttctaaggttttcagaattcatgcctgaagcctgctgcatttacacatatgttttacatgttccctggagagcacagtcataacgttgggtgcatgtactgtgctgtgtgaatgttctcagagccctttcatgtacatcatacatctgattctcaaagcaacccctgagctgaacagggcagcctgtgactcttgcttggcatgcctgaccttttctctatatgtaacgtcctccatcgagatactgcctacttgtgactcccttgaggatgcctgtgtcaatcatttcacacagtgcctagcacgtggtattgcttaatcatatcaatattaggtctcaaaagtataactgttatttactgagccctccctgcatactgtgcgaagtgcagtagatgcatagtttgcttaagtgtcccaacactcttatgaggtgagaaacgtgaatattattctcattttggggttcctcttcagcactaagtttggaagctgttggttctacctagctattttcataaacttttggacatatttgtagcatgcatcattggtcattttttaaaaatctgtttcccaaaaaggggctcttaaagaagagaggattgtagtagaaggattcctaccttgagaatcagaaagatcacygtttgactttcagttctatgacttattagcccctttaggttctaggaggacatttgatcccctggccttatgtttcctcatctgtagaatgagggaggtaattcttacttcccaggattgtgatattgactaaattatacgatgggtaagagaacctctagcataggcacccaaggaaatgtttgactctctggtttccagtttccagwggtgacttactaggtcaggtggctaatgtcaggcacagagtccataacaggacctatatccacttcttttgactccctaaccagagctgtctcctgggcctctgttagttctgcacagtggccatgaataatcttgtggggagatgagcccgtcagtgtcctgaaggcactgtcttgtggcaggcccactctagactgagtgcagtttttcagagcttgacccagagtcctgtctcacaagaaaaacatgcttgataagatgggacttttctttccccaaagatagcaccttatggattgtccttctctttttcatttgtcatgtaaagtcaccatcagcagccccaagtggaaatgctcctggaacatgtatrttggctttttccatccttctttacctacagccatattctaccagggaattctttggtagctacttgacaccagcaagcaaagggggccttagtatctaatcagcactactatrtgctaggaattaattgctatttgatattccaggaaatctgttagctaggagctgttaggactgttttggaaatggagacactgaaacttctctccctgaccaaaggtgtagccctatccccaccctgtcctgtgctcttctcacctaaaggaagaaggaataaaaccagaaggagagagtctcctccgctttgacagtcctttcagtactttcctttaggaggtcacttyttagtccgtttgtgctgctgtaacaaaatgcctgagactgggtaatttataaaaaacaaatttgttttctcacagttctggatcctgggaagtccaggatcaaggggccagcaggtttggtgtccagtgagggccctgatctctctgcttccaagatggtgcctgttactgcatcctccaaagtggatacatgctgtatcctcaaaacagaagggcagaaaggggaatgaactccttctctgaagcctttttataagmacgctaatcccctctatgagtgttctacccttatcacttaatcacctcccrgtactatcactctgrcaatgaagattcaacacatgcatttgaggggacacattcggccaccatcaaggggctaattatttttctgatttgtatgtatcctggatagctgagattgaagattggggtggaaagggatagtaacatgtattattttactccaaatctatctgagaacacagatttaaaagtcaagtgagggaaagtcactttccttctctttgagttcctgctttacactaggctccattctcagccctgggcacaaaccaaataaaaaaagttccatgcacaactgamcttttgttctattaggcaaaggcagacaatcaatgaatgaatttgcgaaatgtcagatggtggtaacttccaggaggaaattgaagcaggaaaaacaaaggagatgcaatttggcataaagggtgtgctgtgttggctaagagggtcagagagggtggcattaaacagaaattaggagttacctctgggattccaaagacatactttggccatttctgcatgttccttaaaagcatcccacagtgaattcatgggaaaacaaggagcacattgagcaatctagaaaccattgaatgyggggagggattgaagagacagagaactctgctttgtatgtgagttaagagttactctaaccttttagagagcagttgctggaggaggggtcttatatcaatatggagcagctttgaaaggctgaaagaggaagattggaaggggttgtagggagagagacttaggctccctagaaggaaaacacaatataaaggataatcactggtcccggcaccaagtgctaggagagctgagttatagtctcagctctttgaccaattccctgtgctgtctcaggacggtctactacctttcagttcatcatttttctcatctgtcagttgagaaagttggatctattagttttaaggttttctgtggtgctatacattctgcatgtctgtgagtctgcaagacgtgcttgagaatgaatgggtgatgtgtgaaagagggaatttcctcctagcaggtgtctaaacaggaactgaaacacaaactgtaatggacattcatgtattttctagaagaaattaatttttattatatttcttcagtataccaggcattgtgctaggtactttaaataaatgtttatttaagtctcttaaccatgcaaaaaaatgatggattttacactggaggaagtgaaactaagaggttaagtaatttgtccaagattatacagaaccaggagtataacttagatattctgattccacagaatatttccaatacccaaggtgaggataatcaaacatcctcaacagaatgtgccttcctcatacctctggtcatacctactgctctctaacaccaaccattccccaaaactgatgctgagaatagcacatagtactttttgtctcctggaaatatgaaatcattattttagacttttcttcttctaaaagcccagaaccataactgctgagagttgggcttaatcttgccatctttagaggctggcagtaatgagcctctgccaggctggaagtctcaaggtccctaatgcatggtcagcaacagcacctcagggtgtagatcccttgaaaggtctttatctcccgagttgtaccctagtatggagcccatgctttcctgcaactggccaacacagaatctaatttcgaaagcaagtgtctttactcttaacttgaatcatatcaactttggaggactctggatagcacatattcatctagcaattatttgctaagcagacctgccctccacggactgtcctaagcactagagataaagcggtggacaaagtaacaccccaaccttttgtgaagcttaccttctcactaactcatagacatatcttcggcttataaaacatttgagacagtgaggaaacagtttttttgataaatggaatgtgagaatgagaggaacaagggtagtggtaaacacaaaatatctttggataaaaattataatcaataggcatttaattatattgatcacatttttttccagcaaaatggacagtctagcatttgtttttattttctattatctaaaattgattcatatgaaaactttttccagaattataaaaaataaaattatatgtaggaatatacttagcagctcaccttcatttaaaagattgaaaccatatctaatataaaacccagaaaagacattaatatgaaaaccatattgtgtctatcttgggacccccaattctgagctgaacatctagacaccattctataaattttgattagttaagtgagtgaacattcaaatatttctctatacaatgtgttagaaacactaggacaagcattaccctaaaacaccaaggagatgtgagcygcattgagtagagaaatatggaagtgcgaagggaaagcagtgtgcatgattggtggcattggttgatggtatcggacatrcctttgggaccagagagaattttcaaatgaaaacacttaagtaaaaacyatgttcttcctttcaacagggcrttgttgctggcgctcgttccaaaggagaacacaaacagaaaatctttttaaccatctcctttggaggaatcaaaatctttgatgagaagacaggggtaagtaaagcaatcacatggcattgtgaaattttatccattgacagatgtaccsttaaaagcctctactctctgggcaggaatatacaacaagcataaaaacacataaagcaactgacaaacttgatcaactctgatcatccatcaaagcaggtctctttgctgacttggccacagtatggctgcactgtgtttcttatagtgtaatggtgataaaagtgtcacactatcctggtaatctgatgggagattgatgagctttgaagatcaatgggtaatgtgacagtttaagttaaatttctttgtgcgttggcaactttaatgacatacgtcctagagggagatacatgtacatcttttgactcggtcaaagcatccagactctcttgagtttaacctggagcaccttgcaattgctgtaatcaaaaagaataaatggagttctcaatcttaaaaaagaaatctatcactgcacgaccaggaaatttaagggctgatacgtttgttgaacccaccaaagaagtggtttgtgttttcatcaaccttacagctgcaattaactcccagattcatccccagagctctcctgacactgtcagtcctgttcatttggggtaagaggaaaatagaaaaaccttctatgatccgttttccaagagaacaagagtcaaatagatgtctttttccttatatttattcagtgttttacagcttataaaacacctccacatatatcacctatcatgtacttcacaaaggtaatttatcaagcactttataaacaatacttaaccagcggagttacattaccttggtcattttgcattattattttctcttccttgttctgactagtatgaagataacataagggtagtaagatggtagtttaaatgtaaaaatggattttcttgaagaaaaaaggtatagaaaaattactcctaaataactagtaatagaatggatatttgtacacctctgatcataacggcattactttcagtagccaaaaggtagaagcaacccatgcctgtagatggatgaatagataaacaaaatgttgtatatacatacagtgaaattctatggagctctcaaatggaagaaaattctgacctgtgctacaatgtgtatgagccttgaagacattatgctgagtgaattaagccaggcacaaaaagacaaatattgtatgataccatttatatgaattacttaacatagtcacagtcataaagacagaaagtagaatggtgattgccagaggctagggaaaaggaaaaatgaagtgttattatttagtaggcatgaggtttcaatttgggaagatggaatcttttagagatgaatagtggttttggttgcacaaaaatgtgaatgtatgtaatgccactgagctgcacactgaaaaatagttaaaatggtaaattgtatgtcatatattttaccaaaataaaaaatagctaggtgtaactcgcattattgagtacctcccatgtactagctgtgtgttagtcagtttacatacattattcagtttcattcttgcaacattcctatgaggtgatactaacaatagctactttatcaaatacatattatgtgccaggcattgtggtaaatataagtaccaggtcatttaatcctcacaacaaccctaggatgtagatggtactattattctcattttattgttgaagacagcaaggacagaaaagtttacataacttgctggcagtaaggggtgacagaggcaggattagaacctaggcggtctggctcctgagtccttttgtttaacaatgatgcctattatctctcaagataaatcttttctaacttcacccacgttttgtattctttttctttttaaacttaggttcaggggtacatgtgcaggtttgttatataggtaaacttgtgtcacagggtttgttgtacaaattattctgtcagctaggtactaagcctagtacccaatagttattttttctcttcctctccctccttcactacaacctccgcctcccaggttcaagtaattctcctgcctcagcctcccaagaagctgggattacaggtgttcactagcacgcccagctaaatttttttgtattttaatagagacagggtttcaccatgttggccaggctggtctcgaactcctgacctcaggtgatccaccccaccttggcctccaaaagtgctgggattacaggcatgagccaccgcgcccagccttaacagtctttatatgagttgtcaagtaggaagaggagctgacttgctctgtgtgacctcaaggaatggaaccaagactaattgatagaagttttaggaggtggtttctgtttatcagtaagaaggcttttctatcagtcrgcagttaaatggactgccttctgtgtgagggagttcaccgtcgctgggggtattcaagcaacaaccatctgatgagatattgttgaagaaagtcaagtagaggataaagtgctggacaaagtcacatctaagttgagtccagagactaattttaagattatgttttctcttaaagtcatatctattgatgctttttatttgaaaaatctctactggaaattatgagcaggaacagtttactaaaccttagtcattgcccagcaggggactgactcaatgttcagcatgggttctaaatgaagtttttttttccatatcaaagaagtggaaaactgggcctttatcatttggaatgacagtcttagttgtttatctcatctgtggtatttttgctcaagcttgactgcactttttttaaaaaccaagaaaagaaacatttgcagaacgtgacaatagctaaaatccaaaagctgtcaaaaatgttttgatcccaattaaagagaccctttgcagcaatttacaccctgtcttgaatttcaaagaactcctgatcccaatccttatgtgagtgaattttgttttattattagcttgttgcagggaataaatcaatagtgraagctgttcatacatttagatacctagatattgctaatatatcatgatgttactaggtctgtagaccagacagatggatgacgaggaaggagttatgtcatcttcattttgcagataagggcagtgaggttctgtgagtgtccctgacctgactgttgactcagaacagacttttcaactccaaggctttctagtgaacctcactgactctattctctctccattcaccatgttaatccatagaattattacaactttatatcataaaaaatgatatatactgcaggactctaaaggtaagtctgtttcttaggatgaagggcagtggtctgcatcaacttttcaagatgtcgcaacatccttgttgccacagaaacgtgaattttgcttattcatttgaatgagccaacacttacttagagctattagacacaccaatctaagtatgctacggcaattctatgaagtaaatgctattattatcaccatttggcagatgggaaagccagggtccatataatttaagtcacacagctaacaaatggcagagcttggtagcttggtccagaatctctgatactagtgaggtgttactaataatagcataccaaattttataaatgattttataaaatcatttgatgcttttatctatattagagcagattccctattatctctgtcttattgtcactgttattcactttcattctgatgagctttcctgagtgaagacaaaaggggtggagttacaactggggctgcttcgtccatagtttgtcttggatagatagaatgttgacagtataacccatatatgattagacaatacaggttgagtatcccttatctgaaatgcttgggaccaraagtgtttcaaattttagagtttttcagatgttggaatattcgtattatatttacttaccagctgagcatcctaaatccaaaaatccaaaatgtgaaatgctccaatgagcatttcctttgagcatcatgtcagggctcaaaaagttttggacttgggagaattttaggtttcagattttttgatttgggatactcaacttgtaacatattagatccctactctatgccatgtgcagccctgtgtttcctgaggatttgaagatgaattggtcactgtccttgcccctgagatgctcatagttcattagtgaacccagactcacaaagtgaattcacagctgccaagatactgggatactctcacctcctacctgctatgccttagttattttgtgcacatttgccaattcttaatcacgaagtcatttcattttttatgtagtaagtattactgggcaccagctatgtgtgagtcattgtgtgatacagatacaagtgtgaacagagttgtccatgttcagagactggggtttaactttgccaagaatgttcctgaaaaatttcactgacttggcagtggaggagtgagttggagaggaccagataattaagtaagggaagagaaaacagcatttctaaaggcacagatatatgaaagagaaagatatatatatgcattcactcaggaaatattgggtacctgtataaagatagagataaataaggccccatctttttgttcatcactattgtctatctagctagcacaatgactcacacatagctggtgcccgctaatacttactacataaaaactaaaatgacttcacggttaagaatcagcaaatgtacacaaaatgactaaggcataacaggtaggaggtgagagtggcccaggattcaatattgtccctcaaaatagatagataattgtgttttaaatacaataactgcacttaaatttcagggctgatttaataatttattcctcagtgaaaaccagatgtcaccttatttgtgcctcatcaaaaacaagtctgttctcctttcagttcaaactggatgttttgagcaaggtttggagagagcaactgaggttgagaaagggaaatgtcccagggaaggagttaggaaaaagctgaggaggctgcagaacgtcacactgggacctggtgktctctgggactcagaagtatctgggatgttgctgtcatccaggtcagtgagacagtgcacaggactctcaaaagactggggataagggctagcctgtaaacatgacagtgtggtttagagcaggctttcatggatctgtctcatttacatccaacagttcctggaattttttattatcccccttttatagatggatcaactaaggtacaggtaggttaaatgacttcatgaagttccaccctggtcatttgacccccaggctgcactctggtcacccaaaagaaattgaattcaaattagaactctataatacctaagcttattttctttcttttgtttcagagattctcaacttgactggttctgtgtctctaaggagtggttaggaaatgtgtgtaggcagttttgtagtcacaactttttgcagaggggttggtaatgcagaaatttaattgttaaaagccaaggctgctaaataatctgcaatattcagggcagacacatatggcaaaagatattttcctatgctatatgactttctaatgtctttctagaaattcatgtagatgaaaaacctgttagtaattatgtgaatttaaaaagctaaccctatttagcacataaacaaagtattttacccatatacataataccgaattttccagaaatgcaactagactaagagaaagatgaaattatttctatttaaccaaaattttatacccatttactaacatctctccaatctccccacccaaccctccctctgataaccaccattcaactctctgcttttatgaattcagcatataagtgagatcatgtgatatttgtctttctgttcctggcttatttcacttaacataatatcccccaggctcgtccatgttctccaaatgacaggattttcttttttatggcctgatagtatttcattgcatatatataccacattttatttatatattcattcgctggtaccacacttaagttgattccatttcttggctatcatgaataatgctacagtgaacatgggagtgcagatagatcttcaatacactgatttcatttctttggatatgtacgcagtagtgggatttctgggtcataaggtagtttaaagtaatttttcttaatgtgtatgtatctctgtttactcatccataagatggagataataaatgtacctatgtcttagggttggtgaaagattaatttaatcctctaagacttagaatagtgcagagtaaaataaaaagctcgaggtgttaaataatattacattattggttatattgtcccatctcctgtacagtctttctatgtcctctaagcagaawtaagaaagccttttatgatgtccctacttcatcttctgcttgctgtatcctagcacatgatcatctgtgtcatactgagttgactcacactcccatcagactacaagctccacacaaggtaccctggatcatttattgttgtatcggccaggcctggcataggaaaccctggcatgtgacacagatgctaatcggtcactgaaggtaaaagggaaggcattcagggatggatagaatgaaacasagaagggaggaacagggaaacaatgactacgtcagcttacaatgaaatgctaattgtctggccctgatattggagcccaagatgctatataccaaagatgctagttttgccatatagacagtaaaatatccacgattcagaattatctagtcataggatatcagggatggaaggtcccttaggcatgaactaacccacacatttgcgaatgaagagatctgaaacccaaagagaagcgagccatgagatctccctataaagtatttgcaaaakcctagacttgaacattgctmtggacagatttgagtcattttctgatgctcacaaacaggaagcagggagtgtcctcttctttttcctattttttaattttgcatttcttttctctacaatctcttctctctagaccacccccatactctttgtgtattatattcaatgttcagggcttccactggcccatggctgccccagatctattttaatgtcaaatagatagaacctttaaggggaaaaattgggtctctgtgtggttagtgtcttgttggatgatacgggattttaatttatcacaataaaaaaaatcaattcgtagcccaaatcaacatatttttagaaattggcactgtcaggaacctgcctccatgagataatttacaggaccaagtctataattcatgacaggggaaaagggatgttacaatgccctggaaagtgagaccatgaatgtttccaagcagatttggtcaactcagaaattttcttgatgattcctcttatcagtcttggtctttaaaaaggtatggtggtagtattttctaagctagttgcttttacatgcttggcctcgtttaactcaatcctctaagcgctcaactaagaagccactcctcccattagacagatgagaaactgagacccaaggggttaagcaacttacacaagaacaaatatccagtacattgtggagctggaaactgatccccagatgatatggtgctaaggcccatgttctttccagttccaggcggtggcatctctccccttcatgggcatagtgagggcctcttgcaagcaagtgatcatttttctgctcaccaggggagaagtcagactgcacttagagttgtcagcatgcatacaggccctgtgactgaagatttacagtgactatttgggcctctgaagggatgtgggaggcactagtctcaaagatccagagcctcaaattgctggatgaccttggggatggctcatctgcttgctgtacgggcccctgtttccccatctgaaaaccaagggtcatatggcatacttttttttaaagggccagatggtaaatattttaggctccgagtgttatacagagtttaagtagtgcaactatttaattttgtcactgtggcatcaaagtcactgcacatgatatgtaaacaaatgactgtggctatgttctaataaaactttatttgtaaaaataaaggcatctgctgactctgttctgcttgattattaaggattcttctaattttctcattgtgatcccacgatgggtccatgagccctttggcattgggagatgaagactaggtgaaaagctatggttttttatcctttgttcactgctcttttgtggctgatttttgggatgagtgatgagtgtagagtgttttatatgaactttcaagataaatattcatctctaaagaattgtattatttatttatttatttatttatttwtttatttwtttatttttattttttgagactctcactcttatctcccaggctggagtgccatggcacgatctctgtttgctgcaacctccaccttctgggttcaagcgattctcatgcctcagcctcctgtgcagctgggattacgggcgcatcccaccatgccggctaatttttgtatttttagtagagatgagatttcaccatgttggctagtctggtctcgaactcctgacctcaggtgatccagccgccttggcctcccaaagtgctgggattacaggtgtgaactaccacgcccggacaggagttgtattatttattgctaccatttgttgagtactgattgccaggcatggtgctaagtacgtcatataaatttttgtcattgaattattacaatacaactattaattacatgttattgtccccattttacagattaggtgactaagactcaggaaggttaggtcacttgaacacaactactcttaaatttttatctatttattcaaaagctacttattgagcacctactgggtgccagggagtgttctcagggatttggatacattggtgaactaaatgaaggtccccactttgtggagtttacattctaaggtggagagacaaaaaagaaaaaatagacatacataaataatatactctgttagaaaataatcagtgttatagaaaaggaaaaaagcgaggcaaggtcagggcatttttccactgtacttcctttgtcctcatgaaagggcctgtgacatgtgtgctttgtaaatcacaaatattaacgtgctctgggagcttcctgtaactttgagggtcaactgagtaatggagaaagacgcttctgaaaattctcatccaaattccagaggctgttacacttgataaatccgagctgtccacttgggtgtctctgcttttatttagatggctgattgctttatatggagtctactgcttattgtttttctatctccctcatttattttaaattttaatttaaaactcattttccatgactgtgccgtggttatttaataggtgcttctatttttatgaagacactccttgcaggagctatttgtatcaaaatgatgatactgtaattaggcacagcactgctatgatgattctttgtgaacctctcaagtgctttrcagtgatggccagaggtggagaagcaatcatagttctggttacagtaaaggaacgtggtgtcatagaaagcaagggactgggtcaaagtgagaagagatagtgaaattcgtcttttagtggggagagttgtgctgaggaaatgcaggctggaacctggggacagggtgatggagaggagcccagggactgggtaaccaggattgagcctgggggctgggtgaccagtgttgcagacaaagggctagatttgccattagcaggcctgaatttgaagagttacttgttagaagtatgcatattgaactgcaatgaggaaaacgccaatgaaaacaatagtaatgataatgatcacgcttactattttgccagatcttgctgtaagagcttgacatacgtgtcatttcatacttgatgaatcactgaacctcttagcagctcagtgttctcctttggactatgagaacattaattagctagccacaacaattttgggaaatagaggtattatctcttttttgtggaatataacgccaaggttcagagaggtgcaggggcttaccaagatgtctcagccagtgagggggtgccctgtccactacattgtttcatactgcccctgtgtgcctgccaaaacaaagaaatgggtatgggtgtatccattctgttccagatgttacctacaacagaacgcttcaatgactgattggtttcctttctgtactaaagttactaactatacatacttaatttttgattctagaattaacagtgagatgaatttaacaccttcacatttttagatcctataatcagtcactacttttttcttggaattttcactgtttttctttaaaataagaataaccatgccaagctggtaaagtctctgcatgctcttctatttgcgatatgaaagatggggagaattttaaacaaagagaaacaaaaatgctagactatatgtgacttgagggcagggtccatgatttggtcatccttgtatctcctacctcctggcatgtgatcagctcctagtagatatttgtggaattgcactgaatttttcgttgtaaaagtcaagaagcctctggttcacctctttgtctagctatgcctataagcctttgattgctgtgggtggcatctgaactctaaactaccatctccctgagacagaaaatggcatctccaccacctcttctggtgggcttcagtgatacaacycactttattccagccacgtctgtccttctcagggttctttcaatttgtcgatgagtagaaggttgcrtaaaatgtattaaagcttgtgtataatgtgttaaatctcaacctttggtcttattgatgatcttaatgcataggtaacccattttcccctcatttttctttctatttacccatccatctaacttgccttcttcctttccctcatccttttctcctactttcatgtacatgtagatatactcaccttttttattgccatatgtatttttttcagagagattatatgatacctactatgtataagatataaagtataacctgctatagaagaagtataatatcttatgcagattgacaggaaaggaaagtaggtactatgtatggagcactacactaatattacagtgtaagttcctgaaggacagaaactctgcctgattatctctgcagcatatgagtctcacctctttcatttatcctgtgccctgccagaggagggagccctccccaagggcgggagtcccttcagggacctatggggtctgcgcctccaaattttgatgcctgtgtaccccaggtcctggagcatgtatacggaacatgtgtaaggatgaactgagggatgagagggaaaaaattagcctagcagagctgctgagatggtgagagatgagcttggggttgtcaaatcttctgtgctatggtgactgtgctgagtaaattatgcacactgactcattctgtcctcacaatcacactatgaactatagatattactaacgccattcttccacacaaagcaaagaacatgaggcatgaggccggggttggggggtgggagggacaggcattctgagcactgaggacaaaagacagtgattttttgatgctgactcaagcctcaagcctgacagtctgtctgatgagcacaaaatcagatgcagtatgcagccatttcagccctaggcagcttctgtattatggcttcagccaaatatttctattgtgatcaccccaattctcagtcccatctgcaggagcctcattcatatagttcagggatttacctgccagactagatttgacttctaaaaactatttagaaaattaggagawtgcaaatctgcaagaaattaccagagaagtgtggcctcaatatttaaattaaaaatgccagcaactctaaagcctgagatctgaatctttcatgatgtctaagagatgtgcagacattttaaagttatatatttaaaattttgaaaataaagattttactggcaattgtctaaactcaagacagttataacctcacttttgaggagaagatagttcatcttccatataaatggctccaacgagagtgtctgagactctgagatactgagatgcatcatctcatgactctgactgtgctgtatgatatatttacccatgtgaatagacacgcatactctttcatattaatttccatgctgtcaaagtctgtgtctatattttcactcctttatctgtgtcctatggtacaatcacctttgcactgaacaaaaacttcttcatctgatacaataataaaaggaatgtcttatgtttgggaatctttttttgttgttttcaaagtactttcactttttccttaccactgatcctcacattaatcttacaagatgcatatgacacatgcagttttactggtggtagacctgaagctcagagtgcttaattgctggcccaaagttacacagtggtagttgatagagcctggtccttatgcttttttcwgtttataaaagtattatatatttattgtagaaaatttataaaatgtagaaaagtcataaagaaaaaaactgcaaattatgtgaaatctcaccacttagatataaacccaatcaagatttttttgtgtatatatcaccattcttgtttacataaaaataattttttcaaagttgaaattaaactatacacgctgctttgtaacctattttttacttatccacatttttccactaattattcttctacaacaatattttcaatcaacataaagcattctagcataggagtataccataatttagtaaaaaccatattgttagccatgcaggttttatctgtatctttgagcacagctttgaacactactgtcattatttccttcattgaaattctaggattactaggtcaacatgtgtggatatttttaaggctcttgggctttttttgatcaaattatattctaaaaagttgtactgctagatgtatgatgccgtctgttttaccacatatttgccagcatggagtattgtcatttaaaaaaaattaacttattgatattaaactttagtttgaatgcctctgtcctaatttcagaatctgctcataatggtcactatagggcagcaatataattgtaaagtagggcttttatactgatgagactaatggtcctttggctttacctacaaatctgaatgacgccaaaggatattaagaattgactgaagttggatttctcttaggacttggcctatcattcccaaggtgttaactgyctggactgccaatattcccatagtcatacattttcactggcctatgttcagggtcatattgttgattctccacgtatgcataaatgtcaccaagaggagaaaacttgacaatctttattactataatttaagatttctgatcattggctttcaatgaaaataaaatatatttatatattcttttctttgcataaagctgtagtatcttgggcaagtaatttcacctctctgagcctaagttttctccattatgggatggagaggggcatgactcaggcgctctttggagatattttgcaaaaattcagggagagagaatgcacattaaagttcttggcactttataaaattctccttgatgatgtgcattatttttttcataagaaaagaataaagttagctttccacaaatatttattaatgaataagctcccccttccttgttcttcattctagtaattttgtataatttatggagaacaggtttattgaagaaagggaatgtggcccagattctgtccaaatttagaattagtgggatctgaaataatgagatttttctgtagcctctttcaggatagctctagtattcccatggcactcatcagtttggttttccacctacagtatctctattcctgcagtctggatgaggtcttctagagaactgaatgcaccttaaacctcttgaggttatttctctaacctcagagtattttctgaacaaatctgcctttgcctttatttcttcttatgaaagtatatgaacatgtttgggagagctaaggctaaatattccacagggtgtaaaatcccatccttaaaaaccagagctcccatcagcaccttgaagtcatttgtttttcttttgctgacactctcatctgtaaaaataaagttattctatcaaacatttactgagcatccaatgtgtaccaggcactgggatatgaagatgaatcagagaagcctcttgctccacaggcttcataatctagcagccgagtaaacagccaattacacaacagtgtgataagcaacatcttagtgtggctgcctctcttcaaattcacacatgtgcctctctcctaatgacctatcaagcaaagcaaagggaatcattctcattaagtaagcagatgatatttaattgatcgtacaggcaatgtttgcaaaatagagatataatacagagacactatgtagagaagaaactcacagaactgaaaatatcggaggggctatgaaaatgatctcagcctcatctccggctgaccccccacaaccacagaaaaccacttttttttttaactttaagttttggatacatgtgcagaacatgtggatctgttacayaggtacacatgtgccatggtggtttgctgcacctactaacccgtcctctaagttctctccccttgcccaccaccttcctagccaaatgcagaaaactgaaactggaccccttccttacaccttatacaaaaattaactcaagatggattaaagacttaaatgtaaaatccaaaaccgtaaaaaccctagaagaaaacctaggcaataccattcaggacataggcataggcaaagacttcataatgaaaaccacattcagttctaaaatgtgccgggttttcttttttctttttctttttcttttttcattcagtgaacatttattaagcagtgtttctcaagtgaagcataaattagcatttccagttgggacaattccttttttgcaaggctgccccatgcactgcaagacatttggaatcccttcccccacttccctgatgccctgtgcagataccaaaagacatctttcatagtgacaagcagaagggtacttttacatatttccaactctctccctgatagagagagtgagggagtgaggggtcctggtcttgtgtgaaagccattggatagcaaatatgttctttgcacaagtatgcttcctcctcttcctcttcctcttcttcttccccttcccctccttctccttcttctccttctccttcttctctttcttctccttctcctccttctcctccttctcctcctcctcctcctcctcctccttcttcttctcttcttcttcttcctcttcttcttcctcttcttttctgcttaggacattcttctcctgtctcccctacccactatctctttgccccttcctttatctggctgactccactttatcctacagacctctcagctcaggcactatttcctcaggaattcttccctgattgacaaacctaggttagatatctctcttttgtccttccacacaccagccacttttgttatagtgcttattaaatgtgctgtacaaggtggaagcaacccaaatgcccatggatggatgagtaaacaaaatgtgctatacacatgcaatggactcctactcacccgtaagaaggaaagaaattctgacacatgcctcattatggatgaagcttgaagacattattctaagtgaaccagtcacaaaagggacaaatattatatgagtcttcttttatgaggttcctatggtagtcaaactcatagagacagaaagtagaatgatagttaccagagactgcagggaggagggaatggggagttagtatttaataggtacagagtttcagtttggaaagatggaaaagtttaatggatggatggtggtgatggttgcacaacaatgtgaatgtacttaatgccactgaactgtacacttaaaatggtaaaaatggtcaatcttaggtgtattttactgcagtaaaaaatgcgttataattgggtgtttagtggcagcataccttcctatgatttcagatcccttgaaagcaggagcagtggtttcaccggtgtgttcacagtactaaacccttaccttgtagatagaaggtgctcacttacaacagttacgttgaataaatgaatgaatgtaaaaatggtctcatttcattatatcagactaatatatttcttattttacagataagaaaattcaaattcagagataagtagtgaccttactgacatcacagatagtagatgttgaagtcagttttgaaacccaggtgttgtcaactccagcccaaaaaaatattctttccattgggctagcctttatttgttgtcactttctacacatagctgaaattagagaaagtagaggcagagaaattcacctgaaatgccatatctgacaataaaaatgattttagragactaaaaagaggttgggaaaggaagaaagaaaaagaggctgataaaggattttccctgggatatagtcacttttyatttgctgtttgttttttccaatctcttgycatgtaactgaaagaactgaaaatggggagactgattgggcagtcaactgtttcccaaggtcggaatcccaatctcttaggtaatttaatctggaagggggttttgctgtagggaaccgcccacatggttgrggatggacaagatgatttaatagacctcttcctgccataattgctaatcttccttgtggaaacccccttctcatgctgcattaaagactccattaatttgtttatatataaattcaagctacttcagttctgtcacacttctgagaggttcccattcaagagtctttggcttgtaccacccattaggatttactgataagaaagatgcattatacgttttattaccttgtctacagagcacatgtgacaaatataaagtacattcatgtatagtatgaataactgtcagggtaattgataaagtggtctgtaataaaggtagctggaatggcattcctagaagctgaggtctctaagtgctcaagaggaggggggaaagacactaaataaatccagtctttcagaaatcactggcattaaaaaaatgatagccaaccagaatccttaggcctacatttcactttcaagtataattattttatgttgtaattcatatctgctgacacattggaatcaactcaaataaaggaatgccataaatcttgcattgtttagattaagcaagttttggtgctggaagaagtcagggagggaactgccctgtatgtaaatagttgaagagaatcaaatcactggaaaagttgtagatccagttgagacaagtggtccaccggcagtctttcagcctcagtttaaacattcaaagctgygataggcttagcacttatctttgtaggtgaattatacctgaccattataataatattcataatagtaactgacactgtcacttacgggcttctactatatgtcagctacctgtctatactgctgttctatcatcataaatgcgagctatttctagccatgttatctcaagcatattacttaacttgtctgtaccccagattattcatcagacaatggaaacagttatagtgtaaaatcacaggtgtattgagaagattaaacaaggtaatatatgtaaagtgcctagaacagtgtttggcatgcagtaagtgatcagaaagaataagctaacattgatcattatttccatctacaaataaaaaaaccagtcatagagaagttaaggaatgtgcacaaggcagctgatgaaggatttaaacctgggtcttctagattccaaactgtaaattcattctacaacttctgcctgcctgctacattctctccatgttaacttcatacattggtccttattctgacttttttagcatagaaggcaggagctacgtatacatccctgttagtctcccagtctgttttaagctgagggaggtgaagatggaataatctttcttggtggaatctttcaccttaactgggatatgctagtatatgttgtgtcttaatacatgttgtgtcttgtccaaacatgaattatgtggccccttcagacttccaatcagttttgcagtatggcctatatttcttttcctttcataaaattgtatgttgttacagcattctacactgtcatagagaggtggggtctcctagagaaactggcaggcagcaaaaagagcnnnnnnnnnnnnnnnnnnnnaatttatcttcaattccaggaaccaatggggaacaccaggtttattaggtggtcaacatattccaccaagcggtggttatctcggaaggaaaggaatttaagaaccaagcggtttaattattatgtgttacaggtggcccttaaaaccaggggtttggggcatgtgcagttaaggtggattccggaacaggaacttaaggcttaaacatttggatccatttatttcccattcttaacaattaagaaaaaccaaggtcataagaggaaggttacgggaattgttggcacaagggcaagcttgatggaccggatttaaacctgggtcttctagattccaaactgtaaattcattctacaacttctgcctgcctgctacattctctccatgttaacttcatacattggtccttattctgacttttttagcatagaaggcaggagctacgtatacatccctgttagtctcccagtctgttttaagctgagggaggtgaagatggaataatctttcttggtggaatctttcaccttaactgggatatgctagtatatgttgtgtcttaatacatgttgtgtcttgtccaaacatgaattatgtggccccttcagacttccaatcagttttgcagtatggcctatacttccttttcctttcatgaaaatttgttgatgttgttacagcagctctacactgtcattagagagtctgttcgaatgatgataatcattgttgacaccttccatggctgtatatttgtctcctccagctgttttgcaattagactaatcttgtgaaatggataaaatatcagagaaggaatcagatccaagagatacaccacctctatatgcttatacctatatgtcttgtactgaaagatatatgccagctctttctctgactacctgagtatccttgaaagtaagtcactgggctgtgtcctcacttcagcctggctgtattcttagcctttggctcctgatgcagcaagccagctgaacactaggtcacagagtgttgtgttgaggcaacgtcaggaccagcctaccatcccccctccccacacccccctcaaaaatcccactactttcatgagccttttataactaggaccagaagggaagtggacttcaacattttagaaatattttcagtgtgagagcaccagtaaaactgagcttagaaacataacagcacctagacccaataaaagatgagtggagaagataacaaattcaatactggctccacctgtgagctacattgtcttggcaggttttacaaatgccctggaactcagtttcttcatttgtaaataatgacatataccgcactgcaccgagggcttgaattgtactatgaatgttagaaatgccttgaaaactgcaaaatgctctgttactgctagttgcctcaaaaatgaagagatggcattatttgaaaataaaaatagaagttcataggagggctccatagctcaccagttctgtgatcttggggacttaatcagcctgagcctcattgtcttcatctataaaatgagtagcttcatcttaattctccacacctgcttcgcagagtagttatgcggctccaatgtgatataagtgaaagtgtgtgtttaaaagttgaactctacagccatctgcaaatattagtcagtatgtttattacagagatggccagccagtagagtgtctcctttgtccttgccaattgaaaagcgcttttttatatgcagtacattttcccatgtaaaaaaaccctacttttcactgcaagagttccagctttttcagccaaattactcttctcaccaattctgtatcttaattggagagagaattggagagcgactagggaggaaacagaagtcaaagccaggaatcatccagttttttccatgtaggtacaaattagaagatctgtgactgtcttygactctcattttgctgtctgctggacaatgtttgcagagtgccgggatgaagtaactaagatctctattcaggataaatgctagttctgctttgtactgaaagatatatgccaggatataaaaagaattctctccatggtgctcctattaattcatagcagttatagagagctgtaaaaagccacctaattacttatttctcctgctgtatatttcaaggatggcaggtatcctagtagattcaaggtaaatctggtattgaagccattgggctataatcttctttttttccaccatcttgtctgcaagagacaatattggccctaagaacattttgtccttgggcttcctttatcattgtatgagttggggagacactgaactgtccactttgcttctgctggcctctgcttggccacttggataataaaatgaggacagtgtatcttatggctagatatagatacagtttggaaaacaccagaaaacactgggatagcttctcccaacctgctttctttcttttttttttttttttttttttttttgagacagagtctcactctattgcccaggctggagtgcaatggcgtgatctcagctcactgcaatctccacctcccgggttcaagtgattctcctgcctcagcctgctgagtagctgggattacaggcgcgtgccactgggcccggctaatttttgtatttttagtagagatgggktttcaccatgttggtcaggctggtctcgaactcctgaacttgtgatccacctgcctcrgcctcccaaagtgctgggattacagggtgagccaccacgccagrcctcccaacctgctttctaagcgaatccacactaaactgctcagcatgccaagatgagaagcgtgtccccaacagtttttggacacagtctgtggagctttggaaagcccagccacagaggtcactgccatgttcatgatacaggagaccatagatagtagggacagatggactggcaaccccacatcacagctgaactatggaggcaggaatgactgtttctatgtctcctacttgctgaacaactttccccatggcctgatgtggttacatcatttgtttgataatcaggccctttgaagagatgtttcaacccagtctaacttcagatctcttccttacaagaactctattcttttgaaaaatgccccatttccttattacccaaagcacagccagggcttccacaagttggagtgttttcacctttaagaagcctgctcagagaagaccccagctcatgttgccttcttcctgagcctttcccaactgaaagccctccttttcctttctgaatacccaggaagcctctggccatgcttctagaactgtgacatgcaatacagtagccattagccacaggtgactatttagatttaaatttaaattaatcacaataaaataaaatttaagaactcactttctcagtgacactgggctcatttcaagcgccacatgtagccagtgactcctttattggacagtgcaaatatagaacatttacatcatcacacaaagctttcagactgggctgttctagagtatgtctcactctgtcctgtgatgaaaatgcccacttcttactgaggaccttctctgtgacaaccccatgctaagtactttataatccccagaacatttctaaaattaagtgtgatttaatatatgagaaaccctgaggcttggtggtgataggtaacttgttcaggatacaaagctggtaagtagcagagctgggattaggccctgcatctgtctgccccgaagcctaccctcttagccacaatgctacactcactggagatatcyaagtcctgcagtaaatgcattgcctcctgtgtttctgtttagcgtcttctgtgagccggtgagatggaggtggagctgcagaatgggactgggcaggtgctggcactagggtgtgttgaggatggtgttggccatgcactgcacactttacatgcatttattcaatttaattctcctaataaccccactatatggatactattattatctctacagatagagaaagaaaaaaaaaggacagcttacaaagttaagcaacatggtgatgattaagtggcagagcctgaaatggaacccagatggtctgaattcagaagtccttgtcatgaccaccaggtcttgccgcttcaactcatctcactctgattttagtctcactccaaacagaagggttctcaacttctttttaatatggaggacctcagtgaatccactgcttgctttgggaaggcaaacagagtaaaatatctgagtgaaactgatgcttctgagtgcaggagcttatgtagtccctggagagctggccttggtaaagcctcaccttttccttcatactgaagtgctaatcgatgcagcaaatacacctgattgacttcttgtcagagccccattttgcaacaatggacaacatcttctgtaatttgaaaactgattacagacctaactatcctgctttgctttttttttcttcttaacataaatggaattctctttaagaaagagcagaagcttttccggttgatactgatacatttccaaggaggtttctttgccaacccccttttaagtgaatctattaaattatagtaactgaacttgaagatacagcaaagaagaaaatagcatcatcttccttccattttctttccttaaaaattctgagcctaataaaaagaaacattcataaacggcgtttgttccattttctcgtatatctgtagcggtctattcacaaacaaattctacctataacgttggtgcatctgaaatcctaaatacaaattggctggggatgcagatgagaacatagtgagtgatccccagttctacattcatattttggccagggaagggaatttaaacaaggatcaccaaggcagggagaccaggtcagtttccatagaaactaattcatacagtgactttgaggcatcaccaaaaacagcagggaagtgttccatcctagagttgaactgtactctaagagtatgtgcattttgaattatttggtcatccttctcaaatagtcctcaggagtagtggtatttatgagtatttacgagaaagatcacatgctttggaatgagaaaggtctggatttcagtcagtgctatatatacctagtagttaaaagagtagtctttaaaatcaggctgtaatgaaacacttcctggatctagagccagagttgacaaaactacaatggcttataggccaaatctagcataccaccggtttttgattgcaagcgtacattttttaatggttgaaaaaatcaaaatgaaaacatttcacattatgcaaaaattatatgaagttcaaatttcaatgtccataaataaaatttcatggcaatacaatcacactcatctgtttacatattacctatggctgcttttgcactataaaggcagcattgagttgttgccacagaagcagtatggtccacaaagcagaagaaatttattgtctggtcctttgcagaaaaagtctgccaacccctaatctagaattttaaaagctaaaattacttaaggtctttgtacctcaatttccccatctgagaaatagagttaataatagtagccaagtccttaaatagcctcaaattcctcacctataaaatggagataataatacctattttataggatttctaaaaggattagtggggtagcctatcagtaacaataatgrccaatttttatttagcatttaattgacaaatgtgaaaaacaagacatggaatggttaagtgacttgctgaacccactcaggtggtaagtgacagagctgggttatgaaacaggccattctcagagcctgtggctcagctctaaaaactgtcatctaacctcagtgcccttcagtgagtgagtctgttcaccccctttttcctccccttacccccacagtggtatgttcctcttgcctgtgtttgccactgttgccattctatttaattttgttagtccttcatgtttctgtctccaayattcacttagaattgtattgtaattgattgaatgtatatttgtcatcatttctaaaacgtggttttcttaggcttggaaactgtttcttttcatctttgtaccccctactgtctagtatgccacctggcccattattagggctgaattagcatttgccaattatctgaatgaacaaatgagtgaatgaacaaaaaaattgattcgtttgtacatcttcttacattaatcaaattgagcttctttgggtgatatttattagttataaaacatttggtgtatagctgacctgaaagctcatgtgcaaaggaattgttactcatgggtagcctatgttatgactggccccttgagtttacaggaaactggagaaaaacacattggcctcctagttgaaagagacattttcagcttgctctctacctgggcttggcagcttcattcatagttactctttgaaaatccagatgaatttctcacgtagaagacagcataagggcccgctaggtcaggaattggactgccccatcttggtgatgattcacctgctgggctggaacagaagaccattgtggaaattgacagagaccacaataagcttccctgcatgcactgactcaggaaggcctagcctggagattcacagtgggagtaactgcagcacttactctgaagtatgtctttggctgtcagtctgaacacagggccttgcagctattctatgctcttagtctcctagctggaagcaaacttctagacagacataaaggaatgctgaaataaaacaggtcattttctttccatgtttgtttctttttctctaaaccctagagtaaaagaaaatatgacagcaagaatgtcataaggacatcacggacttttatgtgttagatacttttaataatccatagtgtttaatgggaatatcattattcttatttggcagacattgaaactgagktttcaaaggtagaagttatacatgtagggcatttagagcctagagcaaaatttaagttcttgactcctgaacacctaacccgacctcactacaaatgcatcctagacttggggcagagattatttagtcatttatctatacagcaactatgtattgatcacctataataagcactaaggattcagcactgagtgaataagacaggcaaagtcatgacccttattactttctattttattggaagagtcaggcaataaccatgtaaataaaataatttcagatagtgataagtactgtgtagtttttaaaaattcggggtaatgtgatagggagtgactgggagggatagcaaaattagatgggatgrgacagggatggtgtctctgataaggggacacttaagctgagagttgaattctagaagaagacatgaatgaaaaaattagagggaagggtgttgcaggtggaccagtgctagcaggtgcttgtacacacaggcagaaattggtgtagataaaacaagagttcctttcctggctggagggtgtgccccagccctgatgttgtaacmatggctgtgttgtctggactgtgtcatgacagatctgaaaacagtgtctgaacagtagtacatagaagtaggttacagccggctctaagagtaacaggctctgaatttccaagatgagcctgaatttagaatattttgtyccattagaacactcacttctcttgaacacgtggcctgtgagggctggagaggggctcagggtatgggtgtgtcracctttccttcctctgctggacaattccatttcttcccatatccgccatccaaggcccacccatccttcaggtctggctcaaacggctcctctcctggagacctaccctggttacggcccaaagaattcatcttctttccctcactccctttatctgcactcttttgttattctaagcatattcttctctgtactatatgtatttctgtttattcaataatatatattatatatatttctgtttatataagccttgatatataaatatcaaggctggagttaggcaggatctgggtttgagtcttaactttctgatgcgtgatttcaggcaagttgctccatctctttagatctcagttttgtcatctgygagtgggcatagctatagtgcctgtagcatagggttattctaaggtgaaaatgaaataacrcccatgaagtactgagtttatagcaaggagtcaatagatgtaaatgattgctgtaataatggttactgtgtgcctcacgaaagattgtttactctccttcattaggctgagggtttgagagcaggaactgtgtatcatcaacatttatatctggattatctggcccagttcctggaatataagtaatgttcactaaatacgttgagtgaatcaacgaattgtttttaatagatgtaaccactgcaacattatagaatttcagagctgaaaggaaccttgttgtcactgaatgaatttaccttcttaatgtaaacaaaaggaaactgaggccaacagatgttaaagagttgagccaaaagtgacaaaccccattcatggcagatctgaaaacagtgtccggttgcttgcagaacagcattgaacatggaagcagggtacagccagctctgaaggtagcagggctccagttctccaagatgagcctgaattgagaatattttgtaccattagaacactcacttctcttgaacatgtggcctagtttttgtttgtaaatggtggcagagactggtctcgctcatgtttttattcctagcagagagcagacccttggacagaacagatgctctataagcatgtgataaatgaacagacacatgtrgccactttacttatagcccattaacataaagtgttcatgtgcaaactactctcaaggttgatctcgttatgtctcctgtgtcacaaagccccttttgtaatctcaggccttgtcctgtccccgtggcctgtcaagggaggaaagtggtaaatttctgcttccctgggaggtaacatgcattgatctagccatgatttaaaggcttatgagcattcaaatgacacctggggctattgatttcagaagcacaacagattgagtttagaaatcatttaatggtctaagattcatgcaatcattcgacaaatatttaggaactcctactatgtgccgggtatgttttcctattctcatcaggaataagagaaaaataatartgcctccctcatagggttgctgtgaggagggttgggtgagcaatgcatctggatcactgagcataagagctggcacatgataactgctcaaaatattagctagcatttacaaactatattcataaaattgtggtaataataattgcagtgttgaggaaaaagcaaagctactacaccatactttgaattcccacattgcaaagctgcttctcttatttttttaaattcatactccaagttccatccataccagactatttgggacagcccagcttttctggaagagagccatgtttgttttccagagagtcaaatcaagaggtcactaaaagaktctgctgggtgttcaaaacgaagcactttccttaacaagcatgaataaactaagggagtttcttggaaactcatgtcataaattgggtgccagacacaagcatgctagaaccccaacatgaactagaggagaagaggacaaagtcaggatcagggttcagaggtgagttgcccctggctgctggtcctcagaatgagaggtctggggcttgctgggtacctgcttctccaaagaggccccctagaagcagtgggagaaagccagagcagaagacaaatttcagtccatcagaaagatccaaattcatatgccaaatacagacaccaagtccaaatggccatagcaggatggaagtcccagttactaagccaaaaactcagagttagctagggacggtattcaaagtgacagtacatcaaagatgaactgagacacatctcatgtggttctcaataccagccttggtgcaacctggcatgacagtgaccagtcaggtggcaggagtggggatgtggcagccagtgtcctgaagccagacatgactcattgtatttagtcttcctagaaacacattgcagaaggtactattatcatttgtcctttccggttggagatactcactgtaggagtttcaacagcttaccctacttcacccagctagcagctggtgaagccaagagtcaggaccaagcaatctcactccacagtccactctcttgaccctcatactggacttagggagttcatattcatattctgggctaagtactgggctaaacattgagaaggttgtcttaagcaagacgatgccctgcctcaaggagcttacattttaatgaaggagataggacaataataaatagctaaaagagtaatgaatggtgggaaatgtagagaacagtactgtgrggatgagtaggaagaagctagcctggttagaggttcaggatagtgacgtgcagggtaacatcctagggtgagaaggaactgctgcatggagcagagaaaacgtgttccaaacagctgagtgcaggtagataaggccagtaatctggtaatgaaaactagtaatgaaacgtttctgggatgtgagattgacttataagaattcatttggattagtcatttctccttaccgaatttaacaaatatgtctctcagtgagtccttggagcaatttgctctgaggctgctaataggctcatttggggataatatattgtgctgggatattttgcgtttttaccctacagccttgattggagaggctgtcagaaagtcattctttacaaggaccacacatatgaattcagaaagatacaggaaaaaagacataaccaaagctgamactgaatagcagggcctcagggaagaaatgagatgggatgcaagaccatctaccaagtgccaggaatgatgcatctattatttcatttagtcctcccacacactctgttgagttaggcatcattatccctatttagagatgaaacagaaatgcacaaggctcagttgccttgtccagggtcacaaagcttgggaagaagcagaggtygtcttccaaaccaagactgtctagacccaaacctgggctgctcctgcttctttctggtttcattcaagcagtaggactatatactttagtgttcttacaaaggaatcttgtaagttcaaattgtgagccagcacagaaagaatccttcagctttctggacctacatttactcatttctaaggtccttcaggctttaaaatttatattccatgggctgttggtcctcagttctggtctggactgatccaagcttttttccacagttgttcctgcaggacygcacgtatcacactgtgttctgggtgggggtatccctgtggctcctcctctttaattctagagctccttgagtgctggttctctatgttcccctaaaacctatcacaaggtccagcatataataggcagcactctatattatgttgagatgcttgatgggttgatttttttttttttttttaatgaaacagagtctcagtctgtcacccaggctggagtgcaatggtgcaatctcggctcactgcaacttccgcctccccggttcaagcgattctcctgcctcagcctcccaagtagctgggattacaggcatccaccaacatgcccagctaatttttgtattttcagtagggacggggtttcaccatgttggtcaggctggtcttgaactcctgacctcaggtgatccacctgcctcagccccccaaagtgctgggattacaggcgtgagccaccatgcctggcctgggttgattttttttaatacttggggaaatctttttacgtactacgccttcatcaccttatctatcaattagagatatcaacacaatgatgcctgaagttgtttccagcctcatgataacctgaccacctatctgtagatagaactttccctgagaccccaatagatgtagctattgcttcatctgtgctatctcctactttgtatctgtttttatttttttataatgtgtttatttagctggatctctccctctatcaatctgtgagtcttgagggcaagcacagggtatgatttatcttactttccatcaagtttaagatacagaaagggccsgggacatgaagaatgagtgaatactattcctttattacttcatcaatgttgtgtctttaaatagctgtaccttttcctacggttggatcaaagggaaaccactttatttctcaagcattttcataatctttgaaggccttgtgatatatgagtgaagattcaaatttgtatgatttccagttctacatgggcctccctagacaagaaacagaaaggaagcaagctccaccccatcaactggatccctttgggactgatccagacccacatacatcaaagatgggttatgcttgttgtttataaaagagmtgtgcaccccgccaaacttgggaaatgacctaaaatctgtgatgaagcatttaaattgggcaaacagaacacccgctccttccacccgctgtgtagagatggacttaatgagcctgtgtcttgttgagattaaaggaactraaaattccccccaaacattcaatgcagagataatactgatgggggggggggtgttagggggataaatgaacaggaggaaagattttgaaacatcaaataaaatagcaggagctctatgtgccatttaagatctcgtttctgtttcagaaaaggttaacccgatgtgattatcgttgcctaagagaaagggagagaaactartaggaactgagcacctgctaggggcctcacaagacatgacaatccagcaaagtaggttttagtctttgcatttgacagatcgggatcccgaggcttacagaggttaagagatctgcttggcctcacccaagacaggaagcatccaagcctggattcagactcagggcccccagctccaggttcatgctgtttcccacagtcagtcagaaaggaccatcagtgataggatccaggtccactttcctccaaaccccatgtatgccctaaaaggaaaccacatcattcataaaattagaacrtgaaaataaaaaaggaaaaggaaataaaagaagaaaacgttaaggaaaatcaaagtggcatagcaaaatcatgctgggttctggaggctgtctttgcagactgtttaattggcattatattttgagggttagattagaggaagaagaaaaaagacagtgttcaacctgatttacatgaaaatgagaagaagggaaaaaagtggggtattaaaatgtgtgagttgaatccttagatctctgcatcgtgaatggctcacggtagaacttttaaattggctacattgctttaattgaaatacagaattgtaataacacaatgtgacaggcacctactaagggcgactgcggctgctcccacctttccttggagcagcaaacaacagggggatggaaaatacacacacacacagacacacacacacaccacacactgggaagcgcttgaaagggctttttctcttctgggctctttgaggtttgcttttttgaaaaatgcatttttttttcatttgctccagggtccaattaattcacaccaccccacccccaatcccagtgtgttcttgccatagaggtattttgcattaattagggtgtttgctgtttactagatggaaggaaaagaatttgtaaaatatccagatttgcctacaaagaccccaaatctgttgatggccaaaaaccaaactgatgagtcagttgaagatcttacctgctggcstctcctaccctcacccctgtttttccttcatctgtgcatggctgtgatcattttcatttgtgtacaaatgttggagtttactgcaagggtacttaacctagagacagccctgggaaaaaggcttagaattcaagggcagatattactcaggcaggtagtgaagcagcctaggactggaaggggggccccaccttctctctgagctggcatcccaaagtcccagctcccaaatcttggcagaattcagactctagttatgactgtcccagactgcccactcactccccagcccccacccaacttcttctacagttcatatattcatggtctcatcatctcaagactctcctcctgtcatttcctaacctctctctcaaccgaatgccatgaagtccaggttgttttggggcagctgtcatcagccccrtcttgtgagtacactagatgggcaacacgttcactcagttctcctcacatcattccccataaagttccagcctgaaatacacagtctccctgaaatatacagctttcccaaccatagggcatagattaaaataacaggtcatgacttaagtcgatttaagccctccctgccctaattcccagcacaccttttctaaatgtcaacctactttactattaaaaatcagcaaaagttaattgaaatttttaaattgactggtgcagattataaaaatattcctttttaaactatctgtggtgaaggactagtttttttttttccaattcatcatcaaccaagacgtggtcctacagtgcctgctttgggccacttgtgacctaccctgtgagtgaccaagctcatctatgtcctgttcagtgaggcaggattaattgagaacacacttggatgttgcagcacaaccaccatagaggtttctaaactatgrttttcrtatgtctcttgttacagatcagaaacagtgtgtagaccagtaccagtctgcagactgcagaatgtgtattcaggatgttcttgccttctcacccccataacctaccactgtcatgtagagggagaggcccaggaccctccagggccccatgtctctggcagtactgtccttctagtttgcacagacagacccttgatctcctcacctactcatgataaatctgccatacctctctctcagatgtacctacctttccttgtgtcagctgcggtcattgtcacccagcctcccaacatcactcccctgcactgacataggggtcccctacctgggttccccgcttagtccttcwgtccccatttcaacccaytctgcagaaccaagccacaagcaatccttttaaaatatacatggagcatgttcatgattctcttccacttaaagctttttggtggcttcatttgctcttaggctaagatcaaagtacttgatgtggcctacagggtgctggggggccaagcacctgtctgcttccctgtgtcgcctccctactctctcctccccagcrtgcctgggcttctcaaaagtcctctgactcctcctttccccacactcctagtacacataactactgtactcccgggatctgctctaggtactttgcaaagggtgatctcatttaaacgtcacgtccacagtagatgattagtcgtgtttttaaaatgagaaaaccagagctcagagaggttaagtgtcttgcttagtgttgaagaacagccagtcagtgagatctagcccagcctgggagatctgggcctaagtctgctgctgctgcactgacttgtccggtgttggcacctgaggagaacacatctgcagtgacgtgtaaggagttggaggatcttcctgtctgccccctcaccagagtaacattgtcccttcctacacttctctgtgtttggtttttcttcaccagcccccctccagctgacctttctttccttttagcattgcatctcatttactagataatgtgcttccagctgttagcacccagggatttagtgttagccagagcctgaagaacaactaaaaatagccccattttgtccattttctctagaaaggcctgagcgtgtgggtttctgagacccagtcataattgcaatgaccttcatctcctgtttgggccctgccattttggggagaaagcgactttactccttgtcttgktcactttcagcttcttgcataggagcttccttgggcctggcacgatgcagaaatctactgagctgacagttttcaggaggccccaagtatgttctggcctctttaaacacgtggatatgcatttggaaatccatttacatgaataaatgaactgttcaagagatgaaaaacattttttttccatttaaaacaggagaaagaaaatctcctgaactttgcaacttcatgatatcctatactttgtgtcattggcctccactggaagcaagaaaaacaatgaaaagagaggaagataaaagccttctcgatgaaaatagttgaaacaagcactggcaatgaaaaaattcatatgctgtaattatagatttttttgtttgttttaaatcctggcgctcaatctgtgagttcagtttaataataattatgcatgcaagtgcaaatttagtatcatgtcagtcaattccaaacactatttacaaaatggaatcattatagtgcattaatataatgtagacagtagtgtagcctctttcagtataatatccttaaaacatgaccacaggatggttgctggaagccttcagaagagtttaagcttatctsaagccatcataatatcatgtgarctttgtttctgaaagaatatagattgggttctcccattagcaatgtatgtggcaattgtttgtgatggctcagagaaagagagagagactgagacagagacagagacagagaaagagagaagaatgtgcatcactgaagggaagaccctcyggggacctttacttccatacttggctctattactccaaagaccgcactgcattgaaatttgattgtttacatgtctgttgcctcgctagattgcaagctcattgagagcaagggcccttgctgaaatagtaggtgatgtggcatagggatttaaagcacaggctctagagccagacagcctggattcaaatctcagctccaccagcatactagctcaatggctttaggtaggtaattaacttctctatgcctcagtgtcctcatctgtaaactaaataaattgctagtaataatgcctatctcagagagtcatactgcctgtctcataaagttagaactgttgagatcaagtaggtagagctctagaaagatgcctggcacatagaaagtgcttactgaatgtcagctatttattctcactcctgtacccccagtgcctagcagagtgcctggtgtagagtagaagaccaatcaatgtgtgaggggtggaaggatgagtggatggatgaatcaataaacagcatgcctgtaatccacagtgtgcattgcttatctgaatctatagctttctttttatttcaatggctctgccagaatgcaggcctctcctttgttggaacttgaggctgcctggagatgattggatttggttcagatagctatcgggagagacaaagaggtttgcacatcagagactgaagttgagcctttgcaaatgtgcaaaactgagaattgaggcagaagtcattattaactcacacatttaacaggatgtttgcctttcaacmaagggtgactaattaatgtaacagttgattatgtagctcccttaatttgttactggttttcaaataccaaagtaattacatcactaaaagaggacagttgttagaaagtcagtctacagaagagattcaaaaaggattgcctctgttggttctaaagtcctgtttcggtgtagtcttgtgtttgggtctgatttggcagccattcacaagtccctgagtagaagtcagacccagtaccatgccaggggtaagaaggatagagtgcctcctgtggtgagcagatgtggatgggctgtggggtcasaccatctgggttcaaatcctgactgtgctgctgaccagcagtgttcacagtgcccatctctggaaatggcaccactcatagtatctgcctcatggcgatgatgggaggattaaagtgcttaaaccatgtctggcatatgataaaggctaaaaaatatttaatattattattattcatgatttaccttctgcttttctctcctgcctcatgtccaccatggatcttatttcccaagcacacccagcccctgatgaccctgtgcctactcatgcgtgcttcatttccctttcccccacccmcacccccaccccagcttggcragctcccagtcatccttcaaatcttagcctaactaaattgtcttctttaaagcctctcctgcctctgccactaggcrgaattaggaacttctccccctctgccactttgccccttgaatatattgtgtttcaatgactttaacatttttttctcacattataatatctctgcaatcagcatttgcattacagtttatagtgcctttgattcagtataatacagcatgtccattatagctcattcctcatcgattatcattacttgtgtgtctttgcaacctgaggatggagactgggtattaaccagtgcctagacacagcagtcagtcagtgctgctaaacaaatagtagaataagtgaacaaacagtatagctacttgtctgattttttaggtagtacagtctaatctctttggatatgtactaatatctgaaaaacaacaataacaacaacagtatagcctttaccatgtgccacataccattcaaagcacttctatgtattaattaatttgctcacttcatcttcataataacctaatgaagtagattctatttttatcttcattttacagatggggaaaccaagattcagagaggttaagcaacctgcccaagatcccgtagctagtggtgatggagctaggatttgaacccaggtcatctggctccagagctggcaaatctaccgcttgatcactgaccttttgtttgtgaatagattgatttaatactctttaatcaggcatccaaaggctttcctactctatcagcaccatttgcctggacaacctgtatatactagccaacgctctcagttcttagaccmccagttaaggcaggtacaggtctrcacatctggctcacttcattcctctgcctggaactttgtctgccttttctttaccatcaattcaaatacagaactgactttaaagcccattttaatccaaccttccatggcacctttggaacctactcyaccccaaagggaagtgcctttgcttctaactcactgtctataataaccattgaaaattgcatacgtgctagtttatgtatagataatgctcttgcatcagggtttatattgcgttggctttttctaaccctgtttccactttagactgccaactaatatgaatttcctcaaaactctttgtattctagaaccccagaagtactaaggattaaataaataatgtcttcatcrgtttatttcttctgaggaactacagctatattacctagcttacactattagtgtttcattcatttactgttcaacaaacatttattgagtacccgtgatgttctaggaactgcgctacttactgctacccctacagctactattactactaataacagcagctgacatttatcaaacatttatttttgctcagacatcatgctaaacacaatgcatatgcagcctttctttaaattcctacaatcaaccctattatcctcagtttactgattttgaaactgaggcttggagagatcaagtattttgtcttataaacaccataagcacaaggattgtgtttgyttttccttgtctgtgtaccctcagcactcaacagtttctagctcttatgaggtccccagtagatatgtattgattgagtaaatggtggaaccagtgagttcatttgtctagacccagagcctccaatgctacccattatgctaccttggctctcccaacccagttttacagatgaagatactgagattctgagaaacgaattgtcccagtccatgcgggtaagcagtagcagaggtcagaaaatacccaggtctatctgactattctggtaaaaataatttttggcctaaaggcaatcttactatgtaaactatctataaggtagagttagaatgtgtcctttttattctttctcaaataatatcatccccagggcaatcaagattaggtatatttggcgtataagttgaagaattgccccaatttttaaataattatttacattattattttggttatcgaaatgggccccatcattgcttcatagtccggtagaattaatccctaaattgtaatctttcatttttcttctctcatctttaaacaaggaacaagccataatgtatgcatgataaatcagagacttttatatgatgcagtttgatttctgttttccactgtggcttgtaaaatgctttcatagagtgttagaggtcaaagggacaatagaaaaagttagttcagcaattcactccttctgccctccagacacacaagactccaattagatggtaatgggggtccgtgagctgttttcatatagtcctgagttcaaattctacctgaacccttatgagttgtgtgaccttggacaagaatattaacccctctgagtctaagtttccttatttgtaaaattagaattataatattatcctacagggttgtactgaagattagataytatataaataaaaggccaactacactggcaccaagtagacagtaaataaaggtaagatattattttgaaaagcctgagagaagctatatttattttcaataaagttgtaaagaataatcaaaatgggaaattttttcccaccttaggttggaggtttatcaactctrtgaagtcacactcaacagcttattaaaaaakaaataaagttcctgctggrtgcggtggctcatgcctgtaatcccagcactttgggaggctgaggcgggcagatcacaaggtcaggagatcgagaccatcctggctaacacggtgaaaccccgtccctattaaaaatacaaaaaattagccaagygtggcggtggacacctgtggtcccagctattcgggaggctgagggaggagaatggcatgaacccgggaggcggagcttgcagtgagctgagattgcaccactgcactccagcctgtgccacagagtgagactctgtctcaaaaataaataaataaataaataataataaaaataaaaaagaaataaagttccaactggtagttaaccatgtcctttataagtaaatgaaaattatataatgatgaattaatacttaaagtagtttaggtgacagtcctcaaaacctggagcacacagaagcattagtgctgccttggcctttaggagttctgtgatctccaagtatggaagagacatttgctgcctgyrtcataaccatagtcctccatatttccagctcctgcaattaatagccatgcaactatatctgattataacctaagtgacatacatcacttccaggccaaagtgcataagcattggatgcaaccctccagctccttcttctcctgtctggataactatraggctttgggtggtaatgtagaagcatccatcagctcgggctcagtatgactctgtgcatgagtggccctgccagcccagatggtacctgtagcttgaatgaaagatgaatattggtcattgatattttatggttaacttagcctatcttaatatattaaaccacaggtcttccagggtaatatacatcaggtggtgtttataaattttaatttctgcaactggaaaaatattgctcattcattctttactccttttattaattcatctatccatgcatttatctgcctatatattcaacaaatatttgtttagcaacactcattgctagatactaatctgggtrctgaggatatattaacaaaaagccctattaccccygccttcttggggccataacctagctggagaaacagacmagaaaaatccataattacaatcccatggggcaagggctgtgatcagtaagccctcctatgttataggagcccagaaaaagttatcccagcttgaaagtcttttaagctgagccttggtggatgaataggcattgtattatttattcaataaatatttattgattagctactatatgccaagtaagtactctaggcatgtggatatagtagtgaacaatgcaggcaagacaataaataaggacacaaataagtgaaaaagttaatttcagaaagtagtaaatacagtggagccygtgaaagagggtgacatgatagggattgactgtggggagtgactgtagcttgggtggtcaggcaaggcacctgagaggagctgacctatgagctgagtttgccagggcccagtgagttcaagaccctgaggagccatagtagaaaacaaagctctcaggaagatggggatgcrgagcagaaacatacaggcttcgtttgtatgtcagatgtggctggtgggatactcaatatttcttttgctgaatttaatttttcttcaagttcctttgcttgaaatgggggagtttaaatatatctcttgcggtggagatatctattattggactcgtgagtttttattttaggcatttcagaaagcagtactctgagaggagccagggaagaatgagcagtaagcttttaagcaaagaggttgaaaataggaaattggtatgctttgtggattttgaaaaaaaccaccggctctggagtgagaaaggcttgggtgtaaatcccaaatccactacttttccagctggctgatcttgaacaaaggacaacccctctcagcttcgatttccctatcagttaactatagataataatarcaatgatccaaaaggcttatgatgaggctcaaatgagaaaatgcatcaaagttcttagcatggtgattggcaagaagaaaacatttagtcaacattatcagctattactgctatgattactattattctcatctttatccttattgttgtcaccattgccatatttattttgatgggaagcattattcyttctcatatttgcaataacttttctgagcacttttatgtcacttatttaacaaattacatataggctactgtccctaatacatcaagtcctaaattctcatcctgacatttgaggccttcttttatttatctttaaccagaatggttccaccttacttcccacgttatttaaccctactcacctgcctcacactccaaagttccctcctcacacctagcctccatactttcattcaagctgkttcccacccaccacagaatgtcctccctcttgactgtaataaaatatgttgagtgcttacactgtgccagccatcagggtggacacttcatatatatgatgccgttaatcgtcaacccaaagtaactgagacttggaaagttgacttttctttgtttgaaatggggagtctaagtatatctgccaaaccaagacaggtaggaagtagcagtggatcattggtgatatctatgcaaagtttcccagtcctgcaagacaggactcagaacttccttctccagttctctgatccagggtaaaatgtcacagtctcattgggcctctgtccatgttacccaaagtaggaagagagagccttcaggtgaacaaaggcaaagggacaaaccaacaaggcagtgtaaagacacaaagggygcttgcctcactcagtgggcccccttcactgtgaaaggayagcactgaatttctgaatgacatctgcatcagatggaatcctgtcctgtggccttgctgtgctacggtaaactcaatgcagaggtacaagagttttcttaaaggtaaacgagtcaacccagcctgaaggagagtctgaatttcagtagatgggaaagttgtaggtcagtcttgagaagcagtagccaaaaaagggcttttcacaggaagtcatcaagaggttgaaagtgagcaaagtcaacrtgaatgaggttgcagagtacaagtaatayagggcaagagatcgaggtatgtgggaagcccacttttctatggtacagaggtagggcatgactagatactttaagactcagttaagtctcagaaaccagacccacagaaccctacctcctgacttcctactggcctggyctggatggaatttgcatcctgtgatccaggtatgacccaggaatgagagacagaattgagcataggacagtgataagatccttcagtgggtctactcataggagatactctctgatatcagtttcaaaataattttaggatacatgaaaaatacacaaaataattttaggagacataaaagtcatgaaatgaatccttcccatcctaaggaagtgaatgtgtaattgtaatttagaagtgggatgggctgatttcagcattactgcatccccaaatccccccttcgcctcctccctgtaaccactctgacctcaggccctcttacctcggtagatggtcaactagaagatgctttcagcaaccaaatctgcatgtacataagggaaagcaaaaaaggaatttgaatcttgctgctagacttgctgagactcaggaagaagggagaatgtgatccggattttgcaagctgaggttgggctatgtttcttcctttgaaagtgagctgtgagggggaaayacagatagccaaagctgcyctgctatgtgcctggctggtagcagagactcagtaaatattattgaaggggtgaaaaattcatgaaaaagtgagagaaaccacattcagttaactagaaaaaagaatgaaaaataaaagttttgaagatgtcaactccaatattctttttttttttttttttttgaggcagagtctcactctggcacccaggctggagtgcagtggcatgacctcagctcactgcaacttccacctcctgggttcaagtgattcttgtgcctcggccatctgcatagctggtattacaggcgtgcacaccacacctggctaattgtatttttagtagaaaggggtttctccatgttggccaggctgatctcaaactcctgacttcaagtgatcggcccacctcggcctcccaaagtgctgggatcataggtgtgagccaccgcacccaaccaactctaagactcttaaacacttgagctcatctgacttactaggccctcttctagatacgtacagaggtcatttaactcacaactttatgatgtgtagtttactattcccattttaccagcctgaaactgaggattctaggagtgaaagtagtgcccacagtcatatggttatttgcagactggaattcacacaccatcaccatttattggaagcttattataagcctatatattttacatgcaatatccattttattcttcacagtcactctgcaattattattatgcagagtgatggtaaggaaattgtatgttattattcccattttttttttagatgaagaaactaaggctttgcgacctcacattgcagggtagataagtagagattactccattgctggtggaagatgattttcaaggcctggatctcaggcattagcctggaactgggctcactgagtactagaattattgccttatatggtgatgtgttatttctggtgctgagaaggctcagagccaacagrgtatcactstctgaccaggggacctttttccactccacaaggtgccagatttttaaccttggacatacctctgtgatgcaaagacggaggtgacgagcagccacctgcctctgcctgaaaccccaccagaacccaggtccagtgtgtcatcctgaccttttgcagaacctaggaccagctctactctggactggcaagtgtgcagctatggaacagtacagttgctctttgagcctaggtctatctgggtctttgcattatcttatcaggccctgtacttgcttttccttttcttctgggaatgacatgagtaaagacccctcttccatcgccttctcaatcacacctttcctgatcaagaaatggactacattttttgcctagaaaaggaaggcctggaaaggatttttaattttttaattatttttattctttaaggataagaaactaagttttatagcttttaaatgtgtctacatcttctcagaatataggtacttggacttaccctcacccttataactgtcagagacttctcccatggcttcccccgtcaccctgcacttcccctctcagggcacctggcacaccatgttgttattgctcaggcatgcccccccacccccctcccccgccagaccactgtttgttcrttctcacactgctattaagactgggtaatttataaagaaggaggtttcattgaytcacagtttcacatgattggggaggcctcaggaaacttaaaattgtggyagaaggctaagaagaagcaagtaccgtcttcccaaggtggcaggaaagagagaaacccaggggtaaactgccrtttataaaaccatgasatctcatgagaactcactcactatcatgagaacagcatgggggataaccacccccatgatccaatcacttcctaccaggtccctccctcaacacatggggatttatggggattacaattggagatgagatttggatggggacacagccaaacaatatcaaccataatcttaaaaggagcaggcgccatgtctatttcagcactgtacctctagggtccagtatggtgcttgaaacgcaggaagtagtcaataaatgattttgttgaatgagcaaatacgtatatacaatggtgagaaccaatgtccccctaaggggtaggtagggtgtctttctaayggcatggtttacccaggagctgcactttcttattctaggccaggacagagagacttcattcaggtccttttctgcatctaatcccatgtgccaaagagagatgaaatgcaagagagagtcaatgatgcatctgaaagagtcagacagacctggattcaaatccttactctcycacttcttaactggatggagttgggccagttacggagtgctctcaactgtaggagaaggtacatattcaaaaagaaacaaaaaccaaaacaaacaaaaaccacacacttaggtaacatttattaggtgccaggaactgtttcaagtgtattgaatagtataagctattgaatcatcacaacaccataatgttggtactgtggttatccatgttttacagataagcaaacagaggcacagaaaagataaatctttagcaaaggtcacatagctggtaagtggcagggcccccaggcagtctggttccagtgtccatgttcttaacctctgcacttgctgcttctatcaagatgatatagaaaaagcatgaacttctgaatcagaaggcattcaagggtgctgatatctaatcttctgcttcctagatgtgactttgggctgattacttagtctctctgagctaaataccttcttcattttattataaggataacaaaatgagataatgaatgaaataaataaattacatagagctttaaaataaaactacgatgtggttgttaactgwtagattccaaagaaccttgaatgatacaatgagatacttgtcttatattcygtgggtctacagaagcaatgggaagtatttttttttaaatcaaaacaggaaagkctggatggatggatgtagagacaatttatcaatattttagaatagcagtccctaatctttttgacaccrgagaccagtttcatggaaaacagtttttccactcaccctgagtgagtccttgtgacacagcagacacccagcatggggcaacaaggggatgtggcaagaagaaaccctcacagctctgggctcaagtaagcagaggcaaaacttggcttgaaactgctataatgcatagcagtttggggtggggcggggtgagggatagtttcaggataaaactgttccaccttagatcatcaagcattagattctcgtaaggagtgtgcaacgtagatctctggcacgcagttcacaatagggttcgcgctcctatgagactctaatgctgctactgatctgataggaggtagagctcaggcggtactgctcactcacctcatgctatgcagcctggtttctaacaggccacagattggtacctggccayggtccgggggttggggacctctgttttagaagacatacttcaattagaggacacttaaaggaaatgtataataagcaatatattgtcatctcttggatttgggaatagctaggagataggaattcggatctagccctgggagttttgtattctagaggtttgaacttgggcctgcaacctcacttgtttgaacctcagtgtctttctctggcaaataagtgataataaacctttctcactggcttgtaatgagaattaaatttgaacctataagaaaagcatcagacaggtagggggcactttagaaacgctggctccctctcccccaactggctgagccccttgatattccccattgtatccaaatgataggaaattgctagatgcctacttttgcggattaatttcctgaagtggggagaagacattgagactagataccctggattttcatccttgtgcttacctgcttgcaggtgcaactggtgaaagaaacattcccttcagcaggggtctttgttctgctgcaattaagggctcctcgctaatccttctgcttcccagatgctcttggagccagctgtatttttagcacatctctttkataagcttcactctgaagacttcctattattcatttcaaaacttgacaactcctatcactttgtccctcattgcattctgatacacaaagaaagaatgcattgcagcagtttcaagccaagttttgcctctgctcacttgagcccagagctgtgaaggtttcttctggccacatccccttgttgccccatgctgggtgtcrgctgtgtcacaaggactcactcagtcacattcttatctgcctcgtattataaaatatgcaattatatattgtgtgtaggtatagtcaagggggccacaaatgctcttgtgtgttcacaaaccagcagtcacagtacagttctgggacaagactgtaaagcctgtagaaatagagcagagatcaatatttcttacatcaaatcatttactcaatgatatgtcttgaatatatgtccccatcaaatctcatgttaagatgtaatccccaatgttggaggtggggcctggtgggaggtgtttgggtcacggggacggatcccgcatggcttagtgctgtccttgtgatagtaagtaatttcttgcaagatctggttgtttaagtatgtggcagctcccccatccctcacccccacctcactctctcatgcccctgctctggccatctgatatgcctggtcctgcttcaccttccgccatgagtaaaagctccctggcccatctcccttttgttttgcaataaggggttgctctggaaatttgctgagcagatgctggcaccctgcttgtacagcccgaagaacagtgagccaattacgtatctttttgttataaattacccagtctcaggtatttctttatagcaatgcaagaatggcctaatacattccacaaacacttactaagcattaactttgtaccaggatacgttctaggtaagggggtatattgtacataaacagagaagttattccctcatgggatacactttgaatagtttgaaataacaatataacatttattaagcactttctgtattctggacacgatgctaagcaagtcacgtgtaatttcatataattctcataacagttctataagktggaaacagttattcccattatacaggtgagaaaggaaagtcacaaaaagcataggtgtttagcccaggtgtacattgcttgtgagtgaaaggccagcgtttgacctctggctccagggtctgtgcccttaaccattgtgcttcaccgttccggtcctctagccagactgcctcacatgccagggtgacaattagtaaaagaatgtgtaaggcacttaaagccggggcctgcatctcaagctataggtggagatgattatcgcctgtgtggtgtcaaagataaacacagctggacattcacagttaaagcagtgaaacagattttattcagtaacaattgacagtagagaaaagagctgaactacattccgatttgtgcagaggtgactgggctgtttcaagggagaatgagagagtgggaggggaaatagtgagagcttgagtagagtcagggaagtgaaaaatcccaaaaagctggaggtggrcactgggagaaggggaagtggtagcaggttgatccatgtgaaacccatctgggtaactggcatttatcaaacttaggctcctaccctccaaagagtctgggagatgggcccaatcttcaggtgttggctgaaacaaacagtaaattcctctggcagctctgagttttcttaggcaggcactttaagggagactagggccatcctagggacgtggctttgatmtcttagaaactcagtgttagtggggccaggctcactggctcacgcctgtaatcccgacactttgggaggctgaggcagttggaccacctgaggtcaggagttcaagaccagcctgaccaacatggtgaaaccccgtctctactaaagatacaaaaattagccaggtgtggtggtgcatgcctgtaatcccagctattygggaggctgaggcatgagaatcacttgaacccaggaggtggagattgtagtgagccgagtttgggccattgcactccagcctgggcaacaagagcaaaattctgtctcaaaaatcaaaacaaaacaaaaaaagaaactctgttagtgtttgtttacatctttctaggccaaggttgaggcctagcgaagaagagggctcagaggagccaagtagagcttggtcaaggacagaatctttgtcaacagcgcatcctactttccattgctggtctattatgatccctgcaccagctctgycaagtaggctagccactgacattcttgcacagattcatcagtggaagccyggacaggttaaagataggtggctagataatgagtcattgcaaatcagaatagcaagtcttctgagcaaagggaaagcagagaaaaagaggctcagggagcacagaacagaggcagctaatccaactggagatggaaaccctttcaggagttccaatgccagtccttcagtggckcaaccctgaaacctcaacagagttttcaaaatgacakgcacaggcttccacatttgggctcagtcccaactctccttccgattgcagagagaggttgctctggaaagtcatakggaagggccctacagatgacctcagacaaacaccctctcaacacccamgtctagaacccttcagaattttctggagctgcctccttctgccctggcatttgcacccactgctgtctgtgccttacagtgtacttctctccccttctcccttggtgactccttatttcttgtgaattagcccgaacgttttctcytcccggcatcctgccccagtgaggctaacttgccctgattacgtgatcccccagcccaggctctgcatctccatctctctgagaacttgccatgccctattacagttgcccatgcacctggctgwctcctgcaggtcgtgtgtctctggagggtagggactgctactggtcacatgtgttttctatgccctgtgcctttctggcatgcaacccacagcaagctttcatgggttgtttactgaaaggacaatggatgaaacatccaggttacatagctctgtgcccagggttcttgctggccctctcagatccctctcagtcactwacctctgccaaacacccaagcttaccttgcagccttcaaggtggtgctctgaaacagtatcccacaaatggggacatcgatggacaccacagatctttgacttccccaaggtaataatacagtggagaagaaagtagcagagccaaggaatgacccagacccattcaacactgacacacgtgctcactcatcaatttcaccgtcaggtgttataaagccttatgctattagttaggaaaacacatccagttgtctccaaaaactgccagtgcagctaattaaacaaagaggcwcattgccatcaccactgtcaccaccccctgaccccctcccccmgccattcaggtttttttcakgtgtgtgtgtgtgtgtgtgtgtgtgtgtgtgtgtgtgtgtgtttaagacagaacccctgtcacctgttactaaagaactttgaatgaatttctgtgggtcacggactgtagaccaggaagyagggattaggcagtgaggggaggcaggatttatcttcggctcacaaacactttgccaaactgtccccagaccagagagtctgcttcttttataacccagagaaaaagaacagttgctcaagtccagctgcagcctggccagggccctcagaccctctcctccagcagggagagccaggtttatttgtaaccatctgttcgcctatgaaccaacctccccgatgcttcagctgagcatcccttggcacactgtgttagagagagccctaggatatggcttccatcgacgggcacccagctgggagggacagctcaactctctgtcctcgaacctgaagaaggactctatttgcagcatgtgggaaggcttaactgcagcaaagattaacagcagggtcaattagaaaggagctgacaatttcaaccactccagttttttaaactggccttcaaaattctgcatcccctgacccctgcctgtcttgtcaccttcaaagactgtcactcactgcccagcattttattgcctaataatcccatactgattgcagttgcctatataacatgctgttttatagctctgcaagtcattgctatccttctggatagaacatcttgatccccaccgctcccacactcactaatttttatctagtcagttcctactaatytagtcacttcagacctccatgcttaccctggctatgcctttactattgcataaacacaatattcacttattcactccgtgaatcattactgaactctgccaccccccgcccccaagtgtcatacagtgtgcgaggagctggggatgtgatggtgagccaaaaacgaacatgggagcactttcctgtgtctcgtagaggcagcagatattagccaggtaattatacacatgaagggatcattagactgtggtttgtgttaggaagaaaaggaatggtttctttgaaaacattaacaaagacacctgacctcccttctctgctgtagagtgtgagctcctcggaggcaagggccttgccagtgctttgcacccccagcacctagcacagtgtttctggatcaaggcagatgccccattactagaattgagtcctgggggcacatcagagctgggccagtagcgggcagtatttgatgcagaatgcctaggtatttgatgcagacagcctagcttcttcacatctgccctcacttgggcgcagttgtctctaagtctggcacagagatgaaaatctatgccaggaaggagggacaagaaggcagacagctgggcagagcttgatgatcacagccctaaggagatgacctgatgtagtaaaacgggcatgaagcttggcatcagactggccatcagcctcagtgctgaatttcaccattgatgaaacattagacaagttgcttaatccccctgaacctcagttttctcatctctaacaggcaaatggtagaactgagggtaagaatttattaatctgcatcaattttgcctgctgagaccctaaggtaagttgaaggagatggctacagaacggtgtttggtgcattttcacaaaagggggcgatttggtgctaatttcttttactgacagttcattttccaaggcaacagcctaacaaatcatggggccaattagtgtaagagaaacaattgatccttgtactcagagagctcagcccaccacctcagtggtttggtggtgtatttggggactgctgcacagcactaaatgggaaataattggatagatgcagctataaattgcatggcactgcactacactctgtgtttctgatttaagtagcaagttctgtcagtaacagaaaaacaaaaaggtttgttattctgcattgaaaagcagagcagagctggaagggatcattcctgccccttcattttacagattgaaaaattaaggctcactgagagagcagaaagacgaaatacgtagaatttaatttcatgttggtttcttttaacccttgtctcatcaacagtttatcttggcaaactccttaaacaaaaggacctgaagataaaaataagaagatggctgtatttagtttccaagggctgtttctccaaagtaccacaaactggacagctgaaacaacagaaatgttttgttgtatagttttagagcctggacatcccagatcaaggtgtctgcagggattgttctttctgagggctgtgcagaagactggtccatgcctgtcccctagcttctggtggattgctggcagcctttggcatttcttctgggcatatcaccatgatctctgccatcatctgtatatggccttctctccatatacatgtctgtgcccagatttccttcttttataaggacaccattcatattgaatcagtgggccaccctgtatgatctcatcttaaataaatacttctataatgactctgtttttaaataagatcactttctgaagtactggagtttaggacttcaatatatgaatgggggttgggggcataattcaacacttaacaatgacaaacaatttggatagcagaatatttgagctggagagcaactcccatttactaaacaacctttgtgccaggcggaacgctaggcactttaccagcataatcacatttaattcgtacttcaattgaatgaactcacagatgaggacactaaggttcagagaagctaggtgatttgtccaagttaacgaaagtagcacacatcagatgtgggtttcagatgctgacctgtgtctactccaaatcatgccttacctcagcaccctcagaagtcattgtttgtcacgaccaccacctgctatccacctcattttacaaatgaagacaccggaacttggaatcccagtcgtctcactcctaatgcagcatcctttccattggctgcattttagtcaattcacttttttgtaagtttctgtctagcatgcaagacatcattgtgaccaaggcagaggttaatttcagactgggtacaacacaaaaagtcattttctattaaatataatgacctcgtttctgcagtgacttgtggcaaaacatgctgtttcatttccattcaagcgcaytcatttacctgctttctataataattttacaccatgagctaaaatgttaaaaccattggttacattactaaacacccacaatggttattaggattcttcatgcagaacgaaacagaaataaaaataaggattttagaagaatgaaaatataggccattaaagtacatttgaaactgtattcaagtgcacagaggctgcctagagtctggagccagccatacctggcagcagtccaggtctgccttatgggctgtgtgacccggggcaagttacttaacccttctgtgtctcaggtacctccatagtaaagtaggggaaataataggcaaggttgatgggtgagtggaagtgaggattatatacgtagagtacgtagcacaatgcctagcatatagcaggaactctatgcatagcaacacctccccttttttaatgtagtgaaaataaagtttgaattcttatgcatgtttggagaatcttccaattttgggaatctgcaccccgacccactcaacccctggcccagagagtcaggagtrcaaattgtttccatacttattcagcctgaactttgaaaaatgttgttgctgaaaatagaaaagtactggctgataaaggggaacaagattatgtcttttgcarggacatggatggagctggaagctgttatcctcrgcaaactaacacaggaacagaaaaccaaataccrcatgttttcacttataagtgggagctgaacaattagaacacatggacacagggaggggaacaacacacactggggcctgttgggggatcagggggagggagaacatcagggtaaatatagctatgggtgtgggcttaatacctaggtgatgggttgataagtaccaccatggtacacttttacctatgcaacaaacctgcatgtcctgcacatgtatcctggaacttaaaattaaattaagtttaaaaatatacaaataacataaaacagaaaaagaaagatactggctaatatgtattgatgcaggccgtgggaatacagaaggaacaaaggaaactggcaactctaacatgaagcacttctaagcacgtgtgtcttcttaaagactctcttatggtttggaccaacggttgactgaagtggaagtgataaaggtcttttgtctgcagctgactttcagttaagtcattgaagtgctcagtaccttgacttctcctgttctcagagaaagggagagggagtggaggtagagaaaggaacatgctaagatttaaatttttttccaacttaccatgaaaatgctcaaacacaaaatgtaaaaggataattctaaaacttaaccttttgccgtatttgccttctctgattctctcactagataggttaaaagatcaatggataaatagatagctagatagtaagtagctatattaggtgtgctcatagctactggggtttcattgyttctatgtccttttggtgaacagtgctaggagtatgtattttaattcaagtttgtattgacatttctaattcaaatttaacattgcagagttatttcttaagtttttaaagtatttgtgtctcatttttctttcactgaaaatcttgtttttttaatagcaatatatttatgtatgtgctttatcttaatatataaccaaagacatttcatgattataattccaatattaatyastacttacaataaaccaggcatacacttgcatgtcaatgaaacttcctcaaagcccaggtcagcctcctgctacctgagcaggtcagttctctttgagcctgtttcctcctgtctaaggtaggaatagtgatgactattatattgttcagaaatctctcagttgcaagcgatggaaaactcacctcaaaaagtcttaagcgaccaacaaaaggaatttatttatgtaactagaaattacaggattaaatgaaaatccaacctgagagaatccaggttctcagatgacatcataaagcttgaaactctaacttttagctcttttctttttctgatgacttgatttcgaagtgtttccttttcttatcatcctttagccactgcaagaccattatcttgtgagctccaaggaagtcctcatctgaggaaactactgttggtgcttgaacactaaattatgtagtcattagattgagaaccttaaactcagttgccagggaaaagacccaaagtgcaaagagcctaccatctaccagatgctctgctagacatgttaagtgatcttccttatatccctatgagaaaggaatcattcccattttacagatgaagaaactgagcctcagtgaaataaggtgacttgttcatggccacaaagccatggaaggattcaaatccttctatatacagtacatgccttctggaaatggggacaggacagcacaatatacaaactatatgtttagtaaaataaggagctccsaacttccatrtatgcacatgtagtgccagctttagagagccaggactgcatcctactcatcttagtgtctccagaacctagtgcaccttagcacctaagggcttttggggaatgaatgtgagttgaatgagacagaacagttattctatcccgctaccaactgtgattatacgtagccacatccttaatcacaggacatagattttagttgaaccccagtgttaggaaactaacactgaagcaattttccttatttaaggtgtgtgtgtgtgtgtgtgtgcgtgtgtgtgtrtgtgtgtgttgtaacttctctttaacaaaatatgcttcgttgtcactttggtgattgctaattgattaaacacacctggctccactttgcctgttagacaaatttaagcccaactcacaggtctggaataccctcagctggttaactagtgcatctccctatatttaggcaakgaattcatgcacatctttctagactggtgtgtgtatagcatatgtttagagagctgctaagaagaagaagctgactttttatagctgttgtctagttatgaaaatttaaaagaaattaatgaaattttaagaacaaaagaggacatgagtatttactgaattccacctcctcgttttaattgttggtgaaacaaaggcttagagaggaaaacggatagggagtcagtggagttcagagagagacctggacacaggatcctgctgacagattcattcataaaaatgtttactgacaaatttatagagataaaggagagtgacagttgccaggggctgggaggagtagggaatgggaagttgtttaatggtagcatgagtttgggaagacaaaaattttctggagataaatggcagtgatagttrcagaacaatgtgaatgtgcttaatgccacattactgaatacttaaaaatggttcaaatggtaatgataaattgtatgttatgtatattttactataacagtaaaatcatagatgtacaaaacccttattgtatacatcaggcactgtacttgatgcttaggataagaaaagaaaatgctgctgctgcctctagtggcggaggcagacactgatcaattcatccccatacataatggcaaactgaggggtctctcccactcccagtggaaaagtcgaggaagtagagaggacttgcgtcatgggaacctggtctgcgctggaaggtcagggaaacttgcaaagagaagagacatctctgctgaggtctgaatgggagaaaggagttgagctttctaggcaactggaacagcatatgcaaaaacctgagcgtggtgcatttgagagactgtaaaacaccaaggtggtggggaacaagggggcctgtagtgagtcagcatggggaagcagccaggtcctacagggggctctgcaggccctggcaagtattttggtytttatcctaagagccatgggaagcttttgctgtgttttaagtactagaaagatgtatcagatttgccaggttttcttctcaatctcttcatcctgtggtgtgactgtcagaggagaggccagcataagtggatgaggaaggactgaggatactgcggtaatccaggyaggaaatgatagctgtgtgacctggcatctgctggtggagatggagaggagtggacaagcaaaaggtacttggaaggtgaaattgacaagatggacttgtttttgggggataagaatgagggagactgaatgggctcaaggagggttagtgacrgtgcaggcattaaattcgaatatgaaagaaaaaaccatcttattaaacagcattttgattgtagcaaaaattagcataaataagaagaaaattactagtaattccaccactcaagagagaactcttgttatgtacacatatatggatatgtgtacattttttcaaaaacaggatcatattgaacatagtattttgtaatatgcttttttcactcaacaggatgttgtgaatatatcttcaaagcaaaaaataccacttccacaagatcattttttcggtactgcttgctatttcatcttatagcaaatccattttcttcagccagtcagctaatgctcaacatttttggacatttctaacttttcaccatcctaacagcactgcagggaatattttgtactcaagtttttgcccagatattacattctttctggataagtaattaaagaagaatcatagagccggcgtatgcacatctttaaagctctgaaacatactgccaagcagccttccagagaagttgcaccaaatcacrcttccaccaataacaaaacacctataatggctgacaggtaccaacctttataaatgtgccttgcactgttctggtcactttacatatattaatttattcatcctcataacaacaccatgagagagatactattatcatacttatgttacatgtagcagaccagtagcccaagaagatacctgtttmatcacactttggtcaatattgggtattatcttttctgtttttttcattctggtggcmaaaatggtatctcatttcatatatgttatatgaatcaatttaatatttccaatagcattttgggttcccatatcattctttgtattatacaaaaagagaaaagaagtctcagaaagttagagtgatgtgtgcaaagctacacatctagtaaatggtagagcttggatgtgaattgcatttcttctgattccacagtccatatctttcctccattatcacaccacctcttcagcgagagactacgttatttggaaatctggtcttgtccttgagtagaaacttctagaagatttcaggatgccaacccagggagcacttcactctgacccactccattgagtgtttgatgatgggttgcctgggggctggtgcagaggttgcctcattggcaccgtgatgtagcaagcacatccaaaaatatgttagaaaagagaaaggcctttgtaatgagcctgggcctccctttgtcttgtgaggttttaactactgtaattgcttgtagtgtgaagtagtgttttttcatgtatctatttttattctgtgtctctctgcttttctgcttttttgttttgttgttaactcacttgattcctgttgggtatttttcctgtgaatagtattgcctcgggaaagcacacactctcacacacacacatacacacacatactaataatatgaaggctaaatagggtagaatttattctttaaaaaaaactaatggtaaaatcttcagcagatgactttctaatccatactgtatttaattggctgtattgaaccatactacaaattaagtcttctctgtaatttattctgtcagacagtaaccctccaaacaatttgatacttcatttaaacactggtaaatggctcatggaaatacaaagaaaaaaagatttaatgatgatcagataagaaattctctgttcacagratgaatcctgtgtgaaatgttatgaattaacctgaatcatttattcattgaacatgtattgagcatccaccatatgtagggcttatcttaaggtgacttggtctttctttcttttcttcctccccattcatttccttcatcctgtacttcctttctttcttcctccctgcctgccttcctgaaatattatgtaacacttactgttcagaaggtgcagtattaggagcgggggtaagattgagaagaaccagacatggatctttctctgaagggcctaacattcctgaaggagagagagaaaacatgtgcatagatgttctccacaaggtcctgttctcagaacctagctgccttcacacattcagttctttctgcctaaaatgccctttcttccttattttctggagacttcccatctatccttggagcctcaattcaaggtcacccccttygtcaagccttctttgatgcccttcgcccattcctgccccaagcctatgtgacacactgggcacacttttaatataaagcttgttgtattatattgtgattgctagtttctttgcctacctgttttatgagattgtgaactccttgaagaagggactgtgttttattcatctgtgtagccatagcacatagcaggagaccagcaacataataggcactcaataagtacacatgctgtgagtaactggatgaatggataaatgcgaaagaagtgcaaagcatcctgtgtagaaggacaaatataatgcagtgagatctagggatgggaattattactcagggaaatggggtatcaaggtaggttccttggatgggcaacatgtcagagctatgccttccgtcataggtacactatagttctctgagctgatgaagcgcaggccagggcatctgcagagaaaaccatgtgagcaatagcacagaagtgggaaagcacaaaattcaaagggagagtaatgagctcctcagattatttgcagcacaggtgacctgaagttcatgcataggaaggtcagattggattgaggacattgatacctggattgtccttgaaattctctagtgacaacttttatccatgatgcaaagaagagttcaggatggggagaatacataaagctgtggcagagagctagggtgttcctgaaggctctacttttaagacaaatacctgctttgattttggcagtagtttaatatctagactaagttttcccaagacaataacggttttcaaaaggaaatgtggaagagggcaaccagcatctgcctttccttcaccctctgcctcccactccggccggtattctctggctgttctcccagccacctccggaactacctgcaaggccccaggaactgactgcagaagcactcctgggatggagcagttcttatgccctaggaccatgggctgtgcctcacctttctgcctctggctgctcaacaggtgccagagacagccaattcctgagagtaaacttcagggccatgctgtcttgacctttttctttgagagcccagtggccagcctttaccccaagccctctgatttatgaccctccctgatctcagatacctgcctgaatccagaacattctcagttytctccccttacccagttctsttcttcccttgccttcctcatcccagcttatcaagggatcatctttttgttgttggttgagggagccaaaagtctaaggaaaggagactttgattctgtgtaatctagttttcttttttcaatgctttgtcatcctgagtaggaaaaacacctgggtttagtattggtcctggcgtttcaatctctgaccttcastcccttcatgaataaactcaggattgatgtttaagattccaactgtctttgattgtgctgataaaktctacttgaagacatggggcaatcttgaggctcagtgaacaagaatttgcatgatactctaagtttctaaagcgaatgtgataatgcaattgtaggattagcagaattctaatgtatttgtatttctaagtatctatgttacgtctgcatggttaaggttgcagagagggaagacatagcccctcactgactcttatttccgaatgaatgagacacgttcagagcaatcctttttaacatgtcataaaattaactatgagagagaataatgttacaaatatctttaagcacttcacgctcacacacacagctacactctgcaagacagtattaggtatcatcaggcattaaaaatgttttgattttaaaacacttaatgaggattcccagataaattaaaacatctccatctgctgtcttgcctggtargtgatattttaccattgcacaatcatctccaaatctaattccaccaggaagacttctaatcgcagcttaattttagagcaatgttctacttggcaatcaataaggcactgtcatcaaactttgatttaataggaaacgtggataacattctccacattatgcagcgagagagatacttttaggaaaggaagagaagaacatctttgtctcccacttttccctgctgcctaccattttagcgcacaaaagcctataaatcaatgcccccatgttgtgcgaatgtaaatctcatcaattttacatcattaacaccgtgaaaaagctaccacwgtttgagcaattttcctctgctagctaaatatgtcctcttaataaaacaaaaattaatgggtcctaattattttgctagcaaatatgtccttctctgccaacttatttgtgtcaaaaaccattagacttatacattcgttttattgccactggagggactagggtaactgagcagtcatactaccatttaagcatgatatccagtggccagtgggcagcctgggcaagtgtgaagccatagagagagttctaagagtagtcagagaggttagtgaatgatcagaccctggaagtttaaggtaagtcagaaaattctgctgccacaaatgatttataaggtcaaatgcctggaaagattgcatccggccaagggatggacattttagaagatcagtggtctagaactacgrcgatgaccatcgtgaaatccagaggcccactgtgccaggaggctggttttgtagtgagtggtcctaatggcttaaaaggatttgggaagatggaataagagcttagagagtatctactccagtggttcccaatgttttcataattttctctctccctccatggactcagtaatggggaagaatctgtctaccaaaaaaactgcatttgtaatcatccattttcctatttggactatttaaaccataactaagtgccagtaagagaatatactcaaatatgagctaaggaatattagcaacactaagctgatataattccaaataaatggccggtgcagtggttcgcacctgtaattttagcactttgggaggccaaggcaggtggatcgcttgagcccaggagtctgagaccagcctgggcaacatggtgaaaccccatctctacaaaaaaatgagccggctctggtggcatatgcctgtagtcccagccacccaggaggctgaagtgagaggatcacttgagctcgggaggtgaaggttgcagtgaggcaagattgcaccgttgcactccagcgtgggtgacagggtgagaccctgtctcaaaaaacagaaattccaaataaacttggcattttcatttgcatgcacatagaaatatgtagacttattaggaataattacatatttctgtttagttttttgagattttgaaaattgcatggggcctctttttattacatttaatgacccctaaggatctagggctttggcttatgacccattgatctggtacatacctcccatttactagagggttaaacttgaggtacacaggggtacagtgggtgccttgtgtttacacagtagctsgaattcaggcctcctgatacccagtataatgaaaaggctctttataaggactttaaacataccataagcacccagatgaatatataagcctttacagagtactgttgaatgaggattgtttcaagtaggtttagtataggaaaataaccgttaagatcaccattacccrataggatggtgaacattatttgttgaagctcagataatgaaggcatgaaggtgaattataaaagattttcaaattactaattatcaatctcagtttactttagttcaacaactataggccaggcatagtgcaaggtgctaggatgacagagataaggaagacagaaccgggtgggaaagacagacaaggaatcatgtaaatatatcagagaaggaagacctgtgagagtaaggaagttcgttccaggcacgaacattggaggaattcatcagttcagtgtcattagaaagtaaagttctacagatacacaaatgagggtggaattatttctccagggagacagaaggcatgccttgttcagaggaagtttcactcaggtggtactatttcatacggccattgaaagagaaagaggatttgggcaagtggataaaaagagttgatgttgcaggcagagagatctaccaatgaaaagcctgagatatgcatagccccgcctctacccccagtggtgactttgggcaaaacagagaaaggcatttattcctcaacacactctatcaccatcagctggaaaagtgttgtcaccatgcacatstatagttctatgaatgttaataatactccctggagttgtgtagtgtagctcctccaccacagcacacacggtccccgagtatttaagtaaattaaatatcaatmcaaaagttggactgggatrtgtcatgtaaaacgatcaaacagaagcctacccattgaattaaactggctggctctagcaagctgaataaagccactgttgcagatgcttattcagcatatgaacaatcctatgtttctctctggtcacagcattaagaccatagagggaagcctccatttctcaaggacaggcatagctctttttctttccatctggactaaacagcttttccaaagcccttcgggcctgttcacacgtagctgaaacacatttcttattgatcaacagctcgaagggaaagtcccctgaaatatgttcttccttttttttctctgataggcccttcagcatcatcatgctgttcatgaaatatcctacattgcaaaggacattacagatcaccgggcctttggatatgtttgtgggaaggaagggaatcacagatttgtggccataaaaacagcccaggcggtgagtatccctatccaagaagggagtctttccttggaactctggggggacagtccagtgactccgttggtctttgagggcccactctcagatatgaccaagcaatgtatttccactgaagttgatgctcacattcccatctagaaaagataaacagccttggagcaaggaaacatgctcatacccatccagttttttctgtytttttttttttttttaactaatgggtatttcctaatgactaattattttcctttctggttaaactggatggaggcaccgtatacaaataagtttccttgcgttcatagcctcatttaaaaagaaaataagagaaaacaaatagctgttttgcataaggcctaccctaattttattgtattctaaatcactaataaataaaagcaatgccttttatgcttatgattattatgaatttgcaaatataattagttgaagaaatgaactttagcctagatgcaatttgctaaaccagtataaacaaagaattaattaagaatggaatgctttcagattaatagaaaaaggaagggctgcgggttgtcgccgcaaaaacaaaaatttgttgctgcgtctcagtaccattcccttatgatgtgccttactacctttcatcccaggctgaacctgttattctggacttgagagatctctttcaactcatttatgaattgaagcaaagagaagaattagaaaaaaaggcacaaaaggataagcagtgtgaacaagctgtgtaccaggtatacctgtgaatttatccttgcgctggagatcgggccttcaaataaacacatgtaaaaactgacagtcaggccttctcttcctgctgccaagtagaaataaacgaagatgaaagattcctgtgtaaattayaggacccaaagcaagccattagaaattattccttattctcttaaactctagacatgttagatgaagtgaaatctcgaatccagagaaagatttcaggggtggaggacccaagaaacacaaytgcttttgctgttgttaacagtgcgggtggaggtgggagtggctctaaggattttgacttttttgtgttttttctaccttgatggcccaccagcctcttctgcccagagctggtttctttactgtcctgtaatttctgaatgcagtctcacatctcttcctttatgtcctctgcttttcaccctccctctccttaytctgcaatagacaatattggaagaggatgttgaagatcctgtgtaccaggtaatttctgaaactagtcggggttttagattcargagtgactagacctgtgccagagccattttgtcagaaacctgaagaatccactgactgcaaaacctggagagagaccargattatttctgagggtgagggctgccagcccctccaggagcaaatttccataaaaactaacagaagtttggccggcatcggtatcttgggatttggagatccgcttctcccttcttgcctctgcctcggcccccttcacagtctgtaaaagtttgatcccagagctgaatgttttcaagagtctcttgaatattctgagttcattagagagaatatgaataatgaggtggcttctctgagttaagaaccagaggtgggggctgacattttggtagcattttagcacagacccaaaggatggtttctaagctttagaaaggctatgaggaggactctctgacccccgatggggcaagctgaccctccaattacctggctcatgccataggagctgttgggaggaaggaaagagtgaccctaaagacacttctgcccctagctttctctggactctcttcaagatctgcagctcagtggtgggtagggagatgatctctcttgaggtcaagcatgtggtctgttcaaacagagatgcagaaaaaaagggaaaagacagcctctccctcccctgtgcttattcccaaggtgaaaaagaagcccaaaaaatgacttattgaacacaaaggaaaatcttgaacttacacttctaactggatgcataggtgttctttgtgtgtgcatgtgtgtgtgtgtcacatatgtattttatataaatgcttagtttcacacaaaaatctggtactgctacaatgaaagtaaaataatgtagatgacttgaagtggaaaaatatctcatgtatacggcaaacaaaagccaaagatgcacgtaatgacgtgctcttgctttagaatgctgagggccgaggatttgtatataatatgagcttcacccccttgctcactggcttgcacagaatgaagaataatagcctttttgaaatgtcacagtccyaaaacatgaacttggaaaaatcgatttaatgtatttaaaagtgagaacgcaaaataaggtgatatttatgggataaaggagtttggggcttctgagctcttcagagtttgtttaggattttgaaccttagggaaaaagggatgcccctcaactgtaacccatacattacaaagttkgggatcccaggcattccagtgagatagcattctcactgagcaataccaatgtattcaggtattactgagacaaattgccattgaatgaagaggttatatctccagaaagatctgcagaggctcgatgcaatcactgctgaaatactraccagcagacctctgcagttttccttatgaaaggcaggaatgtacaaggtacattttatttcaataatttagttgtgtctttaaggtgttttctcttgtgcctgcttckttaatgctcgctgtgatttgtatcttaatttccaaatgcttgttttacctttcttctttttcacctctgacctttcctttctggctgctcctgtaatagtacattgtgtttgaggctggacacgagccaatccgtgatcccgaaacggaagaaaacatttatcaggtataaaattgcttgcctctcttaccattgcaccactactagtacatgcataaatgtactgatagtctaaagaaccaagggttctgttggtcattcctggcttgttaaaatacctttgagtgaaatggcttctagttccccagcaatttaccagtagttttcatgccttgttgttgatgtttaatagctagttaggtacagtgttttacttttgaatggatcttaactattttaagtagaaacaaaaataaaatgttccattttactaaagtaatacattggagagctggtgtccattatacaattagggtcctttatttctcaaaagaatgtgcttatcaaatttcttaaaaagccaactccgctactgaaaataaagcacaaatttaatttcaaatgatgtgtgaaaacaacattgagaatattaactgaatgaaagtacagctaaaggctttacccttattttaattgtgcaaagaaaactgaactttttaaactcactgaattctcatgaagatgttataaactagatattttaattctgtttttatagggtgagactcagagagagaagccgagtagctttctcggggttgtacaactatttagagccaagattcaaacccaggcatgggtgtgaaggcgaagctctgcctccttctgccatggtcttccaccaaagtgtctgtgtaactgccgtatagcagcacatcaaatagatatgatgacctgcaacttttcactcattagtattgtagtcccaatttgaaatagaaacattataggggaagaaaaaaaatttgatgtatttaataagtgattttaattttgttagttgtgtggcctattctgccttgggtgtgtattacttgtgtaataaaagtaaaacatattttcaatttctgtcaaatgcatagaattctaaatgactaaaatataatgttagttctaccaacaactttgtttaaagttgtcagccttgttgaataatattttctctccactggatctatctggattccattcaaatgtgaggttgtgctttgagacttttttcaaagttgtggcttaccaagtatctttaataagaaaagttgcgtttgtcctgagtgtcagattttaaagtatatacaaccttacagtatctgaatatgaggaggaaaaaaccattaaccaatcatcctaagaagagagggccccttttaaataaaaggaagctttgcagtattacaggtttctgaatccagacttagctatagttggcagggctcccattgagccttgtaggattgcagtgggggcggggtggggagggagacatcctagtgtactggaaagacctgctttagctggtggaaagctgggttgtagtccaggctctcttaccaactacctttggctaagtggtagtgggcaaggcacttaccttctcagagtcagtttctcccttgataaaataagcgaacaattgttccctaactcacaagctcatgtgtagaatggaaagaagaggtgtcatcatgggtcacaaaatgtggagtctggctgtgtggattcagtattttagtacaagtatcaactcagccattaatttaactgtcaagtatttttttttcctctgggcttcagtttactcatctgtaaaatgagcaagtaaaatacagggctctctcaggcaagacccttttctgttttttgcaattaccactttaccataggactttgatttttttagagaagcaggttagcttgttttacaggataataagactcagaaatggtggaggtgggaaaatttgcgtgtgcacatgcgctgatggtgagccaactctgttaatggggtttaagtgcaatatcttatctctcacaacaaccccatgtggcttgaatcattattcccaccttacagataaggaaagtgaggctcacagtgataaggtaacttgcccagggtcccagagctagcaataggtagagcccccactgcaggtccctctgacctctgtaaataaagaaataaatcctaaggctgctctcagctcagaatcccctgattctgagtttcacaattcgattctaagtccctttcaagtcactatctaaaaatcacacttgttttaacagctctgacctctagatcttcccatctgtccatcattaacaggaagctaccatttaagggaatgagtattttatctccttctattggaaaggcctttggtcattctcttctcctgctctgccagtctgctggggctcaatttacttaataagagataagctcttgggcctgaagataaggctgggcttttaaggggctgctattaggcgcctcattttttttttaagggcttgtaagtgttccatagctatttctcctgaattgcagtgtttgttagtacttcagcttggcccagccagtggtctcagcttttattcacctccttgctttctgcagtgaggcagacagtcctggagacctttaactcttttgtgaacttaagtggagaacataatttttgtatctcaatttcctgggctatgaaatggggataatatattctctgctcctagcagtgatgtgaaaacgtaaaacgaggaggagagcagttggttcatagtaggttctgtgtaaacgtgagtttcccctccttccttgcgtgttgtcagtttcagatgctgttgaagatgtcttatgatcatgttttaagtgaaatagaacataacttgctcaccacatgttgttggagagcctagcagaaatcctcaagcgtgcttcactttcctatttataactccaacaaaagggatacagaggcttttgagtaaatgtaacctcttttttcgaggtttttctaatagtcttgttttcccagctatattaataataataattgccttttgctttgcatgcctcagaaaaagttatcggctgtgttgaagttatcagcctcccaatacaaaacatttttacacatcacttaattttgatccttccaataatggtgacataggaaaaacagctacaatgactatcattttgaacataagaaaatcaagttcccccaattgaggtgctgaatacaaggtcagaacctctgattctaaatctagtgttcttcaatgcctgaacaggcttcctatataagcaagatttcagctttccayatggtcattttccaagttcattcattcaaaaactactgttaaccatccaatccttgtcaagtatcgttatttttaaatgatgagtctccaggaaatgttacccaacaaagcctggaactgcctctccacactattaattaacatgctgccaaaataaaagtaaaagtgtcttctgtatgtatagtacggaatgtgctgtttttagagtaatttaacatctattcacttacacacaaaaaaaagattatttatagaacaaataaatgactggacactgggaaatcacatgcgtctggcacggggatgagatggtgaccatggcacagccctcaccctcagaaatttatgtatagcccccttagatgctcacaatgggcagatggggcaactgaagttcagagagcaaagcgactgtctgagtcgcagcctgtggcagacccaggatttggaactaccagtcttctggttccttttggtctgaaacttttatgtctctaaaacattgtgttactgaagccttttgtgtaaacagaatggtacagctaagcagagatgagagccaggaccatgcaccttagcactcatgggctgaatgcttggcgattaggcatttctttgtttcaccaatatttatagctgtggatacaaggataataaaataccccaacctgccctcagcaagcttatagaccctggaacagttacaatgtgatgcaataattctcatgataagataaagcacactttacactctatttcagtagtctgattacttttccatctcccccaataagacaaggagctctgttaaatcaggggccatatccatcatgttcaccatcaytgtcccagggaacgcgtgatgcatgacacataatacgtgcttagcaatttttattttttaatgaaagaatgcaccagaggttaccagaatacaggggaaggctccaaacaaggcctagagaatcaagtgaggcttccaagaagatatcccagctgagataaatcttaaaggacaaacaggcagattgatatctcacccatgggagagccaagtagaaaagcgttttcaattatgcacagtttgagtttatccattccactgctttttctccatttttagggataattgagaggcagctgcggttcaactgtgctaagtgcccgtagtgagcagtgaattacgggcaacagaatgttcttcatttttctcagtaaaggttgagctagtaaaaacaaaagtgagggctggtaatttattggccctcattaacaaggactctgtaggcattcttagaggatttcttttagatggagctcagttatcaggagcaaagaaacgacattcttcactggctacttgcacagtgaagcttgcaagatcagctctggaagtgtaccactgacacggccatgctcactcagtcctgttttctgcaagagtgtagatgagcttctgggaacataggatgtgatgtcaaagaaaaggcccacttgaaacaactgtctgaatagtatagcagtcaaatggcaaactccctgggctcaagcttttggcttccccattcacagactgcactcatggagtgagttgaatcacacaaactactctgtccaagggcctcaaggtcacaggtgttctagggcaaatatctctactgccagagatatttttctcctctgcaacatggggccaactgagttcttacctgaaagacttgtcttgaggattgcatgagaatgtatgtaagacacaaatgtttagaacagcrcctggcacataggaagcacccagtccatgttagctcacattattaataatagatgtcttgtttggccaccagaaagagctgggtttgaacctggtcacttaccagctttgacgatttgggcaaagtccctaacatctctgagcgtcactttctcctatttaaagtagagatgatactaccaatttcttagagttattgcaaagattttaagttaaatgagatgaaaaatgtcaaaggacctaaggaataagctcaaattcttacttcttatagaacaatggtgtagttagctagctcaagccyaaaagatacttttccttcactattccccacattcctctatcatacgtttaccatatgtctcagcagacatttactgagagcctactgggtgttaggcactatgcctgctcttgaggagctcccaatatgatggaaagaaaggcatgttgtcagaccattataaaaccactgctggctgggtcctgcaatgggggtgtgagctaagctgtgacagttcctgggaaaggaacaactaatgrgtgcttccaatctggaatctttcagtgaaaacccttggttgactcatttgaaaagtagtcaacatatccactatcgttagtatcataagatgtgttcgtatatatttaaatgatgtgtcagtaactaaagtaattcttctaacacattacagtattatggtatgtaatagtgttgtgtatctaatatccattttcttactccatcctcagaataacctgagtaagaggcagagctgatagtagtgaagctcagagctcagtgacctgctcagcctgtcacagttagctcataacagtgagaccagatggatgagtaagggaagggaggaagatgcagattaatgttaaacgccctcaagatcttctgcgtactaggcccacactttccataccactcgtgggcctttttcttcaatgaaaaccttccataattatcaaatggcttgtatctgatcccagtagaagctgtgctttgtgctaggatcttgatatttgctatattttaaatagcccagatctcagcctcagcattgaacagtttaagctcagctgcaaactgtttttaatcacttcaggaacagtatagcacctccctacgcctcatttttgtctaaggaaatgaggattttttttttttaccgcatgacttctgaagtctatgtaagtttctagtctttgattctgcgagaagcccaatggcagagacgacctataaacctttgttaaatgatgcccactccctgtccccatctgatgctcctaagggagggagcctggcytgatactttcacaattagagcaggttcccatgggcttgtccctggggccattctcaggcacccttagccagcttgcagttgaagtctggttgctttgttctttgaaattggagtaccagagtgttttgactgtgctgaatttaatttttccataggttcccaccagccaaaagaaggaaggtgtttatgatgtgccaaaaagtcaacctgtaagtgtaagtacatctcctctccactgccaggtttccgtgacctggattcacactgaggctgtctacagcctgcggaaggaaacccttctcctggaatgagtgtcatggccccacatgtttctgctggggactgcatgctggggcatcttcagtgggccagaggaaggagacatgaggcagaaatggtagcactgaggaaaagttgccaatctggatgaaggtctggtcccatgagtgggagtgagttgaatcacgtgaactactctgtttaagggcctcaaggtcataggtgttctagggcaaaagtctccagccatggtttagaagaagtaattcttctaacacattacagtattatggtatctaatagtgttgtgtatccaatatccattttctcactccatcctcagaataacctgagtaagaggcagagctratagtagtgaagctcagagctcagtgacctgctcaagtggaggatagtgtttctgttgtggaaagagagctgcccatctaatttgaaagtggttgagaagtttcaaagggacagtaggagaggctggccagggcctttggggtatacaaaagttcagccaaagcgtgaaaattttggaaaaggtcatatgcaatgggcttgtggagaacccaagaggcataccacattaaggacaacaaggtccagtggatctggaccccatgtgccggtgggactcctgggaatctgggacagaaccaaaaattcccagctgtgtggtactgctccaaaccactgaagtgcccggaactcatatttaggacctacaactggcatgcagaaggcaacctctatacataattcaggcagctctcgggagccagtgaaggctcttgagcagggggcacatgtgactttgccacagccaaggaactagcgtgttcagtcactattgacctcattcatctcaacaatgtgtggacagagaaggtgctttaaagtcaggtagaccctcaacaatgtcagctctgtccctgacagctgttgtgaggctaaaatcgttctacctggaacactgttgtctgttctggaccccacactgtgagagacataaaggcacatctgcatgtttcacgataagattaacaaggggatgtgaaactccatcccatgaggagcagctgaaggacacagaaatgtttggcctggataaaagaatacatagatatgaaatgggactccaaaggccactgtatggaaaagggattaccttgttctgtgtcagccaagtcctggaactgagaccagtgggtggcactataagaaagtcaattccagctcaaagtgaggctgaccttcccacagtcagagctgctcatagctagaccagctggcacctcagacagtgagctcaccattcttggagctatgcaaacaagacttgcagaccacttgtcagaaagattaccagggcgattcacaaattgcatagggagatggacaggagagctctggatgtcccytccaaacctaagactctgtattctccaagttgggagtctttctggtagattctcatccttgcctgcccccttctcccttttcgtttagtgaaacttctttctgatcaatgtccatttctataacccactcttccaggatcttgaaaccaccccccccccccatctaaatatggcttctgaaacctatgcgtgttagttttaatgaaaaagcatatccagatgcaggcccgttttcaaaaacccaagtctagggaccctattctgtgttgtactgttcagggaaacagcagtttttctccctgaggcctttgcacctcatcaggcccccttgtcactgaaacattggtctgctcttcgtgtttcaactggtccagcccccatgacaccattctctacaattcagtttgtgcctgaattgccacacttgcccctaacaggtttagatacgtaaggaaacatgctccatttgctgccttggtttttgtgaatttattaatgattctggccacaccatctccatgcttaatagctccagaaaaaaaaaaaatccaagctcctttgcctgagatacacaggtgggctgcctgaaggtcccctctccagcctagtgtctaatctacctccttctggtccagccctactgaaatctttttgtgtttgtttgttttacccctccccactctctctgcagccttcccccagcattccaactttacttcaagctttgtgttctcagggggactttctggactttcgctctgaacagcaacagcagatcactcctgcctttgtgctgtcattcctctgctaatagcactttttccctattacttccttgaatgtcctggggtcctcgtattaccagatgcaagcccatggcctggtatatgaaagccaggtacaacacggctgctttaggaacatttaataaatatatgaaggccaggggcggtggctcaggcctgtaattccagtactttgggaggccgaggcgagcagatcatgaggtcaggagttcgagaccagcctggccagcatggtgaaaccccgtctctactaaaaatacaaaacattagccgggcatggtgaggcrtgcctgtaatcccagctactcgggaggctgaggcaggaaaatcgcttgaaccctggaggcggaggttgcagtgagccgagatggcgctactgcactctagcctgggtgacagagccaaactccgtctcaaataaaataaaataaaataaaataaaataaaataaaataaaataaaataaaaaatatatgaatgactctatctgtagaaggaatttgtgaaaatccctggtagaattaagaaagtccccatatttctgactccaaaataatcattaaggaaatgcactagaaattttgcttgcaaaatatctgggctgcctgaatggcatgcagtggctcccaacccgctgttctctcagagtcctagaaccaactgatggtaatgatgacttttccatgagctattttcaacattttcaaaagcctaagagaggtaagaagtaaaaacctcaggctgtggtatagagacaggtggctgcagttggaatctgagctcctyttcckacctatgagaatttcgatatatttccttgcctcagagactcagtgttcttatctaccaaaaaagatgattgaacataattagaggtcagagtagtttatgtatyggaaagttgatcccacttgcccaagcctctcggaggtaataccgaataccacacacccctccctgctctgagatcttcctgccttccaggattcccctagtagacctgcctctctgatgaatgcacactccctagagtacctctgtactctgaaaatccttgcctctcactgtttgctccttcgccacctttcccttagccagaaagacaaatacaaggataactcaattagtgtatgttaagcagcttccagaaagtcstaagacttccacaaatttcccataagaagagaaactgcccagtggcctgttactctaggttccacctggtttcatttttctcaggtttaggtctgcacagagcctggtcttcagagtgagatctgggtgtagttcttaccacagccacttcctgagagtccctgagcagctttttgcatctctgatcctctatgttattatctaccaaaagaaaataatactacctttgctttgtttggaggattgaaggagacacttatacaaaacccttaacagaagatgtgaattagataacatgagaacatatccacatgttgctatttcaggcagtgctctagcaaacactcctcactgagccagggattggcaactattctaggggattacacaccctctctggaaagccttccttaccccaaatagagtactcagtctctctgggctacctctaatacttctctttgcactgatcctaatggattgtcattttctcttaacatattcatgtgaaccattggactttgagttcctcaaaaaccttggcagagatcacatctcacgcggctttgcaatttcagcacctagcatagtgcctgaaatatagttcccgctgaggactgtggtagtaacctaagctatgagagataccggggtttgaatcctggcttcattactggctatgtgaccttgagtgagccctttgctctattcggtctttggtcttctcagctatgtaatggtgatgtgaaaaccaaattcactgagttctgagagtttagattaataacagtgatcactcagtgtacattagcaattaatagacacttactaaatgttttgttgcactgaactactcaccaggagttgtcacttttactccatacctccttgctttgtaagtccgttgaggacaggaatcatatcatattcatgtcctcattacagtaagcatcgacacagagtagctgctcaagtggtaaatgaatgaataaaaataaatgaacaaatgartccctgtgtgaggaatgaatgaacaaatgaatgcctatagactcaaagctcatctattgtccattaagttctttttccttctggggccaaagacgccgtgtcaaactaagacagtgttggttctcaaagaagccctcttgcctggcccttcttccactttgtgtttaaccattctttccctgttccacctgcagcctccataaatatgtgttgttttttcttcatagcttggatcaccaggcggacaggtggccttctaaacacaaacccacacactcacgcacctgcattcactcccctcctacatcaggaactcagcatcaggcaaagccaaaacatcttgcttccttggcagggttatttttgatttttgttttttcatcctacctagggttggatttttcctcctggggccctgtggaaagtgtttaaagtcattaaaactctttaatttttctgaagaggggcctgtaacttacagaatattagggacacaatctgatagaattaagaatcagtaggccgggcgcggtggctcacgcctgtaatcccagcactttgggaggccaaggcgggcggatcaggaggtcaggagatcgagaccatcctggctaacacggtgaaaccccgtctctactaaaaaatacaaaaaaattagccaggcatggtggcaggcacctgtagtcccagctgcttgggaggctgaggcaggagaatggtgtgaacccgggaggcagagcttgcagtgagccgagatcatgccactgcactccagcctgggcaacagaacgagactctgtctccaaaaaaaaaaaaaaaagaatcagtgtagtccttctaccccaaaacccctgtaactatttgcatgtcacagaaggctggagaaaggatttgggcccagtgaatttgccagatacttgtctgaaaaccgctaaaatttttggattttaagagtgtatcagttacatcccttgccttgtctcagataatatgcaattagagatggtagttacatagtccatttctcaaactacatttggctacagactttctttttaaaaattaaaattttatataacaatataatatataagagagacaggcaaaaagaggggttctatgcactatcctcagtctgtatatgaaatcactactgaactgaatgaacgataatcaactgttgaaatataaaatacactttcttctgtgaccccattattttgttttttgttgccttctctacttttggccattatctggggagattcatcgttccagtggacagcccatttagtaacctggcctcgcaatttcatgaccctcatcccttgaatcttttcactaagaacagccttagtgatctcagatcctcaggaacccctcctttctctcaccatgagcctctgttcatccttttcttccactccagtactcttgctgaactttttcttcattcaacattcaagatccagttaaaatgttattttctgtcttcagctttccttgagtccctagggaaattgctttttcgaatgtatttctaccgaactttttttttttcctttgagacagagtctcgctctgttgcccaggctaaagtgcagtggcatgatcttgattcattacagcctccgcttcctgggttcaagcgattctcccacctcagcctcccaagtaactgggattgcaggcgtgcaccactacgcctggctaattttagtatttttagtagagatgggtttcaccatgttagccagtctggtctcaaactcctaacctcaggtgatccacctgcctcagtctcccaaagtgctgggattacaggtgtgagccaccatgccaagcccacttctgctgaacttctaaccacaaatttgaaatttgttttcttttcttttcttttttttctttttttttttttttttgagacaggctcttactctgtcaccaaggctgaagtgcagtgttgcagtcatagctcactgtatccttaaactcctgtgctcaaatgctcctcctgcctcagcttacccagtagctaggactacaggcgtgcaccaccatgcctggcaatttttttttttttttttttttttaaagatgaggacttgctatgttacccactgkggtcttgaattcctggcccgaagcaatcctcccaccttggtctcccaaagcactgggattataggcatgagccactccacctggccttaaccacattttattgtggtaatcatggagcagtattttctaatggttcaaaatatgggctttggcatcagaacaacttggatttgactcccagctttaccattttctagctttgtgaatttgagtacttaagttagtctctccactctccatgtcctcatctgtaaaatggaattaatgttagtgcctgccttagagtttttgtgtaaagactaaatgtgtaaagactaaatsagctaaagtatgtgaatgagctcagtgcaatgagaatttaatagctgtgggctattattcagtttcttccccctacttctttgtaagatcctagagggcaggattcacttctatctagactgtttctaaggtaggccttcttgagatttccagtctctttgagatattgatggtggaccctctccccaggaaaaaaaaatgtatgcatgaataaatttttgtaggactcaaagccaacaggatccctcaacctctgtcttagagcctcagtcagcagctcatcatcactcttccatcaacagagataaatcagtaacatggcaaatttgaggttacagagcgttccagagtcttagggcagaagttagaattttctgtttcttattgctctccttcacctgagtgcatcaactgatgggtgcacagttttgttttgatgagctagggcccaggtatagatggaaagctggttccatctctttactttcctctttctcatttactcattcttgccctagttttaacccttcttgacctattgattcaggatgctcagctgtggttatcatccctttcttggacttctttctcaaataacacatttggatgcttttcgttgtgtattttaatttggacctgtgatgtctctgtctttctagcagatttgttctcaaggtcatgctatgcttctctcctgcaccctttcctaggaattgtgagccaatataaggattaatcctacccactcctagaaatatacatttcatctgcttttctggtcaaggcagctggaagcttggcacagggactaacttctcttgtgactgtaaacacataggtacatttttatgtcagggtgtctgaaatccaacagcataaatgcttgctgagaggaaatgctaactggctggagagacacggaggtttcagaaaggagggaattaattgagcaaagccttgaaggatgagtaagatttgaataagcaaaggagaaatgtaagtaccttctgggcagatcactgagactgctgagtccatacttcctctactcagcagtgctcagagctgattaatttatcaccaatttccatctcagggagctgggaaatacacgtagtctttgtttcttcgggctgataatgctggacatgttctttaggcagatatcttgacttttttgtgactgttaaaaatgcacattcctggccgggtgccgtggcacacgcctgtaatcccagccctttgggaggccaaggtaggtggatcacgaagtcaggagatcgagaccatcctggctaacacggtgaaacaccatctctactaaaaatacaaaaaaattagccgggcatggtggcaggtgcctgtagtcccagctactcgggaggctgaggcaggagaatggcgtgaacccgggaggtggagcttgcagcgagcggaaattgcaccactgcactccagcctgggtgacagagcgagaccccatctcaaaaaaaaaaaaaaaaaaaaaaaaagcacattcctgagtggagaggaaggtgtctgctaagcgtcccattactgcattcattatttagtgctttttgcaccctgttaaccattgaacatgactcaggtcccacagtgggaatgcaagcagagcattgcattcacagggccactcaagtgcctatttcagactctatcacaccttataacactgaacttggtggaacttaaccttcacagacaactgttttaatgacacagactttaaccttagtgcaacttatgtcattttcatgtgagaaatacttagcacttttcttttcccctctcttcattcccccatgtaatattcttatggctgaaaaagatcttttatccttcttcttgtaatttttcagtttcaaagccttttatatagttgtattaggcataaaagactttctaattatcagtaataaccagtcagtgaattctagcagaaattcttttggccttcaaaagactttcttaggccgggcgcggtggctcatgcctgtaatcccaacactttgggaagccaaggtgggtggatcacctgaggtcaggagttcaagaccaacctggccaacatggtgaaaccctgtctctacaaaaatacaaaaattagccaggtgtggtggcacacttctgtaatcccagctactcaggagtctgaggcaggagaattgcttaaacccaggaagcggaggtttcagtaagccgagatcatgccactgcactccagcctgggcgatagagtgagactccgtctcaaaaaaaaaaaaaaaaaaaatatatatatatatatatatatatacatatagagagagagagagagagagagagagattcttagatggttggcatagtagtaaataggaaagacagagattgtcgaattgatcagttggatttgacattaatttccttttaatgacagccaggcttggtggctcacacatataatcccagtgttttgggaggtggaggtggaggtgggaggatctcttggggccaggagttcaagaccaacctgggcaacatagcaataccccatctctacaaaaaataaaacaattagccgggcatggtaatacatgcctgtagtcctagctactcgggggcctgaggcaggatgatcacttgagcccaggagtttgaggctgcagtgagctatgattgcacaattgcactccagcctgggtgacaaagcaagaccctgtctctgttttttaaaaaattttcgttttgatgaaacatggattccgaaattgaaaggaatgatcagaccccccgccaagattctttcctcactttgggtatgatctttgttgatcacttcaactttctgagattcattatccttatctgcaaaatgggaatagcggccatccgctactgacatctcagggccctgtgagactcacaggtaatatgtgtgaaagcagtttctgcaaagaagatgggaaggtgcttttataaaaccctgaggaagagaagacctagggatgatatgtgttagttgcctccagttattttacaggctgtttcatgattaaggggaagagcayggtagtataatgagagagtgaacatctgggctaaatataagaaaaacatttcagataatctgagctgattttcaggggaaaggacaaccttatcgagtagtgagctctctgccactaagagtattcaagcaatggatcaatggttctataaggtattcctatatcgtgaaggggattgccctagtggacattagaattattcatctactctccaatwccatttgtcaccatgttcattatataggccagtatttatctcaatatcttgctcccagtatctcagctaccatgtcaggtaccccagtggccccattcctgtcttcaccgttaataacttgacattatagtagctcactctgaaatgcacagaagtgagttatggtgttgccttctgaacttggtgctttggatgcaaagaactttctcaagtattataatccagttgcctcactgaacaagcatcagacacagagtatgtgtccagaaaatctgtttctccttagtttctttctgagagcttgaaatcagggctacagaactatctggtgtgccctgaaaaggagatatcctgggagaaaatgataaaaattctgatgatcagatatgacatcccagcctttgactcagtttctttctttgttgtataatgccaagccactaaccatatgtactaagaatataaggttgattttgctgtagaaaaagtagctagactttattgagcatctgctgtatgctgtggacagcctcggctcttgattcagcttccccccgcccccccgcccccagtaatcacaaccctagcaggtagacgtgatttacatataaagaaactggtgtttaaagatgtcataaacctcacccaaatcacaaagctctagtacttggcagagccagaatttgaaccccagcttgttctgagtcaggggcccaaacaatttctactaaaacctactgcctttatgatgaaaggaaatgcacagccctccatctcctcacccttagcttagttggaattaatactcagcctcatgttcttcttccattacttgctgtttctagagtttttataatgagcaccttatgaggcccagcactccccagctagctgtgaacatctctctccttctttagactgagttccaagcaggcatrcacatgtctaagtcatccatgaagcttcactctgtctggcacactgctttcttcatactggatgttgaagagatgtttgggaaccccagataacaaatctaatgaaagccactcacctctcaagcttagaaagattctcatattgccaccctgcatcccatcctgcaaacaccctgtccccaagcaatcagtatttggttgactttccttgccttagatttaattcattttccctgctgcacatgtcagaagcttcaatccattaatgtgaagaattgcaagaattctctggacaactgttccctacttcccccccacaactcccatcttttatggcaaataaattttcattcacaattgaacagttggtttttcctttagtttgaaatctggatcaagatgttggataattggattaaatcttgtctgaacgtttgtcaatttcacttcctcattaagcaccacattgtagaaaaatcataattattacaatgcagttaacatagatgtcacacaagaggaggttgtactgaagtgagggaagggaatttgaatctgcatattcccacaaatgaaatataaggttgtcccttttgatgtttcttagatgagctttcttttagccatacttaacaaacattgtcctgagatagaatcctgaatttctagagtcttggagttaacagcaacattaaaaagaggttatttggtttcrcctctcctccaatgcaagaatctctcaagagtatttttgataggtgtggatgaacattgctgaatattgggcttgagctcacatacctacaatgacagaccttcattacttttgtaatcccagagctccagttgctagaaacccttattctatttgagttcccttacaatttctatttattcatttattcctccattgggcaaacatttactaaaaacctgtgccctaccaaacaacattctcttcactaggcatataaagataggctgctttagaattgtcatggtctcaaggagatagacctataaaaataattgtgattcatataatcaagggtgtgagaggctgtgtacaagatgctatgagagcatagtgtgggagcagtaaactttgcctgaaggagtttaatgatgtcttcacccagggtatagagcttgaatagaatcttaaaagatgakgggagtttgtctctggagaaagggtggaacagtattcaggaagaaggaactgaatgtttaaaagcatggcaatgtagaagagcctgtcatgtcacacgggctgatgactaagtctgaggtggcaggaccatagggtgcctccatgggagcaggagatgaggatgccaagggaagcccccaaggagcaaagggtctgaaatgtggtgctgagaatctgggagctgttaggaagtcactgatgctttcaggtgttagaatgacaacatcagttttgcttttttcagtgtacctctggtggcttgtggcaggtggcttggcaggtcaggagaccattaagaagctaatggaatcatctaagtgtatccattcaggatagagtcagaaaaacagatcccatgccaggtagtttaatagaggggatctaatatgaggaactagttacaaaggtgttagaagagcggaaaaaccaaacaagggacagcagggcaacccagattaataataatcagaagtggctactgtccttagggatagaaggacagaagagacagtgttagcagagccagcaggcactgggaccagagagagagcactgcccagtgggagcccagaggacagagaaaggggctgcctggtggaagctaaacccctgcaggagactcagccactgccacaaatactgccagaagagagctgggagagaactcactgcttcttccttctacccactattcaaattccaactactgcctccttgttgaccaaatcaaagtggaagtgtgttggcaaaggagcccaggcaatgcagtttatggcaatcagcctcctgtgttacagtacaaactagaggaagggcaagaatgggtctgagggcaaagaggttaaggggaggcatgtgagggctgctgtgggtgtagcctaggggcaggcattgcagatgaaaaagcgagatgagtttgagtgtatgactgggatgagacaaacagggagctggagctagctctgaggtgacatgctttggaaggtcaagtaaccagaagacagggaccaagcaccctgtctcctccctgtaggctctgtcagttacatgcatgggaatttccgtctctaacttctttttttttttttttttttttttttttgagacggagtcttgctctgttgcccaggctggagtgcagtggtgtgatctctgctcactgcaacctctgcctcccgggttcatgccattctcctgcctcagcctcccgagtagctgggactacaggtgcccgccaccatgcccagctaattttttttgtatttttagtagagacagggtttcaccgtgttagccaggatgatctcgatctcctgacctcgtgatctgcctgcctcggcctcccaaagtacgtctctaacttctaagactgtttgtacatcagcctttccacctgctgtcttcaggttctagccaaagacagcattaattcctttcatcttccgttctgttctcagtccaggactcacatttgggttgtcacattatcactctgaatgatatctggctctttttcttgcaacgttgaaaaactgagctgtcattaatggagtcaagcagagttgtaaaagactcgctgttaaatctgaaacttgttttccacaaatgcaaatcgggaaagggataagtggtcgcatatgcagttgcctgctgtcttgtttgctcagttgtgtgttgtaaagaaagcatgtctgaataacagtgatcaccccgtctctctgctacaatgcaggccactggtcctctggaagagtagccttcaaactttttccaaaattattcaaatgaaacatgcctggtatcctgctatataaacagatgaaagaggagatatagttgaagctgagttggagcctcaaaacctactagtaggtgaagcccccccacctactaactctgaaagatagaaagttctagaaggaaagagatccagagaaggtagtatgaaaactactgtccagaataatccactcgttattacgtgggtaggagaagtgaagaggacagacgaggacgtttttcaggttatttcccatctaagacttcattattctgtaattcatgaacagagattggaagaccgctctctgggaggctgtaaaactacagaaagaacatgaaatttgaagttagttggagcctatacttattagctgtatgattctaggcaagttgctttatcttttggatttttagtgaccagtcaacaagatgaaaagagctacttccctgggttattatgtggattaaataagaagagatgtaattacttttgtctttgatatagagtagggactggttaattgatagggaacttggtattacagttgagagtatgagctttgcagcctgactatttgggcttgaaatttttatcccttacttaccagcggtgggaccttgggtgggttatttaaacttctttgtgcctcagtgtattcatctgtaaaatgaggataatgactgtggtaactaccttatagagttcttttaagaattgaataaagtaatgcacataagatatttataacagcacctggaatatagtaagtgctcaatcaataaatgtcagccagagttattattatgaactatgatgtagacaaaggactataccaagtgctttaagagatataaggatgagcaagacctgccccagcgacgaagatggttttagtctactggaggaaggaagactggtgtatagagcatggggctggagggcctgcaggtctccatgctcaagcaatagtgtcaacaagatcaagtgtaacttgagagcctgggatggggccgaagctgcaggggctgcaccatagctatggggccatgtcttaatccacttgggctgccataacaaaataccacagacgaggtggtttaaacaacagaaaattattttcccgagttatggagcctgtgaagtccaagatcaaggtgctagcggactccattcctagtgagaggtctctcctggggttgtagaccaccaacttctccttatgtcctcatgcggcccttcctcagagtgtggatctggtagtgagggggtgggaacagagagaggaagagagatctcttccccttcttataaggccactaattgtatcatgaggataccaccctttacctaatctagccctaattacctcctaaagggcccatctccaaatactttcacactgggggttagggctttaacatacgaattttgggagggacccaaacatccagtccttaacagacagggataacaagcaattgtaactaccaaatactgaaacctcaccaagcaatggactgtgctaggcacttaatgtgctatttcgttattctcccaaactattgttgggattaggtctcttctctaccataaaggatattgaagatcagaggagttaaataagttagaacagctagaagaggcataactaagaatctaatccacctctctttgaccctacaaccaggtgacctagtttatcatccaaactgggcactcttgaaagtgaaaaagggtttgctattaacaattatgtcagggcaatagkcataaatatcagctgtgttaggcaaaccaggatttagggtcatcctacccaaagctggtgactgctcttcctgctgggccaaactgcctctgagaccagaacatgtgagatttcaaacagaaggcaagaagcttctatccttcttgtccctgaaactctttgtccataatgctacctgtgctgaagcaacaatagtactccctccaagatgcaggttccctgatgcatgcttgctcctttggtagacataaatcagatcacttggagatctgttacatggtgagaaaatgtgattcaggggtatctgttaactgctgctgctgctgtgagtctgtcattattcctgtaatacagatcattaacattcacagaaccttaactacagcatctctaacgagcagagctgtaatatacagtttccccataaatatccattgatgctggcactcattctctcttagtacagtaattcagcttttctggataaatcatcatgttgaggttctttctttctccttaactgccattattagtggatgcagaagaataatgaacaaagtctagtgtaaaaaaaaggagcaagagctaaataaatgatcatggggaataagaaaatatatattggtgacagtcacaacccaaaggatacaaaacttgtttttgcagtgacttagaaaggaggcgagaaactaatatttgctgagcgcttactaggggccagcaagtgtgcttagtgcttggcaagctgtatctacttcagggaatccaaaggcttcattgcttaacaatcatttttgacacttttaaaaacacaacttccttagccccaattcgatagatctgcttttgtaaggcttgcatctatttatatataaagagagatttacaaagttcccccagctgattcagattctcaactaaatttatccagtttaattaagatgacaactattattttctccattgtatggataagaagattgaggttgagatgctaaggagagggaaatagagtctgattgtgaaggataaatcccttgcttctctacttatgccgaaaggaaggtctgctattaaggtgacattcactctcactttttacaacactttctctcttctccacctcccatcttcctgcctatcatagaagttcygtcagcatatcgttatgtttctctccagcaggttagcagtattgctgtccttatctctagaattatcctttttttcaccattacatgctgtcagcccaatactcagggttccccatcccactttctttctttttccttttttatttttttgagatggagtctcgctctgtcacccaggctggaatgcagtggtgtgatctcagctcactgcaacctccgcttcccaggttcaagtgattctcctgcctcagtctcccaagtagctgggattacagacatgtgccacgatgcccagctaatttttgtgtttttagtagagacagaatttctccatattggccaggctggtctcaaactgctgacctcaagtgatccgcctgccttggcctcccaaagtgctaggattacaggcatgagccaccacacccagccgccaccctactttcttatattttaaaaccttgtagccttgtccctttggcagtttctatgttgctgtttccacagtcgcctaggatgttctagcctccttcctcctgccattgttatagggatagcccttatactatgatctggccatggtcctccaagagagaattgggttagactggaacaggacaagctcctaaactgcccaccatggctgccctttccagaaccctaaccactcaccctagtcttaaaacacaggtcgtcttataccttttgttctcctcactataacataattgttatgggcacatactccaaagctaacccactttaggtgaaaattctagctcggtcatttactagctgtgtgaccctgggcaagttaattaaaccttctgtgccttggtttcctcctcttggaaacaaggcgagtaacagcacctcacgtttgttgcgataattaaatgagktaatatatgaatgcacatagaatggtgtctggttcatacagaggaagttccatctaagcattagctataattattattgtccttagtgacctctgcctggccaagaagagaggaggtcttaatattaccctgtgacccattccttcctcttgagtccagaatgtactttttttgtcttctttgtggatttgtcaaaacaagaaataatgatcccaaccacccgtgaccttactaaggagatatgggctacttttaattaaaaaggtttttcatagaacagatatagcaaacgtgtgagtaaagacactttctgcttttggtatctatggtaagatctccttaactatgccttcttcattccctagctacaaggtcctcagagataaggtgtccagcaccagaacaagtaggaaaacaagcccgaggccagagcacagatgtcaaagtggcaaacatagagttccctttccctgtagtatttgcatgaagtgtcttttttgttatcgttttatagtttctgtaatactgtaagatgcctcctagaaccagtctctggtcacttatgcattgctctgctcaagcattcattccttcacccatttttcaaataaggtctagtgtccactgtgtgtcaagcactgagctaggcacaggtacaagtcaaaccaagtcccaacccaggtcaccttccacggggaaaggctgccaacagaaaaggaaacagacaaacagagcagtgagtgcttgaaacaaaaccaaacaaggcaatgaacaagagctggggctactcctgcattaggtggagtcagagaaggtctccctgaggaggtgacacctggcccaagtctgaattaggagaaggaaccaatcagatgaagagtgtgccaggaacagagaaagacaagggcaaaagccttgaggcaggaatgagccagtgactcaccatgaagggagaacatggtaggaaaggggagaatggtggaggcaagttcagaacaggtgacaccccaagtgtggatggttttgtaggcagtggtgaggaggttggattttattccaagtgcaataagagacctcatctgatttttttttttttcttgagtaggagtcttactctgtcacccaggctggagtggagtggtgcaatctcggctcactgtaacctccatctcctgggttcaagagattatcctgcctcagcatcctgagtagctgggactacaggcatgcactgccacacccagctaatttttktatttttagtagagatggggtttcaccatgttggccaggctggtctcaaactcctgacctcaggtgatccgcccgcctcagcctcccaaagtgctgggattacaggcgtgagccgccgcrcccggcctcatctgatattttttaaagaccactttgacctctctttgggagatgaacttaagtgggcaaaagtggaagcagcactcttgggcaaaagagaatgccacagagaagagggagagaggcagacagctttgggatatgttcagggatagaatcagcatttcttcatgaaagcttacatgtcaaagtgtgggagagagaggaatctaaagtagcttgtgacttgagcatctaggtgtgagttggtggcctttatagagactggaagacaaggaaagaacacgtttggggagatcaaaagttctttggacatgttaagtttgagaggctgaaaattatgggatatagtcacccactaattgctaaaatccaaaatggtcctgatcagatattggcgagactttcagtagcgaagactatctcagattgctgacacactagaaccactgatgggtctcactgggaaggagcttgaagagtcagttgaaaatgccatccagatattagtagggctaggagggcatcatatccctgttcttataactttttctggaacttctgcctagtatttctttgaagttagaaatggagtaatttatcctaattgtaaagccccatttggccaaatggcagggtagatgtgacagcttttttctggagttcctaataacaaatgccatatctctgtgattgtgtgtgtgtgtgtgtatgtatgtgtgtgtgtgatcgtgtgtatgtgtgcatgcatgcacatacatgccaagcatttgaaaacaacatatggaatgccataccctccatataatgtcatgctatcaccaagtttctttctgttcagttttctattgtattatataaasaagttcatccatttattcattttgttttttaaaatgtatcaattcaatataatttccttctgtgtgctgaccactaggccatctaggtactaraaaatcaaagatgaataagacagtttcccatatgaggaactagagtctctacaaggccataggctatagtagaaaagagggaaggtaatagtcattgtgcctggacatgtgtgatgccaagggtagtcatctaatccatcctgagggtcatggaggttttgaagagctgactagagataacatgtcctctaggggtatgttatagttttcttgataaataaaagtagaaatcatgatcagacagaggaaaggtcttatgccaaggcctgagatggtaaagaatatacctacagacttattcagagggcatgtgatattaagacacacacaaactattttcaagttctacaatcaatcaaaaacagtcgaggataacgctctttcagatatcctctggacttcaaaccttaaggctgccttccaggtcatctagttgtgaatattgcctcattcgatcctcagagctctaggaagtagtcatttccctcaagggaaactactggtttccctatgagcaagcaagggtttcctttgagcctgtttccttgttacaaaatgtgagctaggtttctctgctctgacttatgatggtctcctcttaatctatacaactgtgagaggaaccatggtggagtgaaaaggaactagaacaggagttgggaagttgctacatcatcccaaatctgccactattattatcatgtttttgagaaagttgaaggtctctgtttcctgatttgaaataaatacagggatgagttgggttagagatttctgtagtctcttctaattctattctgcaattctgaaatttttaaaacagctcaaaatcccatcaagtaggtgctacaaaatcatcatattcctaaaggatactgtattgaattgttgacttaatagaagatccaaataatcagacactaatggaagccttactatttgtcaggcacatgttcaactgttaccttgaatcttatcctgggtaatcttcaactcagtcttatgagatggatatttccctaatgttacaacaaagaaaaattcaaggatagtaatcgagtctaattccattcacagaaaaacggaattcttgctttggctattcacatgaagttggttgcagtccygggaacagcacagccacaatgaacttgtacatgctctgtaaaaatgctcagcctggtacccttgttgtggcacttctcacactctgaattgaattagtgttctccagtttccctaactttgctgttacaactcagagaatggacaccrtctaagtgctcacaggataggcatagtgtctggttcataatgggcattcgggaaatgtttattccttatttaaattaatgccttgataatcaaatccaagaatgaagaagtgaatgaggaaatgaattcctaagtatgtaaaatctgcattcctctggagaagaaaagcaaaaacattttgcatggaacggctgtcagagcagcaggcaaagccctcctggctattttttcctttgctgtgacatctctccatttgtgatttcctctgatttgctctgcattcagcctgagcctgtgctactcttgcttgatttcrgctccctccaatatttcttgttaccatttggatgccatctggaccgcagtggtaacccctccaagagaggcacagcagcaaagaaagatgactgactctgagaagttcccctgccctcctccccaaaagtgttttgaatcctgtcatcctgctgatgggagccaatttcacattactgtgattctaattcactcccttttcaaagtactgaactgatgccaaatcttgttaggagtttttgaaaaatccttgagtttttgctaatgtggaactagaataataggtttttaaaaggaaaaaggagataggaagagaccattaaaaacaaataattgcaagcttttagaaatgcttcccctttgatttctggttttctgtgtatatttatacctgtgcatatctgtttgttctatcaaaagccattaaagtagcaatgccatcttgcagcctgatccttcccctcacaaaggagataaggcaagggaagagggcattgaatcctaaaatcctccttgtcaaatgtcagatatttgagatgaagtcatggattagaatcaggaagcttctacgagtgtgtaaattatatattctttcccagtgtttctagagagctctgtgtctgtgatggtgttttcaatgtttcttcctaatttccatccctggccccatcttggctatcatgatgatgacacagcacagagagcgctatatcatcatctctgtttttatgatgactgccctctatcccatgacaacagcatttccaccatcaaattcccactactgctgctgacaccagctcaaaatatatgctgcccccagcttccccaaccccacgatgtagggttgggtgccatgtatttaataataaggacaataatactagtaaccaccagcatgaatcttgtcattactctgagctgggccccatatactacaggttttatgtgaattatctcactgataacaccaactgtataatttcttgttttctatctccttcatgtggtagaagactttgtttatagatgctcagtaaatcatgtatatttaataaatagaagtaagtgaatggatgaccaatgatcacagtcttatgacagacctctggaactaccaccatctccccttaacactagcactatcatttctcaggcgtcacaattgatatctcctttcctttatcactgttactgaggtcagactcaatttagccattagtagcttatttgcataatgattttctgcctgcagatcatgccaccaaccccaacctcatgtatattttcaagaaaatattgactgacttttagaaaaactgagcatcaaaacatggagttacaacctragttctaaaataggtataagggatggataggaagaagagtgggaaggagaaagggtggggtgggtggaatgatgaggcagactcctagaacagtccagccttgctggtgttaaaaactgggggaaggtccaagagyaggagctgctttgactgagcatctgctctgtgaagactacaatgcatcttcagcctcttctccaggtgacttcatcccttccctaaactaatatcacccaaatttttgccatgacctggcacctgtctaccctcacctaccaagcaaataattccatgactatttttcctcctgccctcccttccttccttccctttctgtaaatttcaaaagggaaatgacacctgttgaaattttactctgccagttgctgtgctattttcctatacatcagtcttctcactgcttcctctctgcaagcccacattgtaagcattgttatccctcttttgcagtgggggaaactgaggcttaaatgataaactttattcaaggaaatgccagtgatggagcagcagtttgaactgaaaactactgttccccacatctaacttttcattccctcactctgcctctcctgaaaccatcacatttctcactttaaaagtgctcagtgttttcacttgcaagcaaattagttttcttgacattagatgaaagttgagaaggccaagaatccagaggcagaggctttacccacagctatgccctgtcatttgcgttagcccgttcaggtcagcttagcaccctgaactttgtccactgggttctgcgtttcttgcaatgtcttaataaggtgccagcaaaatccttgcaccaacattccccatgccgaacttccccttgcatattaagaaagaacatttcaagaatcagcttaatttgtaagaatctggatgtaaatattttgttgtccaaggatttgtggatatattacacgtgtgagcacttcaagggaagatgtaacttttattgtaagattgaagcatttccctttatcctccaaccttctgtacaacctttgggatcctcctgaattggaagctggaagaaggaggactattagctgctaaagtgaggcccaaattggagtaattagaggcaacgtctcaatcattataaagacaaaacctcaaagaggcaccaatttctctattagatcaaggtattgagtccagcaagaccaccgatccccaaatctcagtaggcctggcacattttggcattaaatgggattccattttgtttcagttctaatgaagcttcatggatttccatttgaaacatgaatcttaactttcttctaaaaaactccacaaatatctggctttcacttagctccggcaatgaaaaaaaacctcttatagctagaagaagtcggctgcttttgcaaactgaatttgatttcatggtactgtctagacatagcaaaaaaatcaattctcccacagacatcttccagtcaatgcaaatataggatattctttaaaagaatagaagagaatatgtaaggaaggactatgtctagtatttaggaagcaccccattaactggaagtttattttttaatatattttatctagagtcgtgctgtccaatactgtagccactagccacatgaagctattaaatcaaaaataatgaaaatgtaataaaatttaaaatttagttcatcaggcatgctagccatatttgaagtgtgcatgtatctactgactgctgtattggacagcacagatagagaactttacatcatcccaagaagttctattggacagggctggtctctagaccatttattaaaccatttattaaaatcagagtttctattccccacctcaagccacttgcccttgttcttcaattgccaaacagagctttcccatctctctctgccaagaaatgggaaagtggctgttcactcttgggtaaaggtgataaagagcatagcataaactcctagataacccagaaggaattagtctccattagcatgtgtcttccttgttaaatccttcattagggaaatgtaacatgcattcagatgcctggaatctgtaggtgtccttaatagtacccaccttagtgcagttacaaatcacttaagttaatccatttctcttgagccttctaaatggataattgaatttttgtttcgttttgtgttttttgtttttcagccttggtctgagctctgagtttagatctagaagccttgtgtggtccttgtcacacaactgtccaccccaagctacaaagattatacagcatagctctgctctgaccttatgaaaagaaggaccatgtgttattcatctaggtatctccagtgcccagccaggacatgacatgtggaaagcacccagtgaatgttcattgaagaaactaattaatcaattgcataatcaatcaaggcagcttcagttttcctaggaaccttctgctaattattcctactgagagtttattccccagcatggtgatttgcaaatccggctgcacattagcatagcgtggggagcttttaaaacctactgatgccagggccccaccctagaccagtacaatccaaatctctgatgatgtggctctggcattagtagctgccccaaaggattacactgtgcagtcaggagtgagaaccacagcaggtttctgatttggaagccataaaaaagattttcttcctttgtgagattttttttatcccaagtcccttatccactgtcatttttcctgtaagaataacatgaatctggtcttccttgttgccttactcagtaatggaatcatagtgtccccactgttttgaaaagagattataggaagataaactccctgtgggaactttatttccatgttttaatgatgattcaagccagaaccatattgaaacaacatgagaatatcttcttttatatttcctcactggaagcttaagttgcgagtaaatttgatgtcatgttgagtttttaaaagaatacaaaactgtgtacatgctatgatagtatgaaaaaaatctgtaagaaacaaaacaaaaaagactttaatataaatgaattagaactcaagtggtaattgtgggtaaaacaagatttagcaatttggagagactagggagtagatcagtttttgtctataagaatcacctgggaaaaagtgtatttattagctggcagcatctccccactggctggaggaagtgcactgggtgtctccaaaggttgccccaaacaggtagctgtaagagagcagctctgagaaatgactgagccagagttagaacagtaaggtagacacaaggtaaaaaaaagatacggatgggatgaagatgatcaggcaagactgtagccaagagcagggcaaaagagagaagatggagtcaagaatggattgaagggttcaggagtaaggatgggaggtctaggaagtgttgggctcttgagtggaggtggtttctaaagagaggccattggaaagattttcatttctttttcctctatttccaaatattatgtaataataatttcctagcattaaaaaatatgtgcattggggctgggcttggtggctgaggaaggctgaggtcaggagttcaagaccagcctggccaaactggcaaaaccccgtctctactaaaaatacaaaaattagccaggcatggtggtatgcacctataattccagctactcgggaggctgaggcaggagaatcactgaagcctgggaggcaacggttgcagtgagccaacattgtaccactgcactccaacccacgacagagtgagaccctgtctcaaaaaaaaaaaaaaaaaaaaaaaaaaaagtgcatgtgcgttactgaaatgagccaaaaataggagaagataataatagctactattccttgggcatctactatgtgctaaacaccaaacaagactttgcacacacatctcaattaaactgctcaataaacttgccatgatgtcattacccactccactttaaagatgagaaaactgaggttaattgacttgtcaagggttacatggccagcacatccatggcctgacgtgaccaagacccggtccatatctatgtgattccaaaaaaatgcatttgttcatctgctcagatcaatcttcaactgaattcaaagaaatcgcctcatcacacctcagctccacacctctccaaaggccacctctcctttcccaggaaggtgacaacacgctcatgctgacactggttatcctcccacattttcattatatgggacatggtggggggttttatgagcctcttccacaggctgtttttcaaatttatttaattcatccatcatgctccgaagccatttgcttttttatattggacagatgtaatgagattttggacactaaaaaatgtttttattaaaagttatgacccagagctagttggtaggggctctgccataaattgctaggagtgtgtgaatttataaaggatgtagcgacataaccttaacctcttaggccacaccatagatgataggatcacttagactaatattgtctcaccacctctccccacctctggccaaataataattataataatgtctatggttatttgatgtggtggcttttcctctcattgaagccacagttaagtcatgttgaaccatgggctggtggaaacaggtggttggtggttgacctgaaggctctgccttagagggcctgggcacattgattcttccactctgctctgctctgcactttgtaactggggctgagggaagtaacagtcacatgtcctatagacagggtgaaagcaaatcctgacaaagcacagtactacgaggctatgggtgatagttttcccactcctgcattgccaaaagctctcctcaaaactattcatgcgtaataactccattttaatgtccatattagcagatttatattaatgttttactatttggaaatcatccaaagaataattagcttatacatagactagaacatggccattaagatatacatgtatatgatatattgtacatacctataatgtgtaatataaacaataaaatacaaagttaacaaagcaattaaatgttgcccactgccagctacttctcgaatgtgcattcatttctgtatttttgaggactgctatgtgccagaccctctaccagctgcagggggagaccctctaccagctgcttgagaaagttcatggtgtaatagacatagatacatagataatgtactgaggacactcaggaggatttcaattcaaaagacagagaaactcttcatggaggaggtggcttttgggatgggtttgaagaatttggggagcactgagcttgcagagatgaggggaggagcatttctttttttttttttttttttttttgaaatggagtccgctctgtcacccaggctggagtgcagtggcacgatctcggctcactgcaacctccgcctcctggattcaagtgattctcctgcctcagcttcccgagtagctgggattacaggcgcctgccatcacgtctggctaattttttgtatttttagtagacatggggtttcactatgttggccaggctggtctcgatctcctgacctcgtgatccgcctcctcggcctcccaaagtgctgggattacaggcgtgagccaccgcgcccggccgaggggaagagcatttcaggcagagaagacaacatgtataaaaacacatggaaaccagctgtaaagtttggctaaagcacaagatgacattctattcttttaaaagaaaaatctcaggtgtaaacagcatgctcttatccatggtcattgctgatgtctgtaactgcggggcaatgtctctaattgcaggaagatggactttaaacttacaaatttaccattgctgtatttcctaatcagacccatgttttatcatctgcttatgctagaaacatattccaagattttcacagacattggaaacagctcccgcctactgagaccacggaagtgtgaaccatagatactgtcatcattaaactcataaatccatgtcatttgtgtgtcattcacttcatcctcattcatcatcccttccactttcagaatggctattcgtttgaggattttgaagaacggtttgctgcagccaccccggtaagaattacagccctctctggttaactgtttcatgtcattttctcatcattcatttcatgctcatcagtcatgccttgtggttacagaacagaaacctgcccacagactttgatgagatttttgaggcaacgaaggtaaggccttgaggtttgtgttaaattaggttgttctgctcatactcatgcattccatattctcttcatccagcttgcatgaatggcagatttcctgccctgctctgctctagtaggtacctattcaaatgtccccaggaagactattggtgggccctgccatgaggtcagatagtgagagtgtatgtacacrtgtgtgtgtgtgtgtgtgtrtgtgtaaacaaaagtgtatgttggagaggagatagcaccccttcttttcatccagcaatatttttcaaacctctaacatgtcccaggcatcctaacagatgctagagatggaggaaaggggctttcctaaagaagctcacagtgtaacatagtgcaacattgcctgggataagatatgacagtagagcctcgcctagcttagtgtartatatgtagtataacatgatatagtaggaattcagatacatgaacaggacgtgccaagtacaccactgggaataaaaaacaggcgaggttgctattcagtcagtataacctggtataaatatattggttgcagtcaacatctgttcaaattgattgatacagaagccaatgaatattaccactcctaaatacagtattgggaaacctctaggacaaaaatcttcaaccttggcatcaaattggaatcatcaggagagctttccaagttccagtgactaggttttacctcaaaccaattaattctgaatctttaggggtgggaaccaggcatcaataatttttccgcagatgatctcaatgtgcaaccaaggttgagaaccactgatctgggagtatcatgggcaatggaatagggtacaaattgagttaggaagccacttcataggaagcaaaacagaaagccttctaatttgcgtcctgaaggatgtgtgggagaaggaatgagtgttctaggtgggaggaggagcacatgtcagacccygagatggyctcttctttcataaccccctgtgcttctctcctccattgattgtgtctctgggtctgtgtttccataaaacagccagcttatgacaataggaacaggaatgtgccttacctatctctgtagcccttgctcttggtagctgatgcaaggtaggaactcccatgtctgcccactgaagggtcacagaactcctgatgccaaaacatagggaatgggtctgtgagaaggtgttttcggggtcagccatgacatctcagcctccatcaatggtgccttcagaatttctctttgggaaaggcctaggggtctagttgcagtgawctagttggaaggaccagtatactaatcttgaactagatattactgaaaaaccatcacttgttcatatcaaagaatgactggggagagaacaggcctgatggagatactgggggactacctccctaaacatcgaagctacttttccttcactgtcctgtacaccttccaatatcactcttcttacccctggaaaatgcccagggggctaaaaaaggggcaaaactgccatctccagctacatctctctttaccaggagacatttgaaatgccagtaatggaagggccttactctctggcaaatagacatctcaagctgacattccaaatgacctcaaatggatgtgcatcatggaagacctcctagcaamccagatttctggttagagaatgttgtagagctggacttccactatttagcaaggctaactaaggtttggtaaagtgatggatcgatgaacaagatgctggtgggtgtgtgggtcaagtccatcccagctgcttttagctgactgatcagaggcgagtcacttaacctcagcctcagctagttcatctgtgaaacatagatagtgacaatggcgcctatgctgttgactttacggggctcagtgagtatcaaacacgatgataatgtatttgaaactgtattgcaaactataaagtgttttgcaaatgtgaattgttagttttattctcttgaggcttttaaaatgattcattagagcagtattatcagatggaacatggtttattagcttacaaataaaaggactggggttaacatggggaggaggcctgtgaaaatagatactatttcagattcttgaccacatatggttattaggattatttttaattttatggcccaagaatcccctttttctataaaatttaattaactcaaggttctatttaaacagcaaaccaatggaatgaaataacaatctatgttttatgcctctgcatgtttttctcgtttaatccttgagtgaaaatcatctggcaaaaggaaagtctatatctcaagtatgaaggttattttaaaagttgtgcttaaggagaaaattagccaataaattatatttatgatgttagtaaaagtatgccatgagttcaacacatttgaaatgtaaattgtgtgacttaattaataacttcattttaatattttcctaacactgaaaatagttgtgacccattttaaaagcatagagttgcagtctcaaagaagcccagaagcttcatttgaattgattaaataaacattccttttatgaatttggaagagggtctaaaagactagcatagcttcaccaaataatatcaaatattgctaacgtgctaragaaggattaccaaagaagaacatttcaagtccagcaagatttgggagagcacctgtgtgctgtccacctcattcccatcagctgctgggctgttactgtatgaaagagaaacaagatagccaggaattgatggaaaaggctgggaaaggtatgaaattcccaccacaaccttgcccttgtccaccacactggcctcctctctcccaccttcatgttggtaacagtgaactgcttccattaccacctacctactctgttctgggcctctggccattttaagcagtttcctctgcctggatggtctcctctttttggtcacatggctcctctccttcaggattcagctcctggctatttcctttagaaaaccttcttaaactttgccaaaagctggttgggcctctgtattagtctgttttcatactgctgataaaagcatacccaagactggacagaaaaagaggtttaattgtattcacagttccacttgtctggggagaggcagaaggcaaagggcacttctcgcatggcagcagcaagagaaaatgaggaagatgcaaaagcagaaaccactgataaacccatcagatctcataagacttattcactatcatgagaatacatgggaaagaccagcccccatgattgaattaactccccctgggtccctcccacaacaaatgggaattctgggagataaaattcaagttgagatttgggtggggacacagccaaaccatatcattctgcccctggcccctccaaatctcatgtcctcacatttcaaaaccaatcatgccttcccaacagtcccccaaagtcttaactcatttcagcattaacccaaaagtccacagtccaaagtctcatctgagacaagacaagtcccttctgcctatgatctgtaaaatcaaaagcaagctagttacttccaagatacaatggaggtacaggtattgagtaattacagccattccaaatgggagaaattggccaaaacaaaagggttacagggcccatgcaagtctgaaatccagcagagcagtcaaattttaaagctccaaaatgatcttgtttgacaccaggtctcacatccaggtcacgctgatgcaagaggtaggttcccatggtcttgggcagcccttcccctgtggctttgcagggtacagcctccctcccagctgctttcatgggcaggcatggagtgtctgaggcttttccaggctcatggtacaagctatcagtggatctaccattcctgggtctagaggacagtggccctattctcacagctccactaagcagagctccagtaggactctgtatggaggctctgaccacacatttcccttccacactgccctagcaggagttttcctgagggccctgtccttgcagcaaacttctgcctgggcatccaggcatttccatacatcatcttaaatctaggtggaagttcccaaacttcaattcttgacttctgtgcacccgtagactcaataccacatggaagttgccaagacttggggcttctaccctcagaagccacagcctgagctgtacattggtccctttcagccacagctagagtggctgggacacagggcaccaagtccctagactgtatacagcacaggaaccctgggcccagcccacaaaaccactttttcctcctgggcctccaggcctgtgatgggaagggctgccatgaaggtctctgacatggcctggagacattttccccatgattgtgggaataaacattagactccttgctacttatgcaaatttctgcagctggcttgaatttctccccagaaattttttttttctatcacgtagtcaggctgcaaatttttcaaacttttatgctctgcttcccttagaaaactgaatgcttttaacagcacccaagttacctattgaatgctttgctgcttggaaatttcttctgccagataccctaaattatctctctcaaattcaaagttccacaagtctctaggacaggggcaaaatgtcactggtctctttgctaaaacatagcaagagtcatctttgctccagttcccaaccagttcctcatctctatctgagaccacctcagcctgaattttattgtccttatcactatcagcattttgggcaaaggcattcaacaagtctctaggaagttccaaactttctcacattttcctgtcttcttctgagcccttcatactgtttcaacctctrcctgttacccagttccaaagttgcttccacatttttgggtatcttttcagcaacacctcactctactggtaacaattttactgtattagtccattttcatgctgctgataaagacatacccaagactgggaagaaaaagaggtttaattggactcacaattccacatggctggggaggcctcaatatcatggcggaaggcaaaaggcacatcttacatggcagcagcaagggaaagtgaggaagaagcaaaattggaaacccctgataaacccatcagatcttgtgagacttattcactatcatgagaacagaatgggaaagaccagcccccatgattcaattacctccccgtgtgtccytcccacaacatgtgggaattctgggagatacaatgcaagttgagatttgggtggggacacagccaaaccagatcaatttccttctaggtactcccacagcatcttgtagagacccctgttgctatttctgctgcattacctgagattatttgcatctacagattggataacctccccaccagtctgtaaactctctgcaggctgagagttggcatttctcatttttatgttcccagcacatagcacagtgcccagcatctagcagttgttgaacatttatraaaaattattgtgcagctggaaagaaaatcagtccttatagggccctactgtgtgccaggcactgttattcaatctgaaagctgaaagggaaggaagagctgcaagtaagttaacaaagccaagcttgtctcctttcagcaaaaagagacttttgtgctctttcaaccagtcttaaccaaacatcaaagaaagttctcctattaatattgtcaatacatctgcaaaggagatcttatcatctccattgcccagatgaaggaactgtaattctgaggagttgcagatattgaaagtggtagaatccaaatataccccctgttggggggtagctactatctgggcccagcggtccaggcagtaaaggaatttatgaagacatttgtgggtaaagaaaggtagacttattagagaaagtatgaaaatacattgcaagattgcagtgggcagcacagcagagaaggggctgtctgcaaagaggcaggggctggatggaagttttatagggttgtgctggaggggctacctgcaaacgaggtggttgtgcccttgggttgtttgtgattaaccatccctcagaacaattattccttgttcttccccatctgggaccctccctgacctggggctcctttctcttgtggtttatcttaccagtactccacacccccaggcatggagtgtgggaccttttccagagcccaaagcttgctcacttgccagtaggaaagaacattcccttctttggatgaacctagagatccagccatgacctggttagagcggtttgagtgcaggagtcctgtgtggcagggcagtcggactcttcacatcccttctactaagtggtatgtctaagttcccccagtttgaagctatcacttaagatctgaagataagggaaaagtggtttttccttagtggacaggtttgtacaaagcatgtgattacatacttgtcataattaagtcacgccatagactccctagagtctgtgaatctggcagtttatgcagattaatttctaagtgtatcttaaagggtttctttagctgctgtggctggccttgctcagacactcccatatgatggatggggagagagatgatgcagtgtctgcagtgatggagttcctaggagtgattaatggtgtatacactgggttgtttttgatgcctttcctggtattaaatgaaatgttttcttttcctccaaccacatttttttatcctaaagatggactctttcagagagtgctgtttgactgcattctctgtattcagaaaatttaaatcgtggcctggatgaccttgatgccacatccctgagacttagtttatttatttgtaaaaatgaggatgatgattcctacctctcagggtgaatgctattgggagcccttactgacgtgaccatgaagtcatgtccatacttgcacatggaaggcaagttgtatgtgtggatacactcatgagagaaaaaccaatgatgggattgcctccctgcctttatctcctagaaaagagagacattgctggcatttgatggtaaataagtgtgaagtaatgttattactgcttatgggaagtgattaatgggcagtcttgaccaagcctagataaatagccagatgcaaggaagcaagaattgattctggctgcattcaagatgttgcctttgggatcctgaggtatagtaatgacccatcaggattacggtttatctagagatgatgaraaacagaaatgtgtatccccataccatactgtgtgtaaagcagggcccagcagcaccagctttctttgtagtcacatgattacctttttgtctttacaggctgtgacccaattagaactttttggggacatgtccacaccccctgatataacctctccccccgtaagtatgcattgctctctgaaccctgctctctgaattcctttctttacacatcccctcagtggccagaatatgggctttgagtgaaagagggctgctggtggatttcagtrttgactctttcaagctgtgtgacttggacaaactaactagtcattctgatccttaatttgcttggctatttataaaggggaagtatgatatatgcctctgttttgagaaataaacgagaccatgcatttagcaatgacaggacttgcctgggtgcttgctgttcygctgtggtctgagaagaaaggcccgaaggagatgtgcttcctgactacaaggggcacatcgtctggttgggattgtaggcaggaaactcgggatagcacatatgatgaggcatttgtcagcacctgccccaagcccagtacagcataggtggtcagcccagtaaaggaaggatcttctccccacaccctgctctgcccatccttctctcctttccctctttctttcctctctccctcctttttgtttcttccctcccttccagcctgcccttcagctttgcagaccatgacctgggcctcactgagcttctcaagaagctctggattcccagccacagcttcagccagtgtacctcagtcagtgcttacaaaaggacagagattgcagggagaacctartttgaaaacgaaaagaagaaaacagaattaacaccaaagcaaaacagaatcccagtgctggatgcattcaaaagcaattctgccaccactgcaaagaaaagagccgagatggcccctccagcccctcccctgcccattcccggaggagggcagagagcagtcagccgcagctgcaccagctgaagctgccgggaggggacagctcctctgggcactgcgcagttgtgcaaacygagggatggtgctatggttcattggcaagatgcgcctcacagagaaaaggctgtaacctcaccactgaggacagatggcacaagacactgctgcccactgctgccaccagggaatctaggcacagctgccctgctgccaacacctgatgtccaaggcagccttgagggaggggactgcagcctctgtccccaaagaagctggatggctctagcgattgtcattctaccctttatcctgggctaaaagcttcttcctgggaacttggagttgcagaacggcagggctatgcagctagraagggttgaagagatcttctaaccttatccccttcattttacagatgagcaaactgagtcccagagaggacatgtgactcacccaaggtcacaaaggggaaagaaagaacagcrctgactgtgtttaaaagtgcttaacacagcagctcatggctgtgtttctggccctgaacccaagcgcagtccaaatgggtatttaataatcctcagaacaatgccattcgtcctgcaagctgctagtctaaaaatggccttgtctaattgccatgatttcaggattaattgcttgccccagcctattccaaggggaaaaaaaaggatattacagcatcgaacagatttacactctgtaggcaaaagcctgctataaatrggtgtggacatatacaaaattatgagtactgatgttttcatttctgtatcccccatcttgcccaccagtccatgcagcagacctttttggaattccagcaccgactaggccctgtagaattttcagtggtgcaagcattgtttcttgttgtcttcttgaaaatatttacttctttttgcaaatgaagattcaggcaaaatcyggggcgctgacggggggtgtggcgggggggcaccaggatacaagggtctgtgcaccacttgctaaattttgtgtgttgatttagtcaacaactgctcattgaccgtgtattaaattgcaacccctgagctgggcacacagtaggtcttgagtgggtgtatttcagtttgagttggccacctctaaagggtgagtgccaaatattatggaaaatttgatacctgaaaacaccccccagggagtaggggctcaaactaaatcattaggatactggccattatttgccaagcacctactacatgcctatgcacggtgctaaaaatttaagtaatgtaaaataattkaattacataatctcacttaatcctcacagtagctctggaggtgtcatttcccatatagataaagtgtatgtaaccagcacatgggctgcacaccccataagtggcttgaactgtggaccccttcccctgcgccttaattcctgcatctgctacctcccagccttgatgactgctaagccaggtctcatgtgtcctctgcctctctctgtctggcagactcctgcaactccaggtgatgcctttatcccatcttcatctcagacccttccagcgagtgcagatgtgtttarttctgtacctttcggcactgctgctgtaccctcaggtaagccctcttccaccagcttcccttcctttggccttcactcattaagagagagaaagagtttacrgagccagccaccgaatgatgataaaacactgctgttctctcctgtgactcttcaggtgacattgagaagctatttagaggaggaggtggtgttggggtccagagctctgggatgttactggcctggaattcactgatgtctttcacccagacagctcaagattctatgttactcaggtgtgcagcttttgggagcatggcatatgcacagctgtgcaattagcccaagtccatttccactcttccacctctgccaggagagaaagcaataagcaggggaggacacggagtcagctttctatagacttcttgagacctgatggatagaaggggtctgccttacttggtgctgactcaaggaaagggaaggtccccagacaaagtggggagcaccctatgggacaagagcaaactgctaactgagttgtgagaataatgagactcctggtgagttagaaagtatgtgttctgtttttcaaatagtctttaaatgtatttactacttttacaacaagttaaaaaaatatatagtggcagtattgcaggtgagttacaaatggatggagcccagcaatcttaccttgtttccatggcatgaggcgttccatgtggccaggccactgtacttgcaaatagccaaaggtagtttagttctgtttttgacatacatgggagccttaaagggttttgtggttttctttaactatgtatttgaaatctgtggctttatctttcttgcctttattcttataaatggcaaatagagttgtttgaatattttagaataccaatcttcttgcatttttttctataattacttttaattacatactgttagaagcaaattcttgccaccaaatataaactgtgcttttattcaaagtaaattaaaaatgcataccctgttctaaaatagttacggttattactcatgagctaagggatcattatgaacttttagaagcaatagaggttggtaacccttggatctaacttacagtttagactgcaaattgcctagaaatgtattcaattgtgaagtttcccaatctaatctttaaaaagggatagtgatgatgactagttttccttacctaaaatagatattaaaatatccatgggactactataatggcacatgccattttaaataagagtaagagttttccatcagaaatgcaccacccttctatgcttgagtcttgtgttcggagtgcccatgctttgtcctcattgttttatctgtaaagggtatgctgggacagatgatggccccaaacttacaaatttgcaggcatgttcatttcaaaaatgctcaccaggtgccctctatgttccaggtcctgtgtaggtgcttgggatgtgctagtccacacaacagacagagagcctaccttttactgggaagacaggaaataacataaaaataagtaatttgcataatatatttaaaaatgagaagtgatagggacaaaagaaaatgcagaccagagcatgggggcttttgagtgcaggcagagggcaggtgtaagtggagcccctgtagtcacgaggggctcttgcctaggtgacatgtgacaggactagcagggacaggaaagtctcaagtaggcatcagagttccaggtactccaggcagaggaatgacttggtcccccaagtctccattcccttctctataattgagaagatgggactagatgcaattttatatctcttccagccctaacatttgattaaaaacacgctgaggacctgcctgggtgtattagtccattctcacgctgctgataaagacatacctgacaccgggtaatttacaaaggaaggagttttaatggactcactgttccacatggctgggtaggcctcacaatcatggtggaagaaaaaggaggagcaaaggaatgtcttacatggtggcagacaagagggcttgtgttcaggggaactcccctttataaaaccatcagatctcatgagacttaytcactaccatgagaacggtgtggggaaaaccacccccatgattcatttatctccacatggggattattacaattcaaggtgagatttgggtggggacacagccaaaccatatcactgggtcagtcacagcactrctctgggccctctttcaaacctgtaccagattagggacttggaagacctgggttttagtcttgctgcttaaccagccacattggaagctatggacaagccacttccacatatccagatttcctttctttagctgctaaaattttgatagattacctccaagatttcaacttttagaacacgagtctaaaattaatttcaattagcatgtttttgctttctgactctagttaatatgacagaactggcttcagttggtgttaaactgtgtgccctatttctcccttaactggccataaaaatttctgtagctattgaatcccgatctccttgtgactaattgtccagccagtgataaggagacagggaagtgaactggagtatgtgatacaacggatggactggctcctgggggcttttgaatctaatgggccaggtttggatcctgattcagccattatttctaagctttagactcctgggcaaattacttgacctgtcagagtcagagtttcttcatctttataactgagtgtaaaataatacttactttgcaacaatatcaagagaattaaatgaatcactacattaactgcagctgtagaagtggtatcactacacactgaaaaatgctggcacatcatcaatatttagtgtagaatatgctgtattattatgattactctgatttctacagtagatgaatatatgtcctgttctacctatattttttcctttacctggaaattagtgcctgtaataaagtttaggtcttcagcctcttgactgcttatagcagacagcaggagaatgggtggcctggagaatgtactatgtatgaacacaagctctgccactagccagctgcaccatactcagataaatatcttctgagcctcagggaacttaccccgttttaatggggatgatcataattctacctcatagagtttttctaaggattgcatgagtaaatgcacattgtaaaataggtacaacagttcctggcagtgcttccatcagtaagcactcaacagatgtttgctacatggttcttcaggagccttggatctgctattcatacagtgtgtagctgcatcaaatctttccctcatggagttgcaatttctcctatacaaattaaagagatagcaatcacactcaccccagwggcttgtggaaaggatcaccttcacaaaaatgtaagctgcacagggtaagaatttttttttttggtgactgttttgttctttgttttgtctccacacactaaagcagtgattggcacctagtggaggtatttttgaatgaatgaatccatcaaatgagataatgtagataagagatgtcatacaagttctgtataaatgttggaggagttccttcgtttttagtgcttttcttatatttcagtctgcctttttttcttttttcaaataatgggggcatccccaggtgtcagcatctggctgtaaatcacaattttcaacactttttaaaaacctaactgtaaggcagcaaggcagrtgttccctttcactccacagcaaggagatttatgattgctctgaacttcacggcataaacagatgctccttagtacctcctccctccactattggacattaattgtaaacagttaacaagctgttaagtggctgcagtggcagccaccaagtggctccctctgtccagtgccaccactgtcctgctgctgacgtgtcccttcgctcatgcacaagaccatgtggccagacagccttaactcacaggcygaggagagccagcctgcagggamcccctaggaaaagtgagtgggacctgcaggctcctaaacatgatacccaattaccctgtgctgccttttttcttttgaatattgtactttggtctggagcagatggcatgaagccagagagacatgctaatagctctctccagaaaagtgtgcacagcccatctgttagctccttgtggaaaaaaaataaaagatgggaggggaaaaaaaacctgccaccaacagtagaatcatcagagatcacagcacttatgcattgtgggtttaattagacaccgggaaaaatgcagtgaatgtattgactaggactcatttacctttatgtagggcctttytcccgtcccaaaccatgctaggcagggtggaaagagagagagaataaagagttcctgccagcaggtggtttctagtctcatcagggaagatagaacaaccaggcaattgcaaggcagtgtgacaagtgtcatgatagaggtgagcacagggtactgtggaagcccagagaaggaccagtggtgctgacaggagcaagaagccatccaacagaggtgatagygaactgagtctccaagagcaaatcagggttagacagcacagaagcagggggatggctttccaggcagatgggccagcagagacaagagacagcaggttgggttttgtttgcaaatgctggagggcaaggtgcagtgaggatatggattgaagatagtgatgaagaggtggaaggagctgacccccaaggacgcatagccaagctaagacatctgagccttatacttaagacaatgaagtaccatatatgcatttaaaaacagtccttcatggcagcaaggagggtggaataaaagcaaagccaaaaacaggctgatgtcaagagagtgaaaacatccactcattcaccaaaatgggcatcaggtcttgggtgattgaatctgtgggtagttctccacctgcagacccagcacccccttcttattacaaatatttgcaatacctcctttcacaccttgaaatgaatttcatagataatgtagtctagctacayaatttttcaaaatgaatataattctctaactgtagtataaggcagaaagaaaagaaagagaacttgtaataaaaatatatgtatttaaataaggaaatactcaggcgtgagcacactagaagacataagagtcagatgtatatacctgtaagtagaatcactactgaaagccacagctgtaagtccaggctaatacagaagtgtcatgtggctacaccaccatgagaagcgcttctgtcagggatgtcaggcactgccattttccaaaatagtgaacaccttttgacagtgttccaaaccaaaaatacagtcttctctcctgtgcacagttgttgaattcctggaaaattaaatgcattaaaatcaaatgcaaagataactgaatttccatgtaattcaaagtcgattctaggtgcaaatgatcataaacaggatgtggaataatgctttgtcgtacgcattggtctcagacataataggatgtctactgtcaatgcttgggcctcctaaatgccagtagtgccaccccctcctcttgtgacaaccgaaacacaccccacaaattttctagccacccctagggggcagtagcactcccactgagaaccactgggccatatcaaagtaaaccagaaaacaagacagagttgccggattcttcatctrttggtagatttaagccactacattattatgccatgggcgaggcaagctaagcaagcttcacgtttgaaatttcagctccagggcctcttcacccctcttgtttcagtgcagttggacaaagtggtcttacaagatattctccattttgtttgttgacatcattgttttattccgcagaagtgtttaacactgcgagattaatcagcaagaagcccaggtgtcctgttggtgcctctctggagcctcctgttagggaagcacggcatgagaggaaatgggcaccttgcgaggaaaatgaccaggccttgaatattggctctagcctgtatcagtcagatgaaggcgggtacatctgtgacttgagcatggagtgaggcaccctgcattggatctctctgggctcacaagagtcagtgagatgactcataatgtcatcaatgccgtaacgcccacccattgtccctttggaagttgctaggatactctgcatccattcctctttttttcctggtacactgcctcggtacattcctactgacagccatggaaaggctagttttgagaggccaggcaaagctagcttctctgttctctgctctgcccagcctgagaacttgtctctcaggctcaactgcacatagaggtggccattgtgtcccctgagaagggtggggacccctggaagcacatgggagtttcctgcaggcctgcagtattctaatacaatcaaatagaaggcaaggaggtctattaactgcaaagatcagaaattggtcttggccatctgggtgaggcagtgtgtggcacaaaggaaggaaccctggctttggggggacagacaacctcagtttgaccctgctcctacttcatacaacctgtatgaccctgagcaagttgcttttccttgagcaccaatttcttcatccctaaaatacagataataatacctaccctgccgggatttcgtgaagacataaaacacctactagtgtacgtggcgtgttgtaggcatttaataagtggagcttgttgctgttactatgttactattattattataacaagtgttgcttgtgctcctgttgaaatgtatatgtcttacctaaaaagaataatacagtgaacaattatcatggtaatacgtgtgagtacaggatgtggggttttgcagtgtgtaacctgtactgatgcatgaggtgcccctgagtggacaataactttctttctttttttttttttagagacaagtgtctcactctattacccaggctgaagtgcagtagggtgatcatagctcagtgctgcttcaaactcttgggctcaagtgatcctcccgcctcagcctcctgagtgccgagactatggaactctgagcatgtgccaccattcctgactaattttttaaaatttttggtagagaagaggtcttgttatgttgctaaagctggtctcaaactccaagcctcaagcaatcctcccacctggacctcccaaagtgctaggattacaagcataagccaccacatctggccctattttttttttattctctaaaattggaataagaataataatacagaaatcatgcataatacctctcgctaccatttattacatggctcttgtatattaagcaacgtaataagtaactttctagcctctatctaatccaaaccatactactaactaacatttactgaatgttgatcctgtgtcaggtacaatactccacatattaaatatgtactatcaattaatcttcaaatcaacccagtgagatagaaggtgtttatacccattttacaaataaagtcatggagccctagacagatttaagaactgctccccaaattacatagataagaagtggccatttgaattttaacctaggtctctaaaactccaacattcagattcttactcactctgcacactgcctaagtcctgtgaaggaaggtattataacctggttttaccacaaagagtcagactcttagagagcttatgcaattgagagggtcctaagtgcagcaggaagaggaggcaaggagaaaacccaggaggcctgccttccatccttctgccctgtccctgagacacacagcttctgaggctatgagactttagaaacttttagcaactacagaaatgtgattactagcattctagtttttgcttacagatcatctcctcagagaggatttccctgaccacttctctrggatataggctctatgacagcaaggactttgtcttgttcatcttggcatccccagtccctggcacacagtctggcacttagttggtgcttgatacatttctgtcaattacctgagtccatgcatccttctttcccaggacaccagggaaacacctgactctcctttttcattctcccaggttacgttgcaatgggcgctgtcctcccrtccttctggggtcagcagcccctcgtccaacagcagatggtcatgggtgcccagccaccagtcgctcaggtgatgccgggggctcagcccatcgcatggggccagccgggtctctttcctgccactcagcagccctggccaactgtggccgggcagtttccgccagccgccttcatgcccacacaaactgttatgcctttgccagctgccatgttccaaggtcccctcaccccccttgccaccgtcccaggcacgagtgactccaccaggtcaagtccacagaccgacaagcccaggcagaaaatgggcaaagaaacgtttaaggatttccagatggcccagcctccgcccgtgccctcccgcaaacccgaccagccctccctcacctgtacctcagaggccttctccagttacttcaacaaagtcggggtggcacaggatacagacgactgtgatgactttgacatctcccagttgaatttgacccctgtgacttctaccacaccatcgaccaactcacgtgagtgcccctcacttaagacataaaacccaatgagagccgtaactcatgtctggaggcggggtttctggrgtcaaataactcatctcacttgcattaatcaggcttctttgtttatattattattactastaatactactatgagctgccaatttagataccactgataacatacaaaccttcttcatatgttccatgtttatttttagacttataataatgcttaatgataaattttgttagacctgtttgacagataatgaaagtgaggctcaaagatgaagacaatagacaaagtggtattgaattgaatgtaagcctggtatttttccaccatgttactctgcctcttaagattttgtttgtttgctcattcattcgttcatttatttacgtatagatagcttatgacacacagattttggcgtggcttattgaaataaaatgaatgcaaactttaaaaatttggggaacaagttttaaacattagaatataaaataaggatcaagagaaaacttagggcagagatacgcagccataaggtcttaaatagcttttatagttgaagcctcattttgggttaaagcttctggtagttaaagggaacaaaaagatagtgctgcagaaagttctggactgggaacctggagatcagatttattactgaccagttttgtgccttttggcaaagcactttatttctatgagccttggtttcctcatctgtgtaagcratgggttattaaaaggattcaatggtatatgtgctcaaacattatagaactcccagaatttgaagtatcttttatcctcattattagcacatgttaagtgtttttttgcagtcctggaccagagttctggtgttgactcctccaccacaagctgtgtctttgggcaagcgtatgacttctctgagactcagttttatcattggtaaaataagtgaattggcttggatgagcagtgtgcatccttctagttccagctttcagtgagtctcctccagctcatatttcttctgcaaacatctggaaaacagtgactgtgcagccaaatcagaatccagatacacttgagcacatgtacacttgtttgacacaattcagggaaggtgttctgatgactcagcctgtgccttgacacctgataagaggaaagaaaaggctcatgctgcagtgagtttggcggtttcattactgtcacaggtgatatggatcactgcatggccaatactgtgaactgtcaaaaaaaaacacccctaatgttaatacaattagattgtgccatttcagccaggttcagaatgctattctgaaaatgaatgcccttaacgtgtataaacaacccacttgcactcaggccatatgatctacatagtggcagcatctctatttatgcagactcacagggtttcaatgaggaataatgaataaaaaatgaaatgttaaagaaatgacagccatgcataaataagcaagcatctttttaaaaacaaacatctctctttcaatggacttgtgtgccagctacaaatgaaagaggagagtttaagttctttgagggcaggaactggctccatcattcctacacttctcataatgctagcttagtgcctgggacatgagaggcatttgggaaaggttatagagaatgaaataaacaaaatggagatgacttagctactgttatgtttyagagcatcgttggcaacctcggcactatggacatgttgggccagataattctttgtttcagaggctgtcccattgtaggatgtttagcagcaacgctggcctctaatcactctatgagagaaacgtatatccccttcctctagtgtcgagaaaaatgactccaagcattgccaaatgtaccccagggatgaaattgccccagactgagaaccactgctttagagtattagcagcatcctataaagccttctaaagattaagacacctgcataaataaactcctgcttatgctttccattgatttcattaggtaagtctgagcagtatacctgccagaactggcaactyagcttgtgttctcaacctttagtaagcaaaaatccacttcaaatacaattcaggatctaattaagctaatatttattaaacatctactacccttcagggtgtttgcatatagctttaaacccactttcaatacagtttgttccatagtcatctcctgaaacaaaamagatttcattgcaaatttttttccaaaaacttgctgttttattttgaacaaaattagaaccagtctttatatcctctgacccatcagtatccccttaagaatgttttgggaagaggattggttggatcaaaagtgaacctcaaatagaaacagaaaagcacagttggactggatagtgtcagacagagctctgttaaatgccagtgctgctatttcatagctgtgttaacccttcgcaagacacctcacctccctgagctgcaatttctccatctgggaaacaaaaaagttatgataacaacttgcaggtatttatattaaggtgtataatgaatgggaagtgcctagcacagtgtccaactcattggcacattataaataataagttaggaaatagcatcatctttctatatatagattcatcagagtaaaaagtatgcactaagttttacaatcattcactgtctgatttctaagttctataacattaggaaaattcagctgctaaatgaagtcatgccaccctctcacttgggtcttagccagtaaccagtattttcagtgacaaattagaatttattaaaagaagagtggtatcaaatggcatatttgttctaaacctctaaaacaaatgagaggagatgtgggtgggtcagcccagaaaatgcgtatcctttgtccttatagaatcaagtaccagctgtgaagttgccatcagctacatccattttcccagatcactgagacactttctctttattcaacatgtgtttattgaatacctcctatgtgccaggattcagaatctggttctaccagttgccatgagcaaattagcaaacttcactttccttacctgtcaaattagrataacctctacctcaaagatgttttatgaggattagagatattgtctgtaaagtttctaacagtgtttgacacatgaaaggcgctcaataacgtgccctctgatgaaacacagaaagaagaaagcaaaccatagcccagtagttctcagcttgatcatgcatcagaataacctgtagcaggttgttcaaacacagagtctgtgattcagtagatctggggtagggtcagaaaatttcatttctaacaaattcccagatgctactgctgctgcttgtccaaggaccatcctttgagaaccactgccttacctatcagtgtggacgagctccttcctgaagtcagatgtgtgagaggaaagatcaatacgtacagagagagaattcaaatattcaactgattccactggaaataggaagaggaatcctaagatttgacttsaatataagcagattcctgaggtttctttgggatacattcatggcagccaggcacttaagatgtctctttttctgtggtctctgtgtagctccaaccccagcccctagacagagctctccatccaaatcatctgcatcccatgccagtgatcctaccacagatgacatctttgaagagggctttgaaagtcccagcaaaagcgaagagcaagaagctgtaagtgaccagtttgttatttgtttgtgtttttccttaaaattaagacctctgtaactgaaatggataatgcatgaggaagcctacatagaaaagaatgctggctcaatctyataagttctcaaggggttgctaaaggggctttcttttgtgttcaaatgagtcagctgaaaaggactgcctttttattaaattgttactacaagtccacatttgtggtgtagcatcctctaaatgccgttgcaccctcctttacaataactgattgtgctgcatgaaagtatatccaggtgtcttatattttcaatgcttgaaaagagagaaaaaaaaaagtattatcttcttgtgttctagcctgatggatcacaggcctcatccaacagtgatccatttggtgagcccagtggggagcccagtggtgataatataagtccacaggccggtagctagatagcgcaggtctgggtaggtatctgtcctttttatctcctttacccttaagctatctgctttcccttttggttgttcttcacttctgaagccacatcctcaatgtttgcaccatgtctccttgcctgagctgtattgctgatgtttgcaccatcgctccttccctgaactgtattcctgatgtttgcactatttcttcttgcctgagctatatcaccagtgtctgcaccatgtccctttgcctggtgtctacgttctactttgccttttctcatggatgcatgacctttgacatatcctgggaggtaggggtaggggtgagaagtgggaactgatcatattattttattaataatatgttctgcgtggttggtggtgatagaatgaggcatggtccatgctacttagcatgcatttagtttctggaagcatcaacattttgagatggacacattctgcccaccctgataatttctcagtgagccatggtccagatgctttaatcttttaagcaaaatgtcactgcatttgcctacagtctgcagatctaaagaggtcaccaatcaaacacacagagaagccagactaagaagcaaaaacaagcagtgcttgaaataagattgatcgagatgtaagatcagaggaagcccttttcgtctagccagaaaggaccctgcaccctgcatcctttctgatgtgaaattcaaagcccagagatgtgtagcactcacttctgaggctgtgctgtttgcacctgtgctgcagcatgtggattgccaccaaatcacttcagattccatcagcagctactttgagagagatgtacttacatttactagaagtggctttkggcacttgaatttcaatacatctgatttgatcgaaagaaagaggagctgatgaagcaaaccttcttaggagacagaagtacaccttgttacccagacatgatttctaaggtcacttcttgacaaacrtgttcaattttcagataccttcttagttttctataaacacacaggactgcaaggccattcccaaaaggctccttttttaagttctgaacagcatggtcaaaaccattaaaatggtaaacagttttctccactcataaatggattcggaggctacctcataaatggattctgaggctacctcagaattagtcttagcccacacgtaagttagacagttactgaaagctaatatggtattttgaaagtgtattttgttaacaggtatttttattaaagaacctaacacactgtgtaggttgccacattttgtatcagtgcaatagcacataataatatgtcatgccatgcaaaaccacctacgattcacttagaagttcactcttgcaaagctacttcgggagttgatatattgaaagcaaagtcaatgtttcaggaaaaagaaaagttggggactataggcagactccttgggatgattccccacgaggtattttaccccccgcctaagttgtatttcacgtgctcaaccttgccttgaaaaatttggtgaataaactagaggtgacaagagccattcatcaggataacagcaaacatcatcctaaaattgaagttcttctagaaaacaaagatgacttacaccatttgcagatcaatgtattaaaccctcatctttatgaacctgttcagcttgagacaatcctacaagccaaactgtttcatggggctttggtctgttccacatttaatgctctgtccagtaccccaagccacagctgagctgtaaatggacatagcatagtagtgtgggaagaactcaggatttggacttgagtttaaatcctaactcagctacttaatagtgggaaatcttgggcaagaaccaaaatttgagtcttggtttcttcatctgctagaaggggcttatattctccataatggtaactgagatagtttatgttgagtatctagcgcagagacagacactgagtaatcagcttaaaattcagcttaaaaaaaatatctaggttctggaacaacattgtttgagttcagcatctggctccaccacttcctggctatgtgacactgctgtgattttataattattctctatcttattttcttcatttgaaaaataaggataaaaatagtgtccacctcatagggttattatgtgaactaaataaagtgatatatgtgaagctcttagcactgtgtatagcacatagaaagcacctaatagatgctagctaccctcatcatcaccatcaccatcatcattatcatcatcattatcatcatcacatatatccaattaatgcacgctccccactctcttggattttatacatttagctttcatgtataagrccattggttgggaggttttgctttgtactttgtcttcagataattaattttcaatatgtgtcacaacagctttggaagggaaaaaaagaaaaaagcctgctgcttagctctctggcttgccccaccccataatcagaatggccctggtttgggcctcacacagctcactgccaaaaaatgggctgtcttagaatcacatgcaagtcaaaataagtacctcccagctccagaggagggctggactgtaatcttcggtraagtaattttctccctttgaaagcttagcctggccacttcacagttatcaagattcaagtgccaaggggcagatgccagctttgcagacatagccactatgacacacatgggggacgtctgggagagccattctgggtccctccatcgacagcagcacaagacacatttaatctttccatctccatcccattcccccatccacccaactgaaaatttactgactgcaatttcttagtgcctttccaaacatttggagaagagagaccatgcagggaaagttatgtccatggctttattttttcccctctgctttcatatggttggaaagcaagagtcctgtctctcttatcacccttgcaaccattatcaccagctgttttttattagaaatacctgcacagttctgagtaagtagggatgacatctgttgataagctaaagccatatcacaccatagtaagaggaaacagacggactcaatccccrcaggtggaagcttcagggccaatctcaaacagcagtgctgttttagcaataaaggaaagtatcttcaattacttcacttttttccccctaccctcccatctgggagaatcacgtgtctttgaaagactgggtcaacaagggcaaaaaagaaccaaaataatattataatgactggtatgggaatggcaggtaatttatacttcactgatgtgttgctggagcaattttgaggacgaaatgttagcttttgaggagatgaaagaaaaatgaaaacatttatttggttaaatggctaagtaaataaactgcctatcagactttcccagctgtcaagtcagagtagcatctgtaacaatggggaattgtttggtctgcctcccttagtaacaatagatattgccataaataataagttgctgtcattttttaatactgatcttcgtggtgggaatgcaagacatataacatattacctgatggatttctagtgttcaagggaaaagaaagctgaaacctcagatgctttgggaagacgaatcttaagagagtgagagaggaaragagagagagaaaaaaaaggaggtagggagggaagggaagaaaaggaaagaaaggaagaaacaaaacacagagtcaggggccttaggtctgatttctacttccaaagcaggtcaccttaggtaagcatacatcctttcatatggataaatacagataattgcaatagctctctccccaagctgtccaagaatcaaataatatcataagtatgaaagtgttttataagctttgaaagtaaagtacatgtatttgggattattattaccattctctttttaaatacaaccaaacaacagacccttaaaataaagaaccacaaaacaacagaaaatgacctattttatggacacagaactcaatgacaagtccaacctaagtttttggagggcacagtgtcccacttccttggacctttatgaacagactccctgtcgaggtcctgtagctagaaagtgatggcactggatcaggcagaagatgaccagggtctagctaagggcagtgtcagccaagacctcaggcatagtgccaagagatgtttaaaagctgaaatcaacagaaggttaagaccgaagagacatgggaggtgaggaagaggacataaggtaggatgacacccaggttcctggcatggggatctacatggtgccagtcactgtgctaaggaacacaagcagcatgtttgagcagaaagaagacaagtttactttgggaccaactgaactcaaggtgcccatgagacttccaagtagagatgccagtaggctgctggatacaacctctggagatcaaaagagaaatcaaggctagacatggagatttccatatgggtttcagccattggagtagtgagtgcaagtagaatacacagatcatctaaccagaagttgccaaactctctgtaaatatgtgtgccttgtgggccatactgtctctattacagctactctaccattgtcacaggaaagcagcaaaagatgatacataaatgaatgaatgtagctgtgttctaataagactttatttacaaacacaggcagctaccagaattggctaacagaattagatcaggctcactgtttctagaaccactgcagaaggtaatcatgatacctttcacttactaataataataagatatattttaaaattactagcatcacctaatttaatcctcacaggaacactcaggtatttttattattcccatttcacaaatattgcagacaaggtagagagtttaacaacttgctaaaatcctgagattcacatgtaatagcaccaggatttgaatctagacccagattaagtaattcaaacacactcaaacagaatcaggaaggacacctgggttttaatagcatcacatcaatttagctgtgtgatatgaggcagatggtttcatttctgacctttggtttccttttctgtaaaacagttcccacaggtccttccagctctgacattttaagaccatctaacttgcccaaagtcacccagctacagcatggaaccaatccccaaataagatcttccagcagcatctctccctcaggctgtctctattcccatctaacaaaggagaagacagaaatccytaaaatacgctgacttcattaggatccccagagactatcagtcctagatgcaacctgctcccagtaaccaggagcttactcagaaaaggccttcctgcttatggtagataattagtgtcagcaatttcagcgtcatcatctgttatataacaaggccaaaaaagatgatgtacatgtgcaaaacagatcattgatgcccatcattgttgttattattgacggggaaatagaatgttcttcagaacatgcacagttgcctcgaaactcaggtggtgcatctctgtatgcaccaagcggatttcagcacccaagaccccaggaacaagggcattcggcagtgtcaatccctaagggattatcatcaaatccattcagtgtttagaagacttttctaccctaacagccagactttcagactcaaagtggccagaaagctttgtttttccttttgtttgaatataaagaaaaagaaggctgccagcatttaagatacttcatgttatacgagctcacttgtaacttgtcacagtcccatgaggtagakgttattccctccactttacaaatgaaggaactggggtgcagataggtgagatgctcgcctaagttcatatcggaagttaggaggatttctggggtctttctggctccccaaacccatgcatttttcctgaccctccacatggattcagatagaactttgagttattttagcctttttcccctctgactaccaatacctttttcatttgtcaagccaaggaatgtaaaactcccactgagctagtcctaagttttagggctaaaagaccatgaggctgaagttgctgcctgggcagggtaatgctgagggactcaagctttgactcaccttccagctttagtctgatcctcagcttcgcttggcacttttcttaccctakgcccccgggatggggcataagtaggctcactcagcaagctgattgcatggcgcaccatcgacctcacatctgagatcacctttgtcagcatgcagtgtcttcgctccactagtaagatgtattgcttttgacatacttttgtcaaaggtagtcaatctttccaaaaacaaatacaagaaatattaaatgggcagaaagtaatcagcacaatttaggtagcttccaagagygtcttgttataatgtgacataggaaaccatttgcccttatacttcatgccaaagagctggggctgggagaagaaagcaaggaaaccagcacagaaatgggagtctgaaccctgagctgctccctggctctccactgtctcctgtatagctttgggaaagtaccccttgtgtctggggcttcagtttcttcatgcggaaaaggagctgtaggtgtgagggcccttccagcttcaaccttctatgagagggaacacgtggtagtggagaggatagtaggcttaaaaagacctgagtatgtttacatgaaactctagaaaaaacaaacctagtctatagcaatcaaaagcagatcagagctggcactgagatagggagttgactgagaaggcacaagagaagtctttagggtgaagaaatgctctatagctgacatgggtgtatatatttgtcaagttcattaaactgtacatttaaaatgggtacatttcattgtatgtaaattatacctcactgaaattgatttaaaaacaagactaggtaaaatcgtggagatggaaagtagattagactagggctggggatttggggaatgaatggggagttaattgcttaatgggtacagagtttctgtttggggtgatgaaagagttctggaaatgatgctgatggttgcacaacattgtgaatgtaattaatgctgctgaattgtacacttaaacgtggttaaaatggcaaaggttatgttgtttatgtttcaccacaaataaaaatctaaaaaagattaaaaaaaaaaagcagtatgtcccagctctgctgtgtgctggctgagtaactgcacaggtcacccaactgcagggagcccaggtttctttgctgtaaaatgaagacaggagctctaaaggcacagtcctggtgtgtagctcaagtaagactatgtgacattggaaagaccgtatataaactgtaaaagtttctgtagagatataccattattactccagttctgtgagtccacttggctgctgtagtcgagcacataattcatagatagttaaaggacatgtggagtagtctgcaaacggtggaagtttctgttatccacagggccctgcagccaggttgtttgcattaactccacattcattctgcacaattttcctaggctggtccagcaccattcttttattaataactgagagctcatctgcaattgcacctatgtgctatgaaggagaggccatttgaaaagaaacccacaggtgattattaggcctaaaaccattgtctataaagggaggataaagccacactcccagacataagggacctaatgttttttggagtatctcctatgtttcagactctgtgctagacaatcaacatgttttctccttcacagagggtatttctagcctcattttacagatgaggaaactggcacccaaagacgttaagtaccctgcacagaatcctagggctgctaaatgtgtgatggtaagaaaaagaacagcagcctctgacagtcaggggcaggcccacccccacagcaaggtgctggcattctcctgttgaacatcaacatttcacataccatcagcataaggcaaggccacttagtgaccatgataggtcaagacaaaatcaagaccaccaggtcatcatggctgaacacaggcaaaacatgaacattgtcaaaattggaaaactgatcaaacatttctctagcctggtttcagccttgctctgttcttcttgccttccagataagtattgttgggataatcacagaattacccccacattatgacagcatccaattcagagaaaaaccccactttgttgaccatccccaaaattacttaccttaagcccaaatcttgtgatacattctttctaacaccctctttcagagatgcctcattgctcctccctctgcgstgaggaataacccaacatgttcaactacagatgtgtccctggtggtctttgcagcagatcattggcaggagaacactaagctaggcctgcatgacttagtctcctgtgctttagctcttttactgcaccttcgagaaaattgggtgtttcacttacagaaaggttagagggtggattttgctttaggttttaccatatggtttccatctactctgttatctaaaaataaagatattaatatgtcagaatcatattaaagttcacaactatttgccaacttccactaagaagagaactgttcatttactcacacatgtcttcattcttcatgttgttagtggatgcacctcccatgttccaagcttcattcagaattcgggatactgacatgcaaggcccagtggagctcagtgtagaacatgctaggagatgccatagtaggagtgaagacagagatctgcacaggttctgaagcatccaggagcacagtggctcgtgtcacctgcagagtccaggaagccttgatatttcagctaggtcttaaagtatgaactttaggaacaaagaagcctccgaagccagaaggaactgcctgaatgaagtctcagagatgggaaaactccagcatgtgagggtgaaccccaagtagggtttggaaggtagggtgtaggagagagagtggcagtaggagaggctggttgggaaggtgggcattatgtgcagtcttgaggagtttgccttttcctttgagtgacaaggagccaggagggctgtttcaggcaggagactggcatggccaaatccatttcagaaagatcatcctggaaagacataaagaaagatttttttaacatcatttacgtgacctgaaggtagagttttgattcatgctctagaaggggtatttattagctctaatggactaagagactaatgggccttgtgtgcccggcgaaggtgctttgacctaccctgtgggtgatggggagcctctgaaggatttgaagcagggcagagacgtggacaaatctgccaaaagaaaacaaacaaacaaacaaaaacatcaacagcatgttatgttaatgtgcgattccatttaggcttttggaattttraaaatagctcraagaccccgttatgaccttgacagaggccaggttggaaatttctgaatccaatgattctttagctcccctctaagtctgacagtctaagattccataataaggaaggtacagctattgccaaaacgtataatgcatcacagtgtcagactttgggattatctgctgctgggggttttccacaccactgctccccttcattagtggggataattgagagttgactgcagtcgttactgctgttgtgatgggtatttgaagctaaattcgggcaagtaggagatgtgtgaatatttatctcagctgcagaaacttaatgcagtgtggcattaattaccctgtctgagcctgctgtcttcttctgtttttaggtgtcattttcagttggataaattagtttccaaaattagaatagagcaaattgtagggtgagatcaaggcagcctgacttcttggggcatccaaaaagaagaatgrgctgagaacatctatccaggaaacattaatatgcgtgcttgaagcccagcacaggcaaaaggaaatatttttccccagtagttgtacttaactatttttgactccacctactgcacttgtagaacacaaacacacaataaagttacatgtttagccttacaacatgtatttgaaatagttcaagagactggaaaggaatagatttggtgtttaataaatcataatcttactatagattttgctacatttgattttgagagaataaagccaaattggagtgtatttaggacaaagggatcagaactgtgaggaaactagaaacagcattataatcattcagtaattcaacagactctcattgaggacctactgtgctaggttcatatttgtaaaatggcagaaggaggcctggcgcggtggctcacacctgtaatctcagcactttgggaggccgaggtgggcggatcacaaggtcaggaaattgagaccatcctggctgacacagtgaaaccctgtctgtactaaaaaatrtaaaaaattagccgggcgtggtggtgggcacctgtagtcccagctacacgggaggctgaggcaggagaatggtgtgaacctgggaggccaagcttgcagtgagccgacatcgcgccactgcactctagcctgggcgacagagtgagactccatctcaaaaaaaaaaaaaaaaaaaaaggcagaaggaactggcaagtggtaacctagaagtaggacwtggaagaatgggcttccgtacttttctgtcatcagacatttggacgaaggattgtacttatttacatttccaagggcagtagaaagtctacrggcagaaggcatggagggacaagttggcactttgttacactgcataatagggtgcctccaaggaaagaagttccttcccactggaagaatacaaacataacaagttctagaggaaccagaaattggatctgatggcaggagtcttggggtctactcttggcatggatactaagtaaccctgtgactctgaagaaacaaaagctgtcttcacaggacttcagattcctcatctgtacaatgatgggccagtacaaccttatcttctaggccattccactttacagtagaaagcaagcaatatgatatgctacacacaagagacagcacaatgaccttgagatcacacaacctttcagaacttcagtttttatctgcaaagggaggactcaaaaaataaaagccaccctcaggactataaggcagataaataagacatgaggtgctttgtaaactctgaagcaccaatggatggaaagattggggtctctctctctctgtctctccctcctcatggtcactgttgtaaaagattagaaaaagcactggcccctggaccctgttttcagttctcatgtctctagacttactagctgtgtgaccatgggcaaattatytaacttctctgtgcttaatttcacccttgcaaaagagataaagcatctgccttacaaggctgttgtgatgagataaaaagacaatgtacttgaaaatacctagcatggtgccagacacatggtaggggctcccagaatgccaattcattttgaagtttcaagaaaaaagcaaataataagaacctatatgacaaggcaggggacaagctaatatatcaaatatggtaaaattaggatttcattgtgcccgtttaattctggcacagacctccaagagtgacagcataaaggtcaattttaacagaaggtcctgtgcatgcttaaaaccacagtatccatcaaatctgcttggccaaggcacaatgagccatctcaacatcagctgaagtctgacggggtttaaatagggccgaacgctgtttcctatctaggtgtggattgcaggtttgctgcattacatgctggttgaaaatccctgtatgtgtttcaggacagccccctgggtgcaggcaaatgactggccaaagtggagggctcagactgaatggaaacaagtccagaagtttgtgattaagagacaaagacacacttgctgtttctctggctcaacagtgcacccaggcatcactatttgtagaagagcaatttgaaatagaatttcagggttctcaagtggacatttatgaaactgtgttggaaaaatgtccacttgtctcatggtaattgttagcaatttctgaagatgtattgctagcaagcattgtgctagatactttatatgtgtaatctctaattccctcaagaaccccgtaggataaacagtactattcccattttgtggttggagaaaccaagactcaggataagtatcttgtccacatgacacagcttttctaactctccctactataccatgctacttccctaacagggcaatcagttccaacttgaaaacgaaagacagaactgagtgcatagctattttggataataaaaatgttgccaaaatgttatgcaccctgatcaaatactccaaaaataacctaaggtcatccatcataaactgtcacttttctgttttaatcctaaaccccttttcccaaagctgtctcagaaaatccatgcaagtgtaaagagcaggcctcactttgttcctttatccacaggagccagagcctctgtacgcgcagatcaacagacctaagaaatagcatcgatgcgagctcgtggtgggtgctcaagactggcatggacatcagcatcacgacaggctctcttgtattctttcacctcttcccacaagaaattcatgattgcccaatggaactcgctcagaagagggaactaagcatttttggcaaccaatggcagatatctatggcagcacacaaaaaaagtatagaaagatccacccaacattaaatcagaaatcaagcaaatgcttacccaacaaatatttgagccctcatagctgggtttaagatgactcagtgtgcaaaattattaattccctttttatttctctacctgttgaccactgttgagacaccaaatttggagtgacaggcatcagaggattacaacagggttggaactgacttctttaagcaaaagcaaagggtcttctgtgaccacaatatcrtcatccatatgccttttcacataggatgatgtgttttttgtcactccatggggcctggtctgccattttcccccctttcctttttttgtcatgtttgaaaattaataggtgtacaaatttttgtattgcttttgactttttttagatatgggtgaagaaatctaactggggagaaaaaaagcctcagtgaaatgaattaacttgaaattacaagacaaataagtggttgattattcattatgatcacgaatgttgccaaaacagtcctttagctattctgcatcctggtgaagaaagacagctttcagtacgaaccttcattctgtgagtaggaaaagacatcagatcccattgatgagaaagatgaaaaatgcatctgatttcttaagaagctctaaactctaagtacaataaaatgatattttttatttttccgatatcttgctgctgtgttgctatgcagacaagtgtcttctccacgtgccattttcaaagaaaagtcatttgccaaataattctggtacaattctggtaatgtggttttggatcttaaaaaccaactttctaatggaacaatggtggcataaatattcagaataacaaactgattctgtggtccaaatggttcatctctatctctttttgtacatcagaaaattcaaatgggatttttattttataacttgaaaaaaaaaccttaccattaaactctttaaatatttaagggaaatggctttaaggagttctaatgaaaaaaaattgtcttttttttgtaaatataaatgttaatgaaaatgatttttaataatgccattacactgtagagaaggtagcagattgagtgcaaggtgtgacaaacttgatggatggggctcactttccagacgttattctggagcatatggtaggaagctggagtgcagggacagctggcaggagcagttggccaatcagcagctagtgaacgggaagggagcacgtgactccatcatctagcctttccacgagagtccccaccctacgtgcaacacaagaaaaagacaattcacattctgaagaattcagattctgaaactctcccacctccccactcccacctacccccgatataaatcactggactgtttgtacgtgaaacagaagaggctaagcttcctttttttacacttatgagacaaaaagtgcagtgtttggttcgtatgtttagsacatgattttcataaagaatctatatatttttgccctacagagaattgttatacaggtcaagtgtgttttcctgatgttcctatgcagttacagtatgttgaaagtgttttaacactaagaagaaaactttaaagattcatgtgattaattggatttgaggataattattattatttggtttttagatttgaaaagtagaatttccattgagacaattgatttgaataggcctgcatttgattcttcatatcaatagaaactaaaatgatttgggagattcatttgaaaaatgattgtatacttgttcacaaagcgaaaagtgatacatgaaggtaatggttatcatttaaagcccacattttacactatcaggtcacaggagtctaatttttttttcagttagataaactgaccaaacgtctattcaagaatatatgtcaatatcatcctaatgtggaaggtccgaagaaccagaaaagtgagaagggccgtttacctccctctgtagctatcacctgttggtccacagagtttcttgagaaatgagcaaacattttatgattaggtaaccctttcacatgaacgggaagatgggaaaggtggaatgaccataagagttggcctgagaccagtttgttttctggggatttggtaagataggcagttcccatgggaaattgcttaaattgctttgttgcctatgatttgattctaaacaagtggtgctatcttctccctcaatatggctgtcttgagtttgtcttgcagtatcacaccattataccaattctttgggttgcttctgacacattcaaagtgaactctggctgatgttgctgtttcaggtataccatctggagttaatttcctagcagaaggtgaaagtccaggagaattgtcctctttcattgaacatgattgaaaatgtaactggctctgaacttcaagaagatagatgcccaagtgatgcattaaagtaagggaaataaagtcaagtttttcaactgccatccatattctcattggcagaattctgatttttttccaagcactgtttggtgagcctggaagcaccgtatcctgtcccaggagtacagtgaaatttccaagcaagagctgaggtgccaataccaaaagaccatggggagtctgcacggttctggttagatcaatagaaaatccatgtgtacaactgttaattcctcatcctccactagcactaaatttgtcactttaaattttgaaaccagggaaacaccacctgtcattctgtccccattctccatagctcttcaatctttacatgccgcaagacttttttgatagctcgtactcatcccagtgtctcctgaaaccccatcatgtaatgtactgggcaccttcttttaaacaaatgtttactctgtgggtttggttcatttcaatttctgcgttctgacacatatttttttaataaagatgagaaagagaaaatgactgttgcagtacctttctagacctactttaactttacctcagatgacagtttgttaacatatatggacacattatttttaactttatgtacaatgcattcaacagaacagcaaaatttttagaaattttccattaatttctgtaacacaccatgtaaaactgttacaaataaacatgtttgagaacaacactttagcctggctttattctacaagtttccactggatattcaggcttggatcggaagaggaaattgctttacctaagattccatctgaccaagtgacagcctgtgtttccctggccctgagctaaaaagagcaagctttattggggagtaaggtcaatttgtcagccctcagttgaattcaagtgcttgctatgcttggaaaagcagccccagacaggaaggaggatgttgtcagaaaaaaagcaaaccctgggtagatgtggtatttggaccacatttagcatgagacgttcaaaactgggaaagactctgggactagccctgtggattgtgtcttcccctaaaacaaaacaaaaaaaacctattaaactattgattggaaaaccgagattaatctagactgtcaaagagttccccatcgttcattttaaggtcatctgctttaagggactcaagaaggaagcatttatctttctttacattcccctcaaaatccacaccaaaataaaaaggcctgaagctggattgtatgtattgaagaacagaaaaaaatgaatatatgtaggtgttgtgtacatatttatgtatgcgtgtgtgtgtgtgtgtgtgtgatttttatttccttttgtaactaaatcaaataattagccagattacaattaggtcattgagatgcgaaaaaccaccactgtttaagaatggttttgttaatgactgcataaacacaagccctcaatctggccttgttacaaagaaggtattaaacagatgttattgctaactttgagaaaatgagaaaatgggcttagattctagcaaagtacatttggagcagatagaagaaacaatttccatacagttagaaatgctaaatcctggactgaattgttagaaaatgttgcagaagtttttgttttcatttttgttttgttttggttgaaacagggtttcactctgttgcccaggctggagtgcagtggtgtgatctttgttcattgcaacctctgcctcctaggcccaaacaatcctctcgcctcagccctccaaatagctgggactacagacacgcaccaccatgcctggctaatttttgtatttttttgtggagatagggtttcactgtgctgctcaagctggtctcagattccggagatcaagcgatccacaggcctcagccttccaaagtgctagaattacaggcaagagccaccgcagcaagccagaagtttttcttaataaaaacagtgacttgcacatgttgaacagctagtatgtgccaggcaggtgctagctgctctatgtccattgcctcagctaattttctaaacaacctggaaggggtagatattatcccaatttatagataaagaaactgagattcaggtaaattaagtaacttccccagccagcaaatggcagagttgagatttgaatattgggtctctttactcatacttgagtctaattttaaaataattggatattcactgtttgaaatagttctacctaggttttttgaaaaacattgaccttctgtgtctcttctcagactgctagtggatctttggtaataagttaaatttctaagttcctcccattcaaagtaaaaattaaaatccattagatgttactgtcttacactgctaaatacatagttccatctttaaccggcacctttcaaagcttgtgtgtctgagtgataaagaataaactgttttacccaactcgttgaagtttagctgaaaccaagcactggggatttactttgccaacctaaatgaatcttaaagaagtgacaaattaaaaggtgtcctatttaactgctaggtggatgccaaaataaatgaggcagacatatctgctttcattttgtgcttgagagtaagcccttgttgttttgacagtaaatgttttttgttttactcagaatgacagtcggaaaaacacctagaataaaaacaggtttcattgaaatcaaccttcaaagctttgaaagcttttaaaagaagtttaaattcaagggaaatgtgagcaatggtgcctggaagattaaaaagagagagaaagtaaacagatgtgaatggctttccagccatttcgtgaccggtctgggtatgtatgtgaaaacgggaataatcactgccaccgttgtgctcctgctttgtccgtgccactcattttctagctactgtttccaaatctttacacgaaccccaagaggaaaagaatatgctctccatgtcacaggttaggaaacggaaactcagatgtgttccacaacagctatcaattaacagagccaaagatctcacccagaggctgtcacagttcccggggctggattccgggcctctttcctctattccatggtgcttctttctgacaggttttctgcgacgtcaaattgctcgtataccctctataaaatactttgagcccttctgtattcatttccctgttgtgtctattatattagaaaaatcacaccatgcgttaccctgatcaattcagtacagaaatggattcttacataaaatgaccgtagttatttaaaacaaaggaaaaatccagttttattctcaagaacagtaatagctctaactcaatccaatgaatatttaatttcataacaaaaccctttcattcactttatcttccaaggtacagagatctgaagagggaggctttttgaacaggctttctttttactctttgctgaagaatattaatgactgccaagtggaaaaatgtctaaatattcttgcgagatggcagcctctggtgacttgggtctttaatcttccgaacaacctcttgccacttctatcactcactcggggggatcacagcttggagtggggagcaagcaggaatggttggagatggaagaagcaggtcttagagctggcatactgtcaacactaaaatgccacatgcccttcatactgtacctttagcaactctaccttatctcacctttggagtgaaatggtgggagaggtgaactctgaagtctatcttatttcagattacaggtcaaagtcattcacgtgtagctcagggccatgagatcaaaaatctagcaacttagttactaaagaaaagctgtttcctttttacctgtcttgtgccctttcagaccttcatagaaggaagaagaaaggtggtcaaccatcacacagcccatatttatccttttaggataaagcaacatggtgtagactaaaaataaggaaaccctaactcagtgattagtcccactttcatcagaagaaagacaaatgatgcaaaagtcaaggaggcagataa

SEQ ID NO: 8768 - DNA, 37309 bp, Homo sapiens
atggtggctcaagcctgtaatcccagcacttttggagaccgaggctggtggatcacctgaggtcaggagttcgagaccagcctggccaacaaggtgaaaccccatctccactaaaaatacacaaaaaaactagctgggcatggtggcacacatttgtattcccagctacttgagaggctgaggcaagtgaatcgcttgaatcccggaggcagagattgcagtgagccaagatcgtgctatggcattcgagcctgggcaacaagagtgaaacttggtcactaaaaaaaaaaaaaaaggtaaaaggtagtagaagattaaatgagatgtccacgtgtccatgatgaatactctacaaatgctcattgatttttactcaaagtctaacacagggcctggcagagcaggtgctcaataaatacttgttggggccaggtacaggggctcacgcctgcaaacccagcactttgggaggccaaggctggaggatcacctgaggtcgggagtttgacaccagcctgaccaacacggagaaaccccatttctactaaaaatacaaaattagccgggcgtggtggcacatgcctgtaattccagctattcgggaggctgaggcaggagaatctcttgaacccgggaggtggaggttgcagtgaactgagattgtgccattgcactccagcccgggcaacaggagggaaactctgtctcaatacatacatacatacatacatacatacatacatacatacatacatacttgttggataatcaagaagcaatgccacctgccacttgtcacctgctctgtcattcctttctggcaggggcaagcccaattttaaatgactattgaggatccaggacaacctttaactcttgataaaattaaacgggctggtgagagagaatccttgcttacttgagtttatagaagccatgtggcctgttcttggagacccagagaggaaaagggctttgtttgccaaggttcctcacttgctggtggctcccctgggcttggatcctagttcgtggcttccagttccctgtcttctactgcttattattattattgctattttttttttgagatggagtcttgctctgttgcccaggatggagtgtagtggtcccatctcggctcactacaacctccacctcccgggttcaagcgattctcccgcctcagcctcccaagtagctgggattacaggcacccgccatcacgcccagctaatttttgtatttttgtagagacagggtttcaccacattggccaggctggtcttgaactcctgaccaaaggtgatctgcccgcctctgcctcctaaagtgctgagattacaggcgtgagtcaccacgcccagcctattattattattattagtttatttatttttgggagagatggagtttctccaagttgtccaggctggtctcaaactcctaggttaaagcgatctgctcgccaaggcctctcaacgtgctgagatgataggtgtaagccactgcgcctggccttctactgctctttcctacatctaacaaagactttgggcctggcgcggtggctccgcccaaaatcccggcactttgggaggctgaggcgagcaaatcacctgaggtcaggagttcaagatcagtcttgccaacgtggtgaaaccccgtctctactaaaaatacaaaaattagctgggcttggtggtgggcgcttgtaatcccagttacttgggaggctgaggcaggagaattgcttgaacctaggaggcagaggttgcagtgagccaagatcacgccattgcactcctgcctgggtggcaagagcgaaactccatctcaaaaacaaaataaaaaagacttttgagactttgtcaaaacttcgcaataatgtacgtgcttccaggccaaggcaggtggatcacttgaggtcacgacttcaagaccaggctggccaacatggtgaaaccccatctctactaaaaagacaaaattagccgggcgtggtggtgaatgcctgtaatcccagctactcaggaggctgaggcaggagaatcacttgaacccgggaggcggaggttgcagtgagccgagccaagatcgcgccattgcgctccagcctgggcaacaagagggaaactccgtcttaaaaaaaaaaaaaaaaaaaaaaaaaaaaggtcttcagagtgactttagtccattatgactggcgtctacacaaaaggggcgatttggacatagggacacacagggagaacagtatgtgaagatgcaggcagagatcagagtgaagcttctacaagcgaaggaaggccaaagttggcccgaaatccaccagaagccaggagacagcctggggcggtctccgtgggagcctccgaaggaagcgaccttcccgacaccctgactttggacgtctgcctactagaactgtgaggccatatattctgttgtgtggccacctaccttataatactctgctgtggccgacctgggaaactaacacagcgggtcgttactgtcagaccaaaggttccaacttataaacagaatgaaacatttcgtaagttgagtttaaagaaaatggattatttaaaatgcacatgggccccccgccccacattaaaaaaacaaaaaacaaatacaaggcggaggttgcagtgagccgaaatcgcgccactgcgctccagtctgggcgacaagagcgagactccgtctcaaaaacaaaaacaaaagcaagaaaacaagcccgaatggtattctctaccacttaattctgaaagtatgtagattcgtgttttcgtcactcagagaatgaaaattagcgtttgtttgtctaagagctctaagacggggtgagaagtggaggaagaggtccagaggaggaaagaaaactgctcgcccgcgcccgccctgcagctgcacgtgggtcgccctaagcctgggttcggagctgatggcgcaggtcccaggtgccctctagcggctkacgtcagtcacggcgccccggccccggcgcgccccgtccactctgcccactcgggacgcgtggcttgaagtcccgggaatgccacggttgcacccacaagggtcgatcaactcggcttccttcaggagacctggactgaccacccgctgtgtgccaagcactgtttaggtgctggtaaaatagagcccactgctcctggagttcgctctagcggtgggaggccgacgattagcagcgggaataagcgatggagsggggtcgggccgggaaccgcagggatcctgggtgcgggttgcgattgcaaatgggggcatcgggtaaacctcgctgagtaagtgacatttaagcagcgaccacgacgaggaggaggagctttgacattgtctgcaggaaaagtggtccaggaagaggaacagaagcgcaaaagccccagcacaggagcaagggccagggaggaggcggaggggctgccgcggagggagccgggcaggggtgcaggagggcagaggggaaaggcgcaggtccggtggtgtctttcaacgggatgttaccctgggcgtagggttgtcagatacagcacatgtattcttttagtataagtatgtcccaaatatggcgtgggacatacttacactaaaaaaagtttcattgtccttttgcaattcaattttaacccggcatcttgatctatatttgctaaatttggcaggcctgttagggctgcaacaaaaggagagagtgtgagcagagaaatgacttgatctgactgttttaaacccatgtgactcttacctattgctatgccagagagtgtgctaggttctgggcattcattcagctgtaagcaaaatggacaggatgcctgcacccccaccagtgctctgtgagagggctttacccctttggcctgctcatctatccttgtcctttggacacagtaaagtgctccagacttcaggacgcttgcccagcctcccagcacaccacctaatcttctccgttccctataatatccgccttccttgttatgcggagagctccatcaggatggggattaggtttctttgactcacagctgattgggggccagggcactgccgggctgaatgagtatgtcttcactgagtgtccgtttttctaaacctggtcctctagccttactcgtggagggtgacctacctaacatcctttacataaaatcttttcgaatcagctagactcggtttctgctgcttgtgacatagaaccctgacgatacctcagtccaagcagtttagtggagtaatcagagcagaatgtataatgttaaaaagctggcccgatgcggtggctcacgcctgtaatcctagcactctgggaggccgaggcaggcggatcacttgaggtcaggagctcgagaccagcctggccaacatggtgaaaccccatctctactaaaaatacacacacacacacacacacacacacacacacacacacacacaaagtaaccggacaaggcgygtgcctgtagtcccagctacttgggaggctgaggcaggagaatcgcttgaacccaggaagcagaggttgcagtgagctgagattgcaccactggactccagcctgggtgacagagcgagactctgtctcaaaaaaaaaaaagctggtgctcctggagtgggagggccacgcagcacaccatagtcaggccctgtaggagaacagtaggcctctgggacatgcaggctgggtggtggacacggtggtggtttgtcttcccagccttttctttctctctctctttttttgcatacagatcctacgcttttaggggtgggtaccatcgttgcctactcagtggctgtttcaacccttctgcctgtaccatgtgatttatttatgtgctcagttaacaagagagagagcaaaatgaaaacatttttacagacactaaaaaaaaaaaaaaaaaaaaaaggagaaagccatggtggtttgtccactcaatgaaacactgagaaatcatttaaagtgacatttgcaattgtttagggatatgcttattctagaatattaaatgcaaaaagaaagataaaaaatagactgcttcattgagccgaaatctcgccactgcactccagcctgggcgacagagggagattccgtctcaaaaaaaagactgcttcatacaaggctttggattccgtgtgtgtgtgtgtgtgtgtgtgtgtgtataaatacacgtgtactgtaggaaaaaaaaccagcaggaaggaagccaagaccccagcggcccttgtttattgggcgatagggaattcggtggttcttttgtccggttttctgtattttccaagcttgatttaaccatgctaaaggcctctgttacacgaagtttccacgctgcaggattctcggagataaaaacaacactgagttggcatgtttgaaaaccttctcactgcggagctaagcctcccatgtgcaatttgcatttttcctgtgaaaaaaagccgccttcgctgtagggagtcgcctcccttctccttgaagtcccctaagtcttagtttctgcatcgggccaatggggatgactgtgaagaggtcggaagtcgcggctgtggcgaagcggaatgcagccagcggcgccggcccggcagggagtcgctagggggcgggcgcgggcttggagccctcttaggcgctcccgtggggrcccaacgtcaggcggccggttagctcagttggttagagcgtggtgctaataacgccaaggtcgcgggttcgatccccgtacgggccaggctaactttttttttttttttttggtccccgcaatgttcctttctgatactgtaaccggcgtgcaggcaggagagaactgcggaatcttttggactggcccagaggttatccaaggctacctgctggggagagcgggaggaactcagagcgcgctggggcggtggctcctcaccccgagtccccgcgccgccacctgaagggtctgttttagaatgccattggttaggccttttacttttgtcgttttaaaggacactctggacatccaaccgatgcacatcccacgcccccaccccccacgtttcctgaggctgcgtctggcctggaggaaccgcccagtgaagacaggtgctcgcagatatcaccgcctagtgttccctgggcccacttgcggggaagtcttggaggtgaaaatccaggtctggaatgaatgcattccacagatgcatatggagagctactgcatgcccagcaccrttcctaggctgggagcaaaacggtgagacacaaaccccaacccgctggagacagtgaccagccactagatgactgccatgtttttagtgaggcattcaggttgtggaagcctctggaaaccttctcttgctttttgtcccccctcttttcttttcggagacatcttaggcttcacatttcttcctcttggttctacattttgaagccagagcaagtggatgaatttctcactcggttcgtttctagggtggtcaggtgtgctcagctgaacaaaagccggttgtataaggttsatgccattttatgtcaggatccggcaagggctccacctgtttttgaaaattctacagtggaaacagctactagttctgacctaaataagaagcagctcaacatctacagaccttggtatgtgcccagggtgtagtaaaagttctcaataaatgccagccgatggcgctgctgctattataagcaaagttaggagagcctggggcagctgacacttaaaatagacatctgtacacaggatggatgtcacatcttttaatagtcgtgccaggcacgttgttagatgcagggacacagcatggaggaatcggtggaggttgctgccctcaagtttcctgagcttgaaggggtttagaatatgccacggtggcatgaaaattattttgagcagaaggcatgtgaattcctgaaatctggtcgggtgtggtggctcacacctgtaatctcagcacttgggaaggccgaggcgggcggatcacctaaggtcagggtttcaagaccagccttaccaacatgatgaaaccccgtctctactaaaaatacaaaaattagccaggcatggtggcggacgcctgtaatcccagctactcaagaggctgaggcaggagaaccgcatgaacccaggcgatggaggttgcggtgagctgagattgtgccactgcactccagcctgggtgacagagtgagatcttgtctcaaaaaaaaaaaaaaattgtggtaagatacccataatataaaattcaccattaaaaaataacacggaagggatcatcgtgaatgcaatgtgagtattgatgaggatggtggtgatcttccagaaccttctctgacgccacccaggccgccagccttactttaccggcttcggcgctcatcatactgtgctgcaaatgccagtttcctccttcccccttgggaagtttcctccttgggggtcggcacctagactgtataccccccagggcggaaacagcggttcacccaccaggtgcttaagaagggtttgtggaccagtggacctcctgctctccctggggaaaggagctgggacatgtgtacacacctgcagctacaagattcggagggcgcacagagcctcaaccgtaagaaggagaggcgatcaggctgaggaagatggggcagtggagctggatggatagagagagggtgggttcattcattcgttcactcattcgtttattcatattcatccatccatcattcatgccctgagcgtgcgttgtgttctgggcagggcctgtgctgggcaccgattgtgtaatatatcatctctcccttcaaggtgcacccaatctgggtgggtgggtagagagaagctacggtgacaaggcaaaaatttgggaaacactctcgttaacaattcaaactgtggtcccctcccagatgtataaatccaaatgtttaggggtgggcacagtactctgcatctccagacagcatcctccgctgattcggatgcatgatgacgtcagaacacttggatattgtggtaacttttgggccaggggctctgaaaccccgaagacctccccctgggagatccgggacagctcccagagaaggtgagtcttaaacacatccgtgacaggcaataaggaaaataaggggggtccgctctgctgatcagccctaagagccgcggcggttgtcggctggggcggggcactccacgactttcccggccagacacggtcgccttcctaggtgtcttggcctgcgaggcactcgtagcccgcccctctcctaggtgacgtacattggagacgccgtcgctcagcgacccgggttcgagtccccgcctcggccgccatggcggatgcggagccggaggctgggggcggcagcgaggatggcggcggcggcggcggcccggctcctccgggccagagcggcagcgtcgcacgtgtggccccgctgggccccgagcagctgcggcaggtcctggagcaggtgacgaaggcgcagccgccgccgccgccgccccccttcgtgctgcgggacgcggcgcggcggctgcgggacgcggcccaacaggccgccctgcagcggggccggggcaccgagcccccgcgcctgccgcgcctgctcccgccccaggtgaggcgtcgggagggacgtggggaaactgaggcccgaagggggccgacgccccgcggcggggtagctgcttgtccggggaggccagtatccgcccgggttaagactcagggcgtccccaggctgagcttcttagggacggcgttcggcccccacctgtcaccaccctggcattttcaccccaggagcctcactctaggagcggttgctcacgctgggccctgtgcctggaacgccctcgtgccttctctgccttcacagccctgctgggggcttttgcgtgctccctagctcttcttacaggcctttcaccgctggttcagcctttgtggagcacttagagaccgtgttcccagcactccccactatgtgcaggaggtgaagccttgaacacacttgctgaagaacgaacataaggcaggttctgggattgacgggggctgctttagagtgggtggtcccgtaggccagacactggagctgaaacataaatgaattaaaaggaaccaacttagcttttcagttgtaaggtgccaaggcccaggcttggaacaaagtcaagcacaatacactagttcgctgcaggacttaacatcctgggtgatagtgactgatttgtaaccgcagtacccagcacagtgcctgatacacaatgtttggaatatgtgaaagcactctgtatactacaaaacatcctttcccagtgggtttatttcctgggccacacaccttttggttgctaggggggtgataactagaagacggtcgcccaactccggagggtgaagcatagcgcctgaagccagagggcctacacggcatctgtaaaattccaccccatttcagcgctggggttgtaaacaaaattagtctcaccccaaaattgccaaaagaagacagctttttccactagaagaaacgggttagggaatagaatcaggaaccttcactcgttgagtttttttgactgatgttagctgcttagggttgtatccagttaatcatcaagactggagagttgtcttgctaaggtttaggaagaccagtgtgattctgtccagatgccacactatcactatctagaggtgtgaccttgggtaagtcaacctttttggactttggtctgggtcagaaggctgcaaggtgccatctgggggcagctatctgcaaagcctctgctctgcgcccggcgctgtgcggggccgctcagttttcagcagtgtttttgtaccggcattttgcaggtgggaaacaagctcagggaggttgcgtggctttgcccaaggtccctcaggtgtggctgctctccctagcccctgtactcctcaccataccctgctgaatatggccacagctttttgggtttggaatccaaaaatgacatatttttcgtaaagcaaaagcaaacttattcgagcttaggcagcatgatgggattgtattttgtagctaatctaatggagacgatataaattctacctgcaataatatacctttgcagcacattcttttaatactctttcagccccagctgtgtcatggaggccacaaaggcaaaccggatgcgtactttgcccctcagtagtttatgaactaacaggagatgaaacaagacccagataacttctagtcaaggccagaaagctaaagatagtgaaaaagaactgaatgtatttagagaaagggagattgttcctggctgaggacatcagaagcagctttgttgaagaagtggtatctgaactagatttgaaagggtgcgtctgagttgaaaatgcagaaggggagaggcaggttctggggcggttgggggtgcatttcaacaaccacagcagaaggcccagtgttcgctgtgggggtggtgtggatcagcagcacagaccaatggacacacttgggtcagatcgaggcccctgtctctccccatcctccctcttccccaccccacagaaatttccagttccatccaacatgctgtgccccttttcatgcatccgtgcatttacacatggatgtgtgccctttttcacctggcaaaaattcccagccttcaaaatgcccctcagagatcacagcttctgggcagcccaccacctctgggctgttcctgcctcttgattgcacctgttgtaccatgatgacatttttcctgtctgcctcacctgtctgcattccttagggaagcttgtctgccttcagaatcatcagtggagcttttgaaagggcagatcttggggcctcaccccaggagatccgattcagcaggtctgcggggactgaggtatggcaggggaaaccgcccccatctcaagggtgaggttaggacttggctcctgtgtatgtattccacccagaaatactgagttaacattagctgaattaactaaacaaagtatcaagcataatacccacagggtaagccagtgaggatagaggataaatacattattagtctggctttgccgctgtggttatcctcaaacagtagggtttagtgtatgtatgtatatgtattatgtttttgttttggggttttgttgagacagggtctttctttctcacccaggctggactgatctcggctcactacagcctcgaactcccaggctcaaatgatcctcacacctcagcctcccgagtagctggggctacatgtatgcaccatcatgcctggctratttaaaaatgttttgtagagacagggtcccgctatgttacccaggctggccctgaactcctggcctcaagcagtcctcccgcctcagcatcccaaagcactgcgattacaggtgtgactggcagtaaaatgaaagagatggggttcttgaaggatatgcgcagtcaatctcgttgtcatttgtttcacaagtagcccaggagtcggggactcccagggctatggtgccacctctctacaattcttcatacaaagtgttggctgacctctgctatttgtactagtataacagacagacgagagacacactccagcttgatctcagtgaggatctttattctgtcctgtgtgacatttttgttgatgctccactgtttgagggtcacaccagaaggttgagtccaaagagggccagttggtsgtcccaaataagtgattctcaaccgagggcagttttgccccacagggggcacttggcaatgtcttcattgtcaggactcgggatcactactggcatctagtgggtagaggcagagatgctgctggccatcctccagccacccatgtcaaaggattatgttctgaaatgttggttgggaaatcgtgctctggatgatgaggtttgcctctttttctccctggaggaaagtgctcattatttctgctctgtgagggcgggagccttgtttcttttgcttccccgtccttctcccctaagctgtaagacagctgtttccctgacacctgtaacagtgtttctggcacgcggtcagtgctcaataaatatttgtggggtgttattgaaggtagttctcccctttggtaggtgttttgctattatagacagtgctgccctgaacttcgtagaacagaacatctttgtggccacctgcgtgttttttttatagaatccaggaaatggaattactgggtcaaaaagcacatgtatttgaaattttgttagatatatttgtaaaaagttattgaagatactcagccctacgcctaggtacatgcccctggagaaagtcacacatgtatacacatacatcgtgaagattcagagcagaacttaggaacagaaggttggaaaccacctgtccatcaataggagactggtgtactcatactgcagagaaaatgaacccgtgacacctacccatgttaatgtggataaaattcacgaagcaaaatgaagtaaagaaacccagaaaagccctttcaagttscaggagatgatatcatttatataaagtttaaaaacatttcagaactgaactatatatttttagaaatatctgcatatgccacataaatttttaaaatcataagaatgctaaacagcacattcaggacagggtgaagaaacaggcatgcaggttgtgcagtaggaagctgggtaacattgttccttatggctttgttgtcgcttccagaatttcattaaaaactttttaaaaaacatgggcccacattatgaattacgtctgcttttagagtactaaaaactccaagcaaaaacacatgggtaacgccgggcacggtggttcatgcctgtaatctcagcactttgggaggctgaggcggacagatcatgaggtcaggagtttgagaccaccctgaccaacatggtgaaaccccgtctctactaaaaatacaaaaattagccaggtgtggtggcaagcgcctgtaatcagggctactcaggaggctgaggcaggagaattgcttgaacctgrgaggcagaggttgcactgagctgagatagcgccactgcattccagcctggaccacagagcgagacttcatcttaaaaaaaaattagctggtcatggtggcacacacctgtgatcccagctattcagtaggctgaggcaggagaatcatttgaacctgggaagtggaggttgtggtggcactccagcctgggcgacagaacgagactccatctcaaaaaaacaaacaaacaaaaagccagccgggtgtggtgaggcaggtggatcgccagaggtcaggatttcgagaccagcctgaatggtgaaaccctgtctctactaaaaatacaaaaattagccggggcgtggtggtacgtgcctgtaatcccagatacttgggagactgaggcaggaaaattgcttgaactcgggaggcggaggtcgcagtgagccaagatagtgtcgctccactccagcctgggcgacagagcaagggtccgtctcaaaagaaaaagaaaaacctcacatgggtaaaactgttaggaaggctcttatctcttcactggtcatgaaatcaacttagtggattatgactagtattttttaaaaagtgatgtagaatagggctgggcgtggtgtctcacgctggaaatcccagcacttcgggaggccaaggcaggtggatcaatcacttgacgtcaggaatttgagaccagcctggccaacatggtgaaacccgtctctaccaaaaaatacaaaaattagctgggtgtggtggcagctactccggaggctgagatgagagaatcgctgaaactgggaggcagaggttacagtgaactgagatcgcaccactgcactctagcctgggtgacagagtgagaccctaatctcagaaaaaaaaaaaaaaatgatgtagaatagatacaatcagcgggcatttatatagggatggtaagtagttccatcaactttattttatttatgtatgcagatatttatatacacgtgtactaggtcataatgtaaaatgtatcattgtggtctctgtttttgtttttgtttttttcagatggagtctcactctgttgcccaggctggagtgcagtggtgcgatctcagcttactgcaacctcctcccgggttcaagcgattctcatgcctcagcctcctgagtagctgggactacaggagtgcatcaccacgcccagctcatttttgtatttttagtagagatggggtttcaccaygttggccaggttggtctcgaactcctgacctcaagtaatcggcctgccttggcctcccaaagtgctgggattacaagtgtgagccaccaagcccagcttatatcactgtggtctctggtcagaaaggtctggaaaataccaccttagtacaaacacattacatcaacttttatatgtaagatgtaatttagaaaaaatgtcaataatggttttatgacgagactgaaattgcagacatgttcataagcacaatgcttcttttctctttcttgtctttctgtrcgtaagcaactagaagccatttgtgtcaaggtaacgtctggagaaacaaaaggtcaggaaaggccaatgcycctaccgaccacaatccagccccaaactgcaagaaagagccagctgccccgggggaattcctgcctggtggggctccatatcgccagccctcagctgctcagrgtacagccgcttgtgagaaccgagccacagtcctgcttcctaagtgacttatgccaacctcctgctcaggggtttgtacagagaccactgccagccctccaggtggtycctgcaaagagagtcccagcccccaaggctccaratgaacagggctccatgttgacccctttgtctgcctctgacccgctggcagtaacatctctttcatccagttcagcacatccatttatttccaacttgcatacaagacatactgagaaactaaaaaaatcgttaaaagtaaagacacgttctggacgggtatctcgacctcccaaatataaagctaaagattataagttcataaaaacagaggatctggcgratggtcatctgtcagattctgatgattactcagaactctgtgtggaagaagatgaagatcagagggagaggcacgcactctttgacttatcgagctgctccctgaggcccaaaagctttaagtgtcagacttgtgaaaagtcatatatagggaaggggggactggcccgacattttaaacttaacccaggccacggccagttggaccccgagatggtgctgtctgagaaagccagtggaagcaccctccgggggtgcacggaggaaaggacgctcagcctgacctccctggggctgtccatgccagcggatccatgtgagggaggggcccrctcctgcttggtgacagagtcagcacgcggtggcctgcaggtaatgtttctgtctgggtatgtgtctttttatttggccgttctcggattgctataaagaaatacctgagaccaggtattttataaagaaaagagggttggctcacggttccatagactgtacaggaagcatggtgctggcatctgtttagcttctggggaggcctcgggaaacagagtcacggtgaaggcagagtgggagcaggcgcctcatatggccacagcaggaacaaggggcagggggaggtaccacacactcatttattttttttgagatggatcctcgctctgtcatccaggctggagcacagtggcctgatcttggctcactgcaacctccgcctccccagttcaagtgattctcctgcctcagcctcgcaagtagctgggattacaggcgcccascaccacgcctggctaatttttgtatttttggtagagacagggtttcaccatgttggccaggctggtcttgaactcctgacctcaggtgatctgcctgcctcagcctcccaaaatgctgagagtacaggtgtgagccaccacgcctggccaccacacacttttaaacaaccagatatcatgagaactcactcactgtcatgctaaaccagccatgagggttctgcccccatgatccagcagtcacctcccaccaggtcccacctctaactttggagattgcacttcaacatgagatttggtggggacacagattcaaaccaaatcagtcccagttcctgcccctgcctgctcatcatccttacattgacccttatggtgtctgatctgatggggattcaggcgaaggctgtagcgggaccagaatcactctagtggaggatctgagacccccacgttgtctgcactgctgccaaacaggccaggaaatgtgtgtcttctgtgtgctaggatgatttagtgagcacatctcatgggaatgcrtccgtcagctctaggtttggtcagtaaaaccaatggcagtgcgctcttggctgatgttgccattacagagggtgttgagaaaaggagtccctgggggtgcttctggagtgtcaacagctcctggctgcttagcgtgtcctctcccccttctgctgcttctgcaactcctgataaagtaggtgtgagtcgctatgaatttgcattatcacatcaaaaaatttttttctaaaatattttattgagccgggtgcagtggctcacacctgtaatcccagcactttgggaggccgaggtgggcggatcacctcaggtgacgagttcgagaccagcctggccaacatggtgaaaccccatctctattaaaaatacaaaataagctgggtatggtagcacatgcctgtaatcccaactacttgagaggctgaggcaggagatttgcttgaacttgtgaggtggaggttgcagtgagccgagatcatgccattgcactccagcctgggcaacaagagtgaaactccatctcaaaaaaaaaaaaaaaaaaaawatatatatatatatatatatatatatatatatatatgtatacacacacacacatatagtagtaaaaaaacacatagcatgacatgtaccatcttaaccatatttaagtgtgtggttcaggggtattaaacacattcacagtgttgtgcagccatcacccccacacatctccagaactcttttcatcttctaaaactaaaactccgagcttcacgttgggctaagtgaaaaagaaacaaaaaaactaaaactctgtccctgtaaacaccaactctccattcccttttcccccaaccttcgactttctgtcttctatgatcttgactactctaatttccgtatagaagtggagtcacagggtatttgtctttctgtggctggcttatttcactttgcacgatatccaaggtttatgttgtagtaagtgtcagaatgtcctccctctgtaagactgagtaatatctcactgtgtgtacatatcacacgttgcttgttcatctgtcagtggacacttgggttgctttcaccttctggctattgtgaacgatgctgctatgaacacagatgttcaattacatctttgagaccctgctttcttctttttttttttttttgagatggagtcttgctctgtcgccaggctggagtgcagtggcrcgatctcagttcactgcaacctctacctcccgggttcaagtcgttctcctgcctcagcctcccgagtagctgggactacaggcacgagccaccacgcccagytaagtttttgtatttttagtagagatggggtttcaccatgttagccaagatggtctcgatcgcttgaccttgtgatccaccgccttggccacccaaagtgctgggattacaggcgtgagccaccacgcccggcccaatttctttgggtatatatccagaagtggaattgctagattttaagtggaattattttctttattttcttttcaaattgttcattgctagtgtttagaaatgcagctgattttgtgtatttatttatttatttattttttcagtctgactctgttgcccaggctggagtgcagtggtgtgatctcagctcactgcaacctctgccccctcgtttcaagcaattctcctgcctcagcctttttagtcgctggaattacaggcgtgtgctaccatgcctggctaatttttgtacttttagtagagacggggtttcgccatattcgccaggctggtgtccaatttctggcctcaagtgatctgcccacctcagcctcccaaaatgctgggattataggcatgagccactgcaccttgcctcatttattaattctaatatttgtgtgtgtgtgtgtgtgtgtatgtgtgtgtgtaatctttaggcatttctacatataagatcatatctgcaaatagagataaccttttttttttttttttttttttgagacgaagttttgctctgtcacccaggctggagtgtaatggcgtaatatcagctcactgcaacctccatctcctgggttcaggcgattctcctgcctcagcctcccgagtaggtgggattacaggtgcccaccatcatgcccagctaattttttgtatttttagtagagacagggttttaccatgttggccaggctggtcttgaactcctgacctcaggtgatctgcccgccttggcctcccaaagtgctaggattacaggcgtgagccattgcgcccggcctcagattttctacttctttgtgatttagttttggcaggttttgtgtatgtaggaatttgtccatttcatttaggttattcatgttgttcagtgttgtagtatttagtattctattataattctctctctttttttaatttttattattattttttgagacggaggtttgctcttgttgcccagtctggagtgcaatggcatgatctcagctcactgcaacttctgcctcctgggttcaagggattctcctgcctcagcctctctagtagctgagattacaggcatctgccactatgcccagctaattttttgtatttttagtagagacggggttttactatgttggccaggctagtctcaaactcctgacctcaggcaatccacctgcctcagtccccgaaagtgctggcattacaggcatgagccactgctccccgctctttttttttttttttttggcgatagagtctcactgtgttgccctggctggagtgcagtggtgcgatttcagctcactgcaacctccacctcctgggttccagtgattcttctgcctcagccttcaggtgtgcaccatcacacctggccaatttttgtaattttagtagagacagggtttcaccgtgttgtctaggctggtctmaaactcctgacctcaggtgatccacccgcctcggcctcccaaagtgctgggattacaggcatgagccaccgggcacgcctggcctttattttatttttctacgttattattcctgttttcagaggagggaattgtcagggaatgaggaaacaggacatgaggacaaggccagatctagggttctcttcaaaagccatgcagatgcatggagacagaaagtagaccggtggttaccaggacctgtcgggagggaggaggaggagtgactgctaatgggtacagtttctttctgagctgatgaaactgtgttggaattagatagtggttatggttacacaatttcgcgaatattttgtatccactgaattatrtactttcaaaggatgaattttatggtattttaaatctatccagtaaaataatttaaaagtttaaaaagtcatggatacgtaatgaattaggaacaaaattcaggtcaggttttaaaatgacagtcacatcagagaaatctttttttttcttttttttgagacagagtttccctcttgtcacccaggctggagtgcagtggcaccatcttggctcactgcaacctctgcctcccaggttcaggtgattctcctgcttcaacctcccgagtagccaggactacaggcgcgcgccaccgcgcctggctaattttttgtattcttagtagagatggggtttcaccatgctggccaggtcggtctcaaactcctaacctcaaatgatccacccgccttgggctcccaaagtgctgggatttcaggtgtgagccacggcgcccggccactaaaaggtttttatggggtatataaagcatgattgttttattttacttttgggtgtgcaacactgtctagaatggtcagtctgtagacgttgaagagacattgccatctgaaccagaaaatggagctcttttgcgatcagagagataccaaggacctagaagacgcrcatgctcagagacccttgcagagtcccgcacagctgtcctccagcagagaagagctgctcagctacctggtggccctgctgcggcaggggagcagagggcgtcgccaagcaaagccaggctcaaggaggtacctcactcttaaaccctgtgcytgaaacccgtgtctttagcatggatgtggcaatcactatcagtttctgaatcacctaagcagttcacctgaaatgtcattgcattaagtgtgtgatgatgccaaggacagtaatatctgaactaattcgtactcttacctgtttaaagtgactgtacagcctttggtgyagctccaaaagctgcttgacttgataagttttggaataattataacctgtgtttatatggaagcagtttagaaaacaacggaagtggttttcaaaaccattctttttttttagacggagtctcacactgtcatccaggctggagtgcagtggtgccatcccggctcactgtgcttctccacctcccaggttcaagcgattctccttccttagcctcctgggtagcttggattacaagcgcctgccaaccacacccagctaatttttgtatttttagtagaaatagggtctcaccttgttggtcaggctggtctcaaactcccgacctcgtgatccacccgccttggcttcccaaagtgttgggattacaggcatgagccaccatgcccggccttcagaaccattcttgacttacagatgataatttctccagaaatggatattaatttatacatttactgggtgtccatcaagtatcagtccctgttctagggatggaggggacagtgtgcacaagatagacagggctcggctcttaggggagaaacaggacagtcaaaccagtcatctgacaaaactgtcagttgaggccgggcacggtggctcacacctgtaatcccagcactttgggaggccgaggtgggcggatcacctgaagtcaggagttcgagaccagcctgaccaacatagtgaaaccctgtctctactaaaaatacaaaaattagctgggcatggtggcaggcgcctgtaatcccagccacttgggagactgagggaggagaatcgcttgaacccaggaggcggaggttgcagtgagccaagatcgtgccattgcactccagcctgggggacaagaacgagacttcgtctcaaaaacaaaaacaaaaacaaaaaaaactgtcagttgaacctaagtgttaagcagaaaattgtggagtttccctgtctgctgttattaagctcatacagaatttaggtcaggccatggcaaggtaatatcccatattcccaccttctcccacttcctgtggagttgaaagtcagctggccacttctttcaaaagatttttgaaagtcttaattaaacatttttgtcttataatgaaaagatttttctgtagcttttctgcttgttttgcgagcatctgtggccctcctctgaagcccttccagccctttgcagctcctactcaatctcttgctctctctctaaatgccaatctttttttttttttttttttgagagagggtctcattctgtcacccaggagcgtagtggctcaatcatggctcactgcagcctccacctcccaggctcaattgatcttcctgcatcagcctcccgagtagctggacccacagcacaggcgcacacccccacacccagctgatttttaattttttttagagacagggtctcattatgttgtccaagctggtctcgaactcctaccctgaagtaatcctcctggcttggcctcccaaattgcagggattacaggcgtgagccactgcgtctggccttctaagcactgatcttgtgatctccctggacctcagaagacttcctgtttctaggacttcctcagcttccctctcactttattgcttccctggggatctcaccgtcctcctggtttcccaggccttcttccctctacagactcccacgcttcccgttcagacctctctctggtgcctcagatctcttcattgaaacatctccacctggctgtcctgtgaacccctctgcctttcatgtctgagcagagcccacaagctggctttctgtccacccctgcattgtcaggggccgtttcgcctaccccaggctcaagctgggaaccsagagccattcttgactttctccttmactcactcctccccatgtcctgtggtcgctaagcctggagggctatgctctcccctcatctccctcccctgccacccacatccctctccttacctgagtcctcatcttttcctgactgtactgtgggggtagtcttgactgcctgccaggcttccagccctgccccatcctctgcaccaccacccaaggcaccttcctaaaacctccctccacagctgcctggagaaggaaatccaaaccttggcccctctcagcctgggcctgggttgcctttcagcccttctggcctgcccgtctccaggcgccgcctccagctgtgccaccccctcacctgagtatgcggcgcagcctgggtgagtcctggagggcaggacacacatctccttatcaccgtgtccttattccagggccttgcccaggacagtgcccagagcttgtcatgggggacccagaatggatcatagtacttcattaaggagcaaacaggtgaaatagttaataaagcagaatgtttagagttacttggtcactgaaatttttggagaactttctgttttttatgttgtatattgcaccaacttgttggctattgggaaattcttacgggacattcaaaggcatgaaatgctttcccttggtagttcctccagcagtgtgaccgggaggatctggtggaattggctctgcctcagctggctcaggttgtgaccgtgtatgagtttcttctgatgaaggtgagtactcttagtgtttctaaatgatagcgggatgattagaagttatttagaaataatattattatttattaattatttttcaatagcctgcatagttgttaattttatttttgagacagggtcttgctctgtcgcccagctagagtgcagtggcaccatcgtagctcactgcagcctcaaactgctggtctctagcaatccttccacctcagccttccaagtagctgggactacaggcatgcaccatcatacccggctaatttttaatttatttaaaaaaattttttttgtagagatgggatctagctttgttgcccaggctggtctcaaactcctggcctcaagtaatcctcctgcctcggcctcccaaagtgatgggattataggtgtgagctaccgtgcccagctcatagttgttttggaaagagccaggccatttggaatcgttttccttttscaggacagctgaagtgagcctgctggtcacacaccgtgcctggtgtgggggccgctgcctgggtagctgggtgtctcgggcaggtgcccgtttactcccttgacttttaacttggtacaggaggaatggaagtggcagccacaaataatggctatcctgggctctcctagaacccactcgccccagctggcctcttctgccygcggctctgctccttctgagcccactctgaggctgcagcccaggctgcctgtgccccacactccctctggagctgacagtccagccggggctcagggcctttctgccttcccttcccaccctgtccaggagctcacccatgccctacatggcccccacccagggcttgtttgtttcttggcctgctcctcccatgcccatcctggcttctctgcaccatgyggggcacacagtaggtgctcactggggactgaaggaaacgcacaccactgagggctgmtgaggggttaaggaaccgaaactttgtttagattttcttctgtattttccatatcagtgccttgagtttaaactttttttttggtctttatcttcacgaaggttgaaaaagatcatctagcaaagccttttttcccagctatatataaggaatttgaagagttgcataaaatggttaagaaaatgtgccaagattacctcagtagttctggtctgtgttcccaggagaccctggaaataaacaatgataaggtaacaatctcccatggcagaaagagttttgctcatagagttagccagaagaaagaagggccacgtgcagtggcttatgcttgtagtcccagtgctttgggagactgaggcaggtggatcacttgaggtcaggagtttgagaccagcctggccaacatgacaaaactcagtctctactaaaaatacaaaaattagctgggcgtggtggcacatgcctctaattccagttattcaggaagctgaggcacaagaatcatttgaacctaggaggcagaggttgcagtaagctgagattgcaccattgcactccagcctgggtgacagagactctgtctcaaaaaacaaaacaaaaccaaaaaaaaaaaaaactccatgtatgaaggagaatgtttttagtaatgacattttcctgttcgacctcattttagctttttcccatcaagtgaaaatttttttttctttttgtttttttgggagatggagtcttgctctgtcacccaggctagagtgcagtggtgtgatctcagctcactgtaactgccgcctcccaggttcaagcaattctcctgcctctgcctcccaagtagctgggattagaggcgcacaccaccatgcccagctgattttttgtattttagtagagacagggtttcaccgtgttgcccaggctggtctcgaactcctgagctcaggcagtctgcctgcctcagcctcccaaagtgctaggattacaggtgtgagccaccacatccggtccccagttttttttttcttaaagcaataaatgctcttccagaaaactcaaaaatgaagataagctagaagaaaatggaaaacaccataatcttcccactcactgatgatcagagttaaaacctcaggtatcattttcttctttttttttttttgttttgaaacagggtttccctctgtctcccagactggagtgcagtggcacaatcacagctcaccgcagcctcaaccttctggtcccaaacaatcctcccacataagcctcctgagtagctgggactaccgccgtgtgtcaccatgcccagctaatttttaaatttttcgtagagaaggggtctcgctgtgttgtccactctggtcttgaactccagggctcaactgatcctcccttataggcctcccaaagtgctgggattacaggcatgaaccaccatgcctagccctgttttcttccttatgtgggtttttggggatggattatataggggccattcatttttgtttgtggtggttccgacacaattctcatttcagtgtcattgttattatcaaattgcctttagctacattggattttttggggtgtttttgtttttttgagacagagtctcgctgtcagccaggcttgagtgcaatggtgccatcttggctcactgcaacctcccctcctgggttcaagcgattctcccacctcagcctcctgagtagctgggactacaggtgtgcaccaccatgcccagctaatttttgtatttttagtagagacagggtttcaccgtattggccaggctggtcttgaactcctgacctcaagtgatccgcccgcctcagccttccgaagtgctgggattacaggcataagccaccatgccctgccttattttcttaaattacatatgatgaaaatgtaaaaggtttttgctaagcctcatgtagatgccctccacagcagtcacctgtgtgttttttaaactcttgagtttagcaagtgtgggtatcatcctgctttgaggcggaactcggcacacacacactgtgcctgccctacagaatccggctttttcagcagctcagactgtgccatcgcctcttgggagcatgacagtggctccgtttgtgaggggacaccatccaggttggtccgcgcagaacccacatggcccgttttctcctttaaccttgttctgccgcccttcctgccgtgcccacccccatctcatgctctgtgrggttctctttataacatccatgtataaatgataccagctgtctcttagcactttcacatctggtgtttacgtaggcattgcatatggagtcaaatctcatcttcacaaaagcctttccaggtagctgtaacctcttgtctggataagtcagggagatggacaagggagactcaggagatggtggctcaccaagatcacccaggccatgggcagagaagctgggatccagctcaggcccccaagcccatgcctttttaccagctgggaagggagatctgggtgtgggataggcaggatcgtttttctcaagagaccagtgagaagtcagtaaaggagggatagtgggaaagaaagttactatggtatcagctaacattattaagctcgtgatagcattaaagagagtgttttaaatgttttgtaaagactgttctgggctgagcacagtggctcacgcctgtaatcccaacactttgggaggctgaggcgggtggatcacttgaggccagaagttcaagaccagcctggcaaacatggtgaaactccatctttactaaaaatacaaaaattagccaggcatggtggtgcatgcctgtaatcccagctactcaggaggctgaagcaggagaatcacttgaatctgggaagcggaggttgtggtaagccaagatcatgccactgcactccagcctgagcgacagagccagactctgtctcagaaaaaaaaaaaaaaaaaaaaaaaaaagattggtctcctcctctaaattgtgctcacatagaaccttctagtttttataatccatttttatcatcagctagtccatctaacattatattgatcttcatctttctcattgttgagatggcatctcacagtaggtgaggaactttgtagatttaattctatgaagtcgtttaattcttgcatgtgaatgtgcttctgggggtgtgtgstgtttgggtgaagtttattctcttggcccatttcttttcaggttgctgagtcattaggaatcacagaattcctacggaagaaagaaatacacccagacaaccttggacccaagcacctcagccgagacatggatggggagcagctagagggagctagcagcgagaagagggaacgtgaggtgggcatggctgaagtgggtgccaggtgactgtgcacggtgaattagcgtggtttggcttyttctgttcacaccaggaagaggaggtagcggtttgcctattccttcctattctagctgattgggtcttctcttcacaggctgcggaggagggactggcctcagtgaaaaggcccagaagagaagccctgtccaacgataccactgaatctcttgctgccaacagcagaggccgggagaagcccaggcccttgcatgctttggccgctggtgagggtaaaatgctgtttgtggggtgtatccatggcctggcagccctgctgacatgcacagatgtacccaggattgccatttttcaggttgggtgacctgtgctggatttaaggggaccctctggtttctcaagtttcattccagcctcccagtgttctgtcattccagattcattccctgcgagtcttgaggtcttcagggttttctagagtgccttgttaaaatggagagccacaggccaggtgcagtggctcacgcctataatcccagcactttgggaggccgaggtgggcggatcacctgacgtcgggaattcgagaccagcctggccaacatggcaaaaccccgtctctactaaaaatacaaaaaaaactagctgggtgtggtggcgtgtgcctgtaatcccagctacttcggaggctgaggcaggagaattgcttgaacctgggaggcaggaggttgcagtgagccgagattgcaccactgcactccagcctgggtaacagagtgagactccatctcaaaaaaaaaaggagagccaccaaatggtagtaaacaggctataccaggagggtcccaagaggttaggctgagacgggtcccaggacacatccatctatggcttggctttcatgagacttcgctgtacatgccagctgagatttaacatttgaaaacaagacaggtcctggcttttattctggctctagccagaacctatcaactargcacttaaaaaattatatatataaattttttttttgagacgggagtcgcactttgtcacccaggctggagtgcagtggcacaatctcggctcactgcaacctctgcctcctgggttcaagcaattctactgactcagcctccccagtagctgggattacaggcacccgccatcatgcccggctaatttttttttgtatttttgtagagatggggttttaccattttggtcaggctggtctgaaactcctgactgcaggtgatctgcccacctcggcctcccaaagtgctgggattacaggcatgagccactacgccagcctttttttttttttttgagatggagtcttgctctgtcacccaggctggagtgcaatggcatgatctctgctcactgcaacctctgcctcccaggctcaagcaattctcctgcctcagcctcctgagtagctgggattacaggcgcccaccaccacatctggctaatttttgtatttttagtagagatagggtttccccatgttggccaggctggtcttgaactcctgacctcaaatgatctgcccgcctcagcctcccatagtgctaggattacaggcgtgagcagccaccgtgcccagcctgatggtgattcttaattggggcatgtgttggaaccacctggggaggttattgtgaaatacaggggcctggacctctgggaattccaggtctgcaggtagggttgttgggagggtgtggatgtgagtatttggaaaggcctctttgggtgattctccagctcactctgatgaagaatcaccaatcattcattcagtattggcataaaatcactgttgctgggtgtggtggctcatgcctgtaatcccagcactttgggaggctgagtcgggtggctcacaaggtgaggagtttgagaccagcctgacctacatggtgaaaccttgtctctactaaaaatacaaaaattagctgggcatggtggcgcatgcctgtaatcccagctatcaggaggctaaggcaggagaattgcttgaacccaggaggtggaggctgcagtgagctgaaatcgtgccactgcactccagcctgggtgacagagcgagactccatctcaaaaaaaaaaaaaaaaaaaagcacactgtcgattggctcttagagcatatttttaatacaaaatctgtctttgtgaatagagaatagggacgtattttttaaaattgctaccaatcccaaggagcaaggagcatcgatgctttgacttttctgcagggcaggtgacttggcctagctggttttgggtggtgagtgcagtgagtgggccatgacacagtacacgccatgttcacctgtttcccaaaatgtttaggtttttcccctycagtaaatgtgactgtctctccccgttctgaagaaagccatacaacgacggtttctggtggcaatgggagcgtgttccaggcgggcccgcagcttcaggcactggctaacttagaagccaggagggggtctataggtgctgctctctcatccygggatgtcagtgggctgcctgtttatgctcagtcaggagagcctaggaggctgacccaggcacaggtggcagcgtttcctggagagaatgctttggaacactcttcagaccaggacacctgggacagcctgaggagcccgggtttctgcagccctttgtcatctggtggtggagcagagtccctgccgcctggggggcctggacatgcagaggcaggacacctcggcaaggtttgtgacttccacctgaaccaccagcagcccagccccaccagcgtcctgcctacagaggtggcagcccctccgcttgagaaaattttgtctgtggatagcrtggcagtggactgtgcctacaggactgtgcccaagccagggcctcagcctggcccacatggatcactattgactgaagggtgtctcagaagcctttcgggggacttgaaccggttmccctgtgggatggaggtgcactctggccagagagaactggagagcgtggttgctgtyggcgaagccatggcttttgaaatttccaatgggagccatgagttactgtctcagggacagaagcagatttttattcagacttccgatgggcttatcttgtcccctccaggtacaatagtgtctcaggaggaggacattgtcacagtgactgatgcagaggggcgtgcctgcggatgggcccgctagaaggagttcctctagaagctgtggagtcggtcgtcaccgyggagcsagagccctcacagtgaagtggagtcagatcctagattcgtctgattttatccagagaaggtctatggcaagcaatgtatatttttctaatgtsaatattgcacagatgaaccttttatttataaagaataatgtctttctgccctgctgtctacatttttctatggagcttgtcataataatagcagatattacctgatcaggaatccctgtggcgcgtctgacgctcatgagtttttcatgatggtgatgagtagcactgcactgtcacctgatgattggccctgctccgtttcccttctctcctgggagatatgctgcttttccaccagacttgctccatactagaagcttcttttgggttcaattaaaaagaaaataagctagtcattctgggcagcattttattgatagaagggggaaaaagtcatttctacttgcatgattttttaaattaaattaaattaawttaatttaattatttttgagaccaagtcttactctgtagcccaagctggagtgcagtggcgcgatcttggctcactgcaacctctgccgcctgggctcaagcgattctcgtgcctcagcctcctgagtagctgtgactacaggagcatgccaccatgcccagctaattttttttttttgtattttagtagatacggggtttcaccatgttgcccagggtggtctcaaactcttgagctcaggcaatccgcccacctcagcttcccaaagtgctgggattacagtacaggcatgagccactgcacctggccaatgatttttttttttttttttgagatggagttttggtcttgttgcccaagctggagtgcaatggctcgatcttggctcaccgcaacctccaccacagggttcaagcaattctcctgcctcagcctcccaagtagctgggattacaggcatgtgccatcacacctggatcattttgtatttttagtagagacggggtatctccatggtggtcaggctggtcttgaactcctgacctcaggtgatctacgcgcctcagcatcccaaagtgctgggattataggtgtgagccactgcactgggcctgattgtttttttttgagatggagtcttgctgtcgccaggctgaagtgcaatggtgcaatctcggctcactgcaccctccgcttcctgggttcaagtgattctcctgcctcagcctgccgagtagctgggactacaggtgtccgccaccacacccggctaatttttgtatttttagtagagatgaggtttcaccatgttggccaggatggtctcgatctcttgacctcgtgatctgcctgcctcggcctcccaaagtgctgggattacaggcgtgagccactgtgcccggccccggcctgatttttttttttagagatgagttttcactctgttgcccaggctggagtgcagtggtgcaatcatagctcattgcagcctttaactcccaggcttaagcgatcctcctgcctcggcctcctgagtagctgggactacaggcgtgcgccacggtgcctggctctcctcacattttacagatgaggaaggtgaggcataaatgatggggtgacttacttgaggtccacagcaagatgctgctcagggtagaagcccagttctttgatgtcccacttggaaagtcacttagtggcatgtcttcaatatttccgtgggctgtgttacggggaaggaagggaagggccatttgtccacatgtggaagaaagcattcaaagggagcagcaggtctctccccacgccttgcagagacggtcaggagagaccccaagcagagagcacgctgctcagggacagagctgggcttgtgaccatgtgtcgccctggcgctgtgctccttccaggtcctgccctggagggcagctgtattctcagagagccagcctttcctacagcccttttagtgaccaggggcatttcctaccctcacttgatctcaaagccacggtcggtaggaacaaaaaggtgggttttctagcaggctggaaatggccagcaggggagcaagccgcggctgcctgggagtgtygggtggtcaggtcaggctgtagatgtatcctgtagactcaaggccgcttctcaggagtccagagtcccataaaccaccatgagtgccctcctgggatcctggagatggagacaagagccctgaggatcattcataaccactgtcaggtaactgacacaacatgctgactcgagtatgaccatggtctggatgaggccctggtaaatatacatttattttctatctataggacactagtgaatatcccaacacatcttagtttcaccactgtgtatgtgctactatgaatggatggtcaatgtaactgatgtaaaaaaaacctacaacaaataaacctttgttccaccagacagaattgaagacacaggaggctctgagagcagtgtcctcatgaatcggccacgtgcctgtcgagtgctgctgtgtgccaggcacaggactgacggcagtgagggggactcatgggccctactctttgggagccctgtgccttatcctctcttccagcttggcctttgcagagttccccaatacagcatagagacagatgtatgcacagcttccacattacaacccccttctaatagacgtaacctaggaggctgaggcgggaggatcgcttgagcccaggtgttcaagaccagcctggacaactccgtgagaccccatctctactaaaaattaaaaaaaaaaaattagcccagcatggtagtgcacacctgtagagaaaaagaaagaaaaaaagacagacataaccttatttatgaaagaatgataaatggaaatttccttttctcatgaagaactttgttttgtatacatagtacttttaatttcaaatactcagattaagagcaagtgtgaagagacattagagtacagaccgggggacaaggacacccaaatgactcccaggggtggctggctggggcttcaatgaggacacgtggtttcagcatttgtcatgatccctggcacctggtccatgttcagttattattactaaaggcaaagaaagaaaattcccttgtgttccctggaaaccatgaggattcctgtggctgcaaccctggttgggtacccctggtcaggcacccacggcactgcagccctggcacctcccaaatggtcacaggagtggggagagctgaaccagcaggaaagaaaggagccagggcagagtggatctttaatgccctctgaggcactttttttttttttccacagggctttgctctgtcacccaggctgcagtgcagtggtgcagtcgtggctcactgcagcctcaatgtcccaggctcaggtgatcctacctcagcctcctgagtagttgggaccacaggcatgcaccatgacacctggttagttttttgtattttttgtagatgttgcccaggctggtctcaacctcctggtaggctcaagcaatctgcttgcctcagccaccaaagtgctggaattacaggtgtgagcccgtaatgactcatgcctagccaggtcatattattatcattattattattttttgaggtagagtctcgctgtcaccaggctgaagtgcagtggcacgatcccggctcactgcagcctctgccttccgggttcaagggattctcctgcctcaggctcctgagtagttaggattacaggcatgcagcaccatgcccggctaatttttgtatttttagtagagatggagtttcaccatgttggccaggatggtcttgaactcctgacctcaggtcatccacccaccttggcttcccaaagtgctgggattacaggcattgagctagtgcgcccagcctaatttttgtatttttagtagagatgagatttcaccatgttggccaggctggtctcaaactcctgacctcaggtgatccacccacctcagcctcccaaagtgctgggattacaggcatgagccactgcatccagccgatagtcagatcttaataaatatagcaaaggcagaggaaagagaaatcctaagaaatgttgcctttaaatgcttttggccaggcacggtggctcacacctgtaatcccagcacttggggaggccaaggcgggtgggtcacctgaggtcagtagttcaagaccagcctgaccaacatggtgaaaccccatctcactgaaaatacggtattagctgagtgtggtggcgcatgcctgtaaaaatcagccaggcatggtggcaggtgcctgtaatcccagctacttgggaggctgagcggggagaatcgcttgaacccgggaggcggaggttgtgatgagccgagattgcaccactgcactccagcctgggcaacaagagcgagactctgtctcaaaaaataaataaagttacaatagtcttaataaacttagataaatagtatttatagttaaatactaaaatgacacaattaaaaactatacttggccaggtgcagtggctcgcacctataatcccagcactttgggaagccgaggcaggaggatcacttgaggccaggagttcaaggcaagccagggcaacatagtaagacccccatctctaaaaagtaaaaataaaaaaattagccggacgtggttatgcacacctacagtcccagctactctggaggctgaggcaggaggatcacctgagcacaggagtttgaggttgagattacagtgagctacaatcatgccactgcattctagcctggacaacagagcaagaccctgtatctaaaaacaccaacaacattattgctgggctgggcagtgcatgactgtagtctctgaggagactaagtagggaggatcacttgacctcaggagtttgacactacttgggccacatggtaagagcctatctcataaaaaccaaaaaactaaaactgctgtttattaagtatcactctatacacagtcccacagaatataaacagtttgggatcagagaacttacaaaaaggcaaacgcagatgtagaaaccatgtaacaagtaatgccacaaaaaagagtttaggcttttgcaggctcggcgcggtggctcacgcctgtaatcctagcattttgggagggcgcggtgggtggatcacgaggtcaggagatggagaccatcttggccaatgtggtgaaaccccgtctctactaaaaatacaaacattagctgggtgtggcggcgcgtgcctgtagtcccaactactctggaggctgaggcatgagaatcgcctgaacccaggaggcggaggttgcagtgagcttacatcgtgccactgcacaccagcctggtgacagagcgagactccattaaaaaaaaaaaaaaaagtaggcttttgcataccttcacattctccccatgccctagcttttggccagtctcttcggtctgtttcaaaactgtcacctttccctcattctaacctagtatgttaactctggaaatggctgcaaacattgtgaaactcgaggatttgtgtcagaagaatgccagggaaggcagtttacatcgcttgccatgtccccagtatgcaaacagcggcaatttttttgtaggttattttcattttcatgatgtcaaacttcattttaactccatgggatcttattatttaagacgaagtctcactctgtcgcccaggctggagtgcaatggctcacagcagcctctgcctcccggttcaagccattctcctgcctcagcctctcaagtagctgagattgcaggcacgcgccaccacgccagctgatttttgtatttttagtagagacagggtttcatcatgttggtcaggctggacttgaattccgaacctaaagtgatccgcccacctcggcctcccaaagtgctgggattacaggcatgagccaccgcacctggcccaaaaactaatatagtctcataaaaacttcaacaatcagataggcataaagtaaaaatattaaaccagggattttctacacaaacataatgtataaagcatgcctaatttatagaaactagatcactcactcattctgctcagaaactcattgattttactctgaagcacccacgaatgacagattcccaggaggggcagagaaggctgagcrgcaccacgtggggctggccgcgggttgtgggcatgagcacgcctggagaggccatggggctggtgacaagctctggccagaagaccccaaggtctgatcctggggtctgatccaggcctgcggcactgggtcctaggcagactgtctgcctggtgagacgtggaaggagccagtgtccgcagccgtctcaggacgtcagagagctcggtggcctgtctccagcagcatgctctccagatgcagcctrctgtcgctctccacatagggctggtgcagccacatggacaggtagctcagggtgaggtcgggatccccggtgtgggcaagctccttggccaccgtgcgct

SEQ ID NO: 8769 - DNA, 148935 bp, Homo sapiens
caagtgaaaggaagagttgcatatctctcattttaaatcaaaagctatactttggccaatttaagaaacaaaaaaattaaaagctagaaatgattaagcttagtgaggaaggcatgtcaaaagctcagataaggggccaggtgcggtggctcacgcctgtaatcctagcactttgggaggccaaggcgggcagattgcctgagctcaggaattcaagaccagcctgggcaacatgtgaaactccgtctctactaaaatacaaaagaaattagctgggcgtggcggtgtgcacctgtagtcccagctacttgggaggcaaaggcaggagaattgcttgaacccgggaggcagaggttgcagtgagccaagattgcaccattgcactccagcctgagcgacagagcgagactccatctctacaaaaaaaaaaaaaaaaaaagctaagataagctgaaaaccaggcctcttgtgccaaacagttggccaagttgtgaaggcaaaggaaaagttactgaagaaaattaaaggtgctactccagtgaacatgtgaatgatgagtgaaacagccttagtgtggatatggagaaagtttgagtggtctggatagaagatcaaaccagacacagcattcccttaagtcaaagcctaatccacagcaggaccctaactctcttcaattctgtgaaggctgagagatatgaggaagttacagaagaaaagtttgagatagcaggatttggttcatgaggtttaaggacaaaagccatctccataacataaaagtgcaaggtgaagctgcaagcgctaatgtagaagctggagcaagttatccagaagatctacttaagatcagtgatgaaggtggctacatgatacaacagattttcagtgtagatgaaacagccttctattagaagaacatgccatccaagacattcacaactacagagaagtcaatgacaggcttcaaagcttcaagagacaggctcaccctcttattaggggatattgcagttagtgactttaagttgaatccaatgctcatttaccattctcaaattcctagggcccttaagaatgatgttaaatctactctgccagtggaaaaagcaagagaaccagaactggaagtggggtctgaagatggaactgaattgctgcaatctcatgagaaaacttgaacagataaggaattgtttcttatggatgagcaaagaaggtggtttcttgagatggaatctattcctgggaaagacactgtgcacactgttgaaatgacaacaaaagattgagaatattatataacttagttgataaaccagtgtgagaggtctaatgtgggtaaacactattaaacagcaatgagaaagaacagaaccagaatagtggctctacattacacgcatggcttccatgttgaaagacagtgagacatggctgggcgcagtggctcatgcctgtaataccggcatttagggaggccaaggtgggcagatcacttgaggtcaggagtttgagactagcctggccaacatggtgaaactctgtctctactaaacatacaaaaattagccgggcatggtggcaggtatctgtaattctagctactcaggaggctgagacaggagaaccacttgaacctgacaggcagaagttagagtgagccaagatcacgccattgcactccagcctgggggatagagtgagactcgtctccaaaaataaaaaataaaaaatagaaaaagaaagtgagatataaaggaaacaataacatatgttttttgtttacgtaaaatccaaaaatggatgaaaagaattcatggtagttttttccatatcagctaggtaatgtgccaacatcatagcaaagtttgaggaaggcacaggtcatacatgagcatgaaaacccaatcattatgcctatgaactacaaaagaatcaaagaatctgtggttttaaaaatcagaatagccaggcacggtggctcacacagcactttgggaggctgaggcaggtggatcacgtaaggtcaggagttcgagaccagcctaacatggtgaaagcccgtctctactaaaaatacaaaaattatctgggtgtggtgacgggcgcctgtaatcccagctactccggaggctgaggtaggagaattgcttgaacccaggcggtagaggttgcagtgagctgagatcgcgccatcacactccagcctaggcaacagagtgagacttcatctccaaaaaaataaataaataaataactaaatatatatatatatatatatatatatggaatataattttgtatttaaaatgtacaatacaatttatacttacacgtatcatcttaccacttgctttttttgcttaatattttattttaaaatttattcacattatttccccagttattaagggtgaaaaacttagagcatgaaaaaccaatatgtacttacaataaactgattttcaagttggcaatattatttgcagtggtaaaacctgcatcattgagggtttcccacttcaggattaaattgtgccaatcagccgcattgtccttaatttttcttgcactgacagataagacaggttttctgggcgttacagttccaagagtctttgctgatagggtataaaagaaacaaaattattatcatggaatatacaatcatagttggagggcaaatgtccttataattttcaacagtaaaactatctgaaatgctgtatcaactggacaaataaatgtggaaactacaaagtctgaatgaatgtgaaagttcctggaagaagacaatatagaatatttttaacattttaaaattcaccagatagagctgaatcctcttccagcttaatggctccacaaagtttttaccttaagccctttgttttccaaagattggaaataaggtaaagttgtgactgtctgctaaaactcttcaatggctcacgttcccttccctacaggataatctagccctgactcccgagtacttccactatctagtctcaggcactctgatactttaaatttgctcagagtagcgtggcccatgagtgctaatcatttcaagacactgagacaacagagatgcagagttgatcacgatgctgccactgcccttcttggtaatcaggaggaagtccaaaatccttccagacctagctacccctccacatcatcacgtacatcaacccacaccttggccccccgtcaatatccagcgaaaatgaactactggcagctcttgaaaagctgaggtgcctgcaggcctttacacgtgttctctctgcaggaaagctccttccttcctcaggctcacgatgcccatcctccaagatgcacccggatcccactgcctgtaggaagcaacccccagaccaccaagagccaactcaggttgtttgttctccccgaaccctcctgtgccctcttgccttctctactttgaaccccacaaaggcttctcactgcccacaggataaagtcctcttgaggaatccaggacacacaacagctggatggtttgatgcctcaagtcagaagaccacactgcctgcgtctgaaccccagctcgccagctgtgagatcttgggcaacttaatgtacctttcagagcctcaacattttcatctgtaaaatgggaataaaaatagtatctatttcataggattgctgagattagataatatatgtgaagctgtgaggcctcgcacaaggcaaaaacccagtatctcacctgttagctcaagggcctctactatccaagctctgcccaccacttcagcttctaccctttcccacttgccctctgtgcatcagagctggctctgtacaagttctgactttgacctggaatatttttcctatctgtgtgtgtccccactcccctgcctcatacttagtatcctcactttaaaatatcatcttgatttatcattcattctttacttaaacaacaaatatttgcttactgcctacaatacgccaggcatgggggaatgaagtgattgaatgagacggaccaggaccgttttcatggaacttactttccaaaggggaggcagataataaacaaatgaccacgatcagttcagatcatgattaagtgtgtgtggaaaataaaacagggtcttgtgttagtgtgatcccctgagaaggtgtcgtttaggctgagatttgaatgatgaaaagccagaaatagggtaggtcagtagtatgtgccctaattatgataatgaggttggtgagttcaaaaaacagaaaacaaaacaaaacaaacaagcaaacaaaaaaaccagtgtgctggaatgaaatagacagaaaaggactagtgygtgagtaggtgatcagacaactagaacctaataggccaagataagaagttggaccgagggcagtggctcacgcctgtaatcccagcacttcaggaggccaaggcgggcggatcacgaggtcaggagatcgagaccatcctggctaacacagtgaaacctcatctctactaaaaaaatacaaaaaatcagccgggcgtggtggcgggcgcctgtagtcccagctactcaggaggctgaggcaggagaatggcgtgaacccgggaggcggaacttgcagtgagcccagatcgcgccactgcactccagcctgggtgacagagcgagactccgtctcaaaaacaaaacaaaacaaaacaaaacaaaacaaaataaaaaaatgaagtttggacttctaagtattagcttggtgcaaaagtaacagattttgccattacttttaacagccaaaattgccattacttttgcaccaacctaatacaatggggagtgagcaatgagctctggatagggcagtgaaattatctgatttaggtttttagaaagtcatttccacagagaagtattcctggatcccccaggttgggttacgactcaccactagatatgtggtacaccctataattctgctatcatgatattcaccagtggagtgtatttgcttgtttaatgtctatattccctgctaaactggaaattcgactagggtaggaactatgtctcgttctctttcaaaccttccacacataggaggctttgcataaaatgaggtaaatggaggaatagctcttaccacctgttctataattgtctaagggttttccccccaacaggagattctgagggcaggatcacatctgattcatggtcagcctgactcatacggggcacatatttaggaaccaaaaacataactgacttcaagaaactcaagggctggtaaagacagaccagtcatcagcgtcacaggacagggtagggtgagggcacagtggctaagttacttatcccctctgagcctcgattccccatctgcaaaatggggttgacattacttcatgggaccactgtgaggttcaaatgagatgatccacttaaagtgcttggagcagtactcagcaaactgagcactaggcgaaagccagctttcattacaagcagaatgttctgactgagggcagttcagagaggagtttctggacgagatgagcatgcaaggcttggtacccagtgaactctgttagtactaatttatagtgacaataattacaatttggatgtcggatctgctgacactcatttgcgtatatcgtcccgttcatctgtcactgcacatgtgaaaaaacggaggctcggcaaaactgtctcccgagcagctcgcagaggctgcgaggggcctgcgggctaggctggggtaagacagaggacctccatttaacctcatgtaatccggggagctcctgagcttctggtccaacctgcggcctaagcagtaacattcacagccaccccaccccgggaaaggaaccgatctcacgcaccttccataaggtccacagatatccgtagaaggagacgcgaagccccgcccaccccaccggaaacgcatttgcgtcacgtccgccccgcccgctgccacttgtggctctgccgctctagcccccggcggagccagctgctgctcttcggtgctggccccggtgccggccccgttgcccagggaacaggctcccggcagcccccgcggcccggagtccatcccgcctcctccggcccggcggggccgacgagtccggaggggctgccgcgggaggtgagtccggcgacgccgcaagcggccccgacgcccccgacgcccccgacgcctggccccgagcccctcctcggcctcccccgggccactcttcccttgcctcagccccgcagggtctccatgcccgtccgccccgtctccctcgcccgcggtctcgcccgcgcggagtggcggacactaaatgccacaacacacggagcgcctggctcgccgcccgcagaatccggcggtccgcagcggggaacaggggccgcccgcccctcctcaggcctccgctgcgcgtcccgcgccctcggcccccggccccaccctgcatcccggctgccggtctggccgcgggctctgctccttcgccttaagattgacgtcgtgttctgtcccccactcgcagcccgcgtcccttacatccgcccaccggcgcctggccccaggccttgacactcatccagttggtgttcagtgttcgatgagtggataagtgaatgactcctttcccaatcctatttgaaggcatgggaggcagaataggtagtaagtgttaaaggatggggtgtcctggagtcagagccgggcaggtcccagcggccccttcctagctctgtgctggggcaagtgccctayctcactccgctccagtttcatcaccagtggaatggagatgagaatagtttctacctctggcttggtaagaggattaaatgggtcagtgcatgtaaagttargcacggtgcctgccgctgtacatttcagtaaaggggagcccctgctgtcatctgtgctagcctgcgttctcgccctctagtyccttctgatatgtctctgacttctcatgactttagtttctccttctctacctccatttctcttccctgcacttttttcttcctctcttattgggattcaggaattttattctgttctgtgacttatgttccatgtgttggcagaatgtgggataccagcctgggtgcatccttttctcatctattggagtgaccagttgcacttgtggactgcctccttgcagccaaggtcttgtagacagagttctgggaaatctcaaaacgcaaatcccaggcataggtagaatctgggaatgaagccactgtagctccttgtgatcaccagcgattcctggtcttttaggctgcaggactttgtgttttctcacacccagctataatgtaccttgataaacctctgaccttatttttgttgttgttgttgttaacctgacttacgtcccatattggtggttatttggccatcgtgtgccagcactgtgccaggctggctctagggatgctgtggtgaaccagacagacccttcctgaggtcactgcctcagaaagatcatggtctggcccatgaactttaaaagggagaactaagtgcaggtgtaggggacacacaaattgaattttcaggactgccttggaaaaccagtggtggggaagatggaatgaggataaccctcttctgaaggagtgactaggaagtagcttttgttaggcatcagctatattatacccacgtgtctttttcaatagaagactggcatctactggatttttttttccaattttttcttaaagaagttacacttaagtttggggagaatttcatttcatattagccgctgtaggagttgaaaaaaatggctactggaacttagtgggaagaaaaggaaggaaacaggcatcaggcagaggcagttgattgaacttgggaagatgaggaatagatcaggaaagggttataatgaaaagctttggtgtcaagcacgaagagatttctagattcagtaatgcacagagagatcagtaaaattagaagggagtagttgatggctttgcgaattgctaaggtagaagggagctgttactcaagatgcrtgttcaatttaaaatgaatgtattctttggacctggacataagagttctattgactttttgccactattttatatttagggctgtcatacttgggtgaatctagcacagtgctttgagagagagattcattcaacaaacgtgtattgagcattgattgtaccatactctttattggtcttttaaagcaccacaaagtatacagactagaagaacataggtgaagatgagaaagagtccattgaaggggagagaaaacagataatgatggtgctgtgcgataactgccatcatggagttctgtgaaagcagagaaagaccaaccaagtatctgagggaatttatgaaggcttcctggtggcggaggactagttcttacagggcacatgtgggggaatagggaagagtggaaagggactttgttctgcagagacatacaggttatggtgtgtgcagggactgtgatggaargctgatggatgcacaaacaaaacgtgrcctgtctacacaatggaaggctgttcagcaataaaaaggaacraagtactgatttgtgctacaacatggaggaaccttgagaacattaggctargtgaaagcaaccagacacaaaataccacatattatatgattcaattttratgaaatctccagaataggcgaactgtagacagagaggagatcagtggttgcccagggctgagagaagaagcgtgtagaggggtgattgctaaagggtagggagtgcacagtgtgtggatggaagagtggcctgagatgaagttagatatagactgttttgtcatagtgtctaatttccatgcttgtgttaggctttagcttgtgaccattgggtagccaatggggatgggagcaaggaagtgacaaaattttgtctggaagataaatgactgcctcagtctcattacgttcctccttaataatttaatactcaaataattaatagatgtcgtagccagatttcaaacatagattctacaatagggatacaaattgttgcttcctagggattttggagagaatcctgaaaccattagtgtacccagagcactctgataacatggttattgtacagcgaagtggatgacttagactctatattagtcctagctccagtttgagaaatcatccatctgggtggcagttgggtgttagtagtcagcagtgaaggctagctgccaccttccagggttatgagattgacagggctagtggggaaaggaagcatcgtaacttgaaggatgccatagggtggtgttttgtatttttttaactgaaatagtcatgactaaggaagcattattcattatatttttatttatttatttatttttgagatgaaatatcactctgtcacccaggctggagtgcagtggcacgatcttggttcactgcagcctccacctcccaggttcaagtgattctcctgcctcagcctcccaagtagctgggattacaggtgtgcgccaccacacctggctaatttttgtattttttagtagagatgggtttcgccatgttggccagactggtctcgaactcctggcctcaagcaatcctcccacctcggcctcccaaagtgctgggattacaggcgtgagccatcatgcccagcccaattttaaaaattggattgagactattgttttgcagtaagacctgaagttaacaaatctttactgagcatctactctgtgccaaagctattattagatactaggatttaccttggtaagcaagagagaattcatgttgcttacattcttgtaggagagatgatttttaaatggtttagcaaataaagcaattagaggttgtaatgaggattatgaagcacatatgatagaggaaagaagggacagttgggtactcttgagtgatctggtcagagaaggcctttctgtggtggtgatatttaagctgagaccccacagttgagaagaagccagataaatggagtgagatcatttattctgcatagaggaaataattatgacacctgagtgggacagagtgggtcagtggagctagaacttggaggacaagtggagacgggtagagaggtgacaggggagctgcaaagggcttagaccacacggggcatttggtttttattcttagagcactgggcaaccagtgaggagttttgagtagaatgggtagtatggtctgatttctctttgaaggagctgatattttcctttgttttttggggggtaacagctttattgagatataatttacatgccacacagttcacccatttatatacaattcaatggtttttactgtattcacagctatgcaaccgtcactacgtcaattttagaactttctcatcaccctaaaaggaaactccgtacccttcagcaatacaccctaaccccttcttctcccagccctgggcaaccactgacctactctgcctacagcttgcctattctagacattttgtatacatggaatcatataatatatggtgttttgtgcctggttgctttcacttagcataatattctcaggattcctccgtgttgtagcatgaatcagtacttcattcctttttattgctgaacaggcttccattgtgtggatagatcacattttgtttgtccattcatcagttgatggacagttaggttgttttgacattttggctattatgagtggtgatattatgaacatttatctacaaattctttgtagatatgttatcatttctattgggcataaacctaggaatagaacttctgggtcacatggtaactctgtaaccttttgaagaactgcccactggtggctgcaccattttatttttcaccagcaatgtatacagttttttccacatccttgctaacacttgttcataccctagtgggtatgaagtggtatctccttgtggtttcgatttgcatttccctgatgagtaatggtgctgaacatctttttatgtgcttattggccttttttttttttttttttttttttttttttggaaataaagtctcgctctgttgcccaggctggagtgcagtggtgcgatcttggctcactacaacctccacctctcgggttcaggtgattcttgttccttcggcctcctgagtagctgggattacagatgtgcgccactatgcccacctaatttttgtgtttttggtagagacagggtttcaccatgttggccaggctggtcttgaactcccaacctcaggtgagccacctgcgttggcctcccaaagtgctgggattacagatgtgagccaccgtgcctggccttactgggcatttgtgtgtcttctttggagaaatgtttcttagactttgcccattgtaaaattgtcttttgttgttgttttgagatgaagtcttgctgtgttgatcaggctggtctcaaattcctgggttcaakcgatcttcccaccccagcctcccaagtagctgagactatagccacgtgccactgcacccagcttttaaaattgtctttttattattgagttataagagctctttatatattctgggtaaaatctctttatcagatatataaccaggagatattttcttccattttgtgggttttttttttttatttttgtcggtggtgtggattagatgtatttttactttcttgatggtgccctttggagcacaagcgtttttcatttcagtgaagtcaaagagctaattttgatggctgaatgagcctggcttctgggggcaggtgtggaagaccatggcagcagtgtaggcgagggatatgatagcttgtactgtggcatggccacagagttggtgaggaggcgccaggcttgagggaggcttggagatagggctgatggactgagttgagagattgttgtacgggtgagggaaacagaggaattgagggtgaatactaggatttcagcttgaacaacacttttgattcaaaatgtgattatgctgttacctgccggacaattgtgacagtttctaatacctgctggagcctagcaagggcagccctgcgctccctccctgggttctgaagttgcttttggtaggattatcactgagtgtgccaaggagatggtcagggattctgaccttttgtaatacccactaagacctcctaagccaccacaaataaacatattatctgagtagaatagtgcacttgctctgcaaatgcacttttgaggcaaatctcttgactcccttctagctagactgcagtctcaaagcccttcttgtgtagagcytgcgagctgtcagtggatagcatcaaatcaagcggatggattcttgaaagctaaatgtcatcatttgacagagctactatgaggaaaaatatttttatttttaaaaaagttttattgatcgattgatttgagatggggtcttgctctgtcacytaggctggagtgcagtggcttgatcatggctcactgcagcctcgaactcccgggctcaatggatcctccaggttcagtcgatcctccgggctcaattgattcttgtgcctcagcctcctgagtagatggtactacaggcacgcaccaccacacctggctacttttttgtattttttgtagagacagagttttgtcatgttgcccaggctgatgtcaaacccctgggctcggccaagtgcagtggctcacgcctgtaatcccagcactttgggaggccgaggcgggtggatcacaagatcaggagattgagaccatcctggctaacacggtgaaaccccgtctctactaaaaaaaacaaaaaaacaaaaaaacaaaaaattagccaggcgtggtggcaggtgcctgtagtcccagctactcaggaggctgaggcagaatggcatgaacccgggaggcggagcttgcagtgagccgagatcgcatcactgtactccagcctgggcgacagagtgagactctgtctcaaaaaaataaataaacaaacaagcaaacaaacaaacccttgggctcaagtgatctgcccacctcaacctcccaaagtactgggattacagatgtgagccactgtgcctggctgaggaataacttttttttttttgagacagagtttcgctcttgttgcccaggctggagtgcaatggcacaatcttggttcactggaacctctgcctcctgggttcaagcgattctcctgcctcagcctcctgagtagctgagattacgggcacctcccaccatgcccagctaatttttgtgttttaatagagatgaggtttcaccaagttggtcatgctggtctcaaactcctgacctcaggtgatccacccacctcaggctcccaaagtgctgggattacacgcgtgaaccaccacacccggccggtaataagatttttaaaggaggaaataacattaggcaatacttactggtgaagagctcagtacttccgcttgcttgctaggagatctcatgagctaaagcagatacgaaagtgcctgccagagatagggagtagaaggtgtgaaggccaggacgtgagaggccaggcctgttgtaattagaagcaattcagtgtggctggaggacaagtgagagatcctcgggtggcagaggccagatcaccaaggttcttgtaagccagcaacacttgggctttagcaggaggaagatggggaccactgcagagtgttaagcaagggagtgatgacatcagctttgcacatcaggaaaatccctctgtttgccacgtggatgacggggagggagaggcgggcagatgagctgggcaccagagagagctgcaggtgagaggtaatggtggcccgagctaggggtgacacactgaggtgtgtgggagatgtactgaatggagaatcggggacatggagaggagaggaggagggatcagggatgatgctccttttctggcttggtcagcatggcccaggcaactggtagaagatacaagataggtaagtgtctttgacattgttcatttactctgtgtttatagctaggatgtaagttttactaatcccatttcagatggtaattggagatctagagaggttgagcagttattccagggtgcctcaggtagttttaggagcattgggatttgaacttgggtctttttcacttcagtatcattagccactcattgtgcagttcttcctcggtggaaagagggtcagttctgtggctgtgggtctgagacctgggggttgggtgaggtggaacatggagttgggtgaacattgggtaaggaggaggagcagaaagtcttagcagaaatgtttgytgtgtctgcattgtttttcccaaacctagcgcaggacagtgagacagcggctctatgccttttcctcagcccgtcctagacactgtttctgccaggaggacagttttgctgggagttggcctcaacctgctcctcctatctgaatggtgggtgaaggacagacaagcctggtgctaagctcatccagaggcccccagatagggaaatagcatggattctcttctgcccgctggggacttcttgggcacctggcccccaggcatggctgtcctgactcatctgggtgctatggcttacgggcctctagatatcctttggaaaaacgtgtgaggcataaattgatatgaacattcttcaaggcagtttggcaatacatttttttttaattcaacatttccacctcttgcagtgtactccaagaatatacttggatatatttctgttgtttttgatggcaaaattaaaatcttttggttgagaaaattttggtttatccatacagtgtgttctctgcagtttttctgtatagtcactaaaaatcacattctaggggaatatttaatgacatggaaaatactcatgatttattaagtgaaaaagtctgtgtgtgtgcatatatgtttatatacatatatctgtagctatctgtgtacatggcatatctcagtatgatgagattgtgacttttctttacttctttgtccttttattttgagatagggtctcactctgtcacccaggctggagtacagtggtataatcagctcactgcagccttgatctcctgggctcaagcgattctctgtgtaccaccacacctggctaatttttgtattttttgcagagtcaggatcttgccatgtttcccaggctggtctcaaatttctggcctcaagtgatctacccaccttggcctcccaaagtgctaggattacaggtgtgacctactgcacccagctgcctttgtacttttcttttcttttttttttttgagattgagtttcactcttgttgcccaggctggagtgcaatggcacaatcttggctcaccacaacctctgccttctgggttcaagcgattctcctgcctcagcctcccaagtggctgggattacaggcatgcgccaccacgcccaggtaattttgtatttttagtagagatggggtttttccatgttggtcaggctggttttgaactcccaacctcaggtgatccgccctgactcagtctcctgaagtgctggggtttacaggtgtgagacaccgcgcccagccttctttgtgcttttctatattaacaaatttttgaggccgggcatggtggttcacacctgtaatcccagcaagtctgggcgtggtagctcaagcctgtaatcctagcactttgggaggccaaggtgggtggatcacctgagatcaggagttcaagaccagcatgatcaacatggtgaaaccccatctctattaaaaatacaaaaattagccaggcctggtggcaggcacctgtaatcccagctactcgggaggctgaggcacaagaatcacttgaacccaggaggcggaggttgcagtgagccaagatcatgccactgcactccagcatgggcgacggagcaagtctcaaaaaaaaaagcaactttttgatagtgagcatttataactgttataaaaagaaacctttatttttaaaaagttaaataaattatggcacatcaatgtgtgtatgagtatgtatgtatgcactctttaaggaaacaaagccttttactatttctgtgccttggaaagaagaataagaagtttctgcatccatgaagtggaggtaacattcatgtctaatgtttggggattgcaggaaaaaaaaatggaagtaactatgatgcctacttcatgtttgttttttttttctytctttttggtgaggatttaatgggtttgtgtgctaagaacagtttgtattaagtacagacggttttcaacttacagagtttcaacttactattttttgactttaagattgagygaaaacgataccattcagtagaaactgtatttccagtaaccatacaaccattctgtttttcactttcaatatggtattaaataaattacatgagatatgcaacactttgtgataaaataggctttgattagatgattttgcccagctgtaggctaacataagtattctaagcacatttaagttaggctaggctaagctaagatgttcggcaggttaggtgtattaaatgtattgtgacttatcttttcagcttatgacggttttattgggacataaccccattgtaagttgaggagcatctgtaaaaacattagctattcccattattattactgcaaaagagggtggattgggttcttaagtatcacagaggaatgcaattattattattattgttatttacttacctttaagaaagttctcatacgtggatatgttctgcctgtattggctattgtgactgtcagatgaaatgggaatctaaggctgggcgcgatggctcacacctgtaatcccagcactttgggagactcagatgggcagatcatgaggtcaggagttcgagaccagcctggccaatatggggaaacccccatctctactaaaaaatataaaaattatccgggcttggtggcacacgcctgtagtcccacctactcgggaggctgaggcagaagaacccaggaggcgagtgttgcagtgagccgagatcgcaccaccgcactccagcttgggggacagagcgagattctgtctcaaaaaaaaaaaaaaaaaagaaaagaaatagaatctaaaaatgcttggaaaactggatatgctatacagatttagggaattattattccagcattgaattggggtcatattgaagaaaaaatgatactttgctgctcttccattccattttttagaattttatatttaatattttttcttttgctctacacattcagagaaacttctctagtaatgaactatagaaatgatcccagaaagcacagcctttgttcttctgttcttgtcactcattccttccttgcatattttccttttatttatttattcatttaagagacagtgtctcactctgtcactcgggctagagtgcagtgacacagtcatagctcactgcagcctcaaattcctaggctcaagtgatcttcctggctgagtgcagtggctcatacctgtaatcccagcacttggggaagctgaggaggaaggatcacttgagcccaggagttggagaccagcctaggcaacatagtgaaaccctctctattttttaaaatgaaatatttgttttaaaagcgtgatcttcccacctcagcctcatgagtagctaggactacaggcatgtagcaccatgcctgactaatttttaaaaatattttttgttgaggcgggagtcttgctatgttgcccaggctggttgtgaactcctggtctcaagcagttctcccaccttggcctcccaaagcactaggattacaggcataagccactgttcctgggccaaattttctgtttcatcattcattcatttatgcaacaaatacttgctgaatgcctctgatgtgcctagcccttttctccctgcggggggaagaggggtgagtgaggcagatatgggctctgctgttatgggccttacagactagtgtgtgtgtcagagtggcaggcaggcagataaccagtcagagaaaagaaaggagatgtgtggataggccggacacggtggctcacacctgtaatccaagcactttgggaggctgagatgggaggatctcttgagcccaggagcttgaggctgtagtaagccatgattgagaccagcctgggcaacacagcgagacctcatctctacaaaataatttaaaaattagccaggcatggtggcatattcctgtagtcccagctacgtgggaggtggaggcaggaggttcacttgagcccaggagtttgaggcgtcagtgagtcatgatcttgctactgctttccagcctgggtcacagagtgagactgtgtctcaaaaaaaaagaagaaaggggctgtgtagagaaagtaaaactgggagaggtgacagagagagaactcagtagggggaggagaaatcaagtacggcctcatgaaagagggcacaattgagaaggaggaagagctcagtagagaaagaacattccaagtggacggaacagccaatgcaagggccctggggtgagaacgagctggattaatttgatcagaagagggactggaagttggtcagtccactatgtagaaatasaaaacctacagttcaaagagaccataaatccatgatgcaagaagkttctgtgagaggagcttggaagtctccatagaacctgtagagctaaaatatccctccaggtgtaatcaggtacagagcatctacctggactgttacagcctgcctgtcagagctgtgactgtgctgttgtcaagagcctaggacttggagggaaaagacctagagtcaagtctcggctgtttgatcttgagtgagtctcatgaccctctggcccccagtcccttctaaaagttagggatgatgctacctgccttataaggtagggtcaggattaaatcagtgagtgagcactttgtgaaagatggcgtgcatggaagggttgcatatctttagtaagggaagctttgaagccaaagtgcaagtgggtgggtctccatgtggaacagagtaaggtgctgtgtggctggactcttgagcgctgaggaggctgtgggcatccaaccaggccagggcacctgttcttcaccatctcattaacacagccagcatatctgcatctgagattggcccactattctcctaatagagtgtctttcctgtttctcttttccatatcctgtccaacctggtgggcttcatagttcaggatgtgttcagtgaagccatgtctacactcactctaatccccactgatctctctctcctcatgaaaacccacaaattatcacctcattacttgtggatttgtgtcttttcactatttcatctgcctccctgtctagatcataagctacttgggagtaagaactgttttgttttttgtattctttccactcctccatggcattcactrcaacataaatcatagaggtcagaacatactgaagtgcattttgagttaaaatgctcaaaagtgatcttagtgacacgtgtttactttccctgtttatttaagctccagctataatgtttacctgcctaaaagttccatgttgccagtattaaacatacttctttttgccatgactaggcattgaaaggattgtaatgctttgttctrtagcccccaggtttccctagatgacaaataaacattccttttcctgcgtgaagatmgtctgtggaaaccttggycatggcatcgatatcagagcctgttacattcagagagttctgcccgttgtactatctcctcaatgccattccgacaaagatccagaagggtttccgctctatcgtggtctatctcacggccctcgacaccaacggggactacatcgcggtgggcagcagcatcggcatgctctatctgtactgccggcacctcaaccagatgaggaagtacaactttgaggtgagccttgctttgcttttcacctgagggggcacgagccatagctgacgcttaacatgcttgtgttctaggatgagataatttacttctgatttgccagaatatggccttaatacctcacccaaacaatactttaaaaccatctttagctgaagtggaatataactaaaaacattggtgtttttaactttttcctgcctccaaaaatctaacatcactttatttatttatttgagacagcgtctcgctctgttgtccagcctagagtgcagtgggacaatcatagctcattgtagcctcaaactcctggggtcaagtgatccttttgcttcaacttcctgagtagctaggaccacagggatgactgccacacccagctagtttttgttttgttttgtctgtagagacatggtttcactatgttgcccaggctggtcttgaactcctcggctcaagcagtcctcctgccttggcctcctaaagtactcggattacaggcatgagccaccacacctggcctaacatcactttaaaagagaatatcacctgaggtcaggagttcgagaccagccttgaccaatatggtgaaaccctgtctctactaaaaatacaaaaattagctgggcgtggtggcatgcacctgtactcccagctactcaggaggctgagacaggagaattgcttgaacctgggagatggaggttgcagtgagccaagatcacaccactgcactccagcctgggtgacagagtgagactccatcttaaaaraaagaaagaaagaaaaraagagaacattttagtatttaaaacttactacaacactttgaaagcagatatttttttcctaagtgtttacaggagcaggcacatgcctgtttttcaaagttttgaataatctctagttcttctcttgaaattatgatgaaaaaaggatgtatatgaatattggctcattgccagaatatgcacctcttagctgagctgaggtctcttctatagcattgggatcctgaccaatctgtttctgcagtgctgtggactcaggcatttctgtgtattgtagatattggtggagatgttatttgactgtgttgtggctggcaccaactattggtgaactgtaatgtaattcacccacttagtcaatatctgtagtttattgagtacgtcacttttgtgagagactcaaagttgactgagttgtggcttccaccacatgggactctattctgtctgtggttagggggcttttatggaccaagatacagcttttgtatctaagagaaatgtttacaaatacttgtgttttaatcartattcaatatattaaagttttcatttaaaacgtaactaatttaagcctctgtgctcattttaaaataatcaaaatggttcatacacatacagccctttctatgtgtcagacattattctttaaaaatatattttttaaattttttaaaacattattttttccttctcactatgcttcttggacagacatatattaactcattttatcctcacaaaaactctctgaggcagatgttattatgatcttcctcatttactaaggagacagctggtgaagagagggtaggtgacttgcctgaggttggctggtagtaaatggcagcaccatcatgtgaacttgggcagactgtctctagggtctgtattaatatatatatatatttttgagacggagtttcactcttgtcgcccaggctggagtgcaatgacatgatctcggctcactgcaacctccacctcccaggttcaagcaattttcctgcctcagcctccagagcagctaggattacaggcacccgctatcacacccagctaatttttgtatttttagtagagacggtatttcaccatgttggccaggctggtcttgaactcctgacgtcaggtgatccatctgcctcagcctcccaaagtactgtgattacaggcgtgagccaccacacctgcccgtgtattaatattttttgtataaaaattagaactactgctatttcttctctttgagtaatagctcatggattcgactgatcaaattccccaaacatttaaaaccattacgtaatctttcaaactgtagttaggagtttaatagtctgaaatctctcaaatgcttcagacactttataaggaagactcgtgaatccaacgatgaaccccaacaagatctatcaaagaaatccatgcacagaggcaccctagtcacactgctaaagatcacaatcttaaaatccgtgcacagaggcgtcctagtcacactgctaaacatcacaatcttaaaatccatgcacagaggcgtcctagtcacactgctgaacatcacaatcttaaaatccatgcacagaggcgtcctagtcacactgctaaagatcgctgtcttaaaatccatgcacagaggcgtcctagtcacactgctaaagatcacagtcttaaaatccatgcacagaggcatcctagtcacactgctgaagatcaccatcttaaaatccatgcacagaggcgtcctggtcacactgctaaagatcaccatcttaaaatccatgcacagaggcgtcctagtcacactgctgaagatcacagtcttaaaatccatgcacagaggcgtcctagtcacactgctgaagatcaccatcttaaaatccatgcacagaggcaccctagtcacactgctgaagatcaccatcttaaaatccatgcacagaggcgtcctagtcacactgctgaagatcaccatcttaaaatccgtgcacagaggcgtcctagtcacactgctgaagatcacagtcttaaaatccatgcacagaggcaccctagtcacactgctgaagatcaccatcttaaaatccatgcacagaggcgtcctggtcacactgctgaagatcacagtcttaaaatccatgcacagaggcaccctagtcacactgctgaagatcaccatcttaaaatccatgcacagaggcgtcctagtcacactgctaaagatcacaatcttaaaaatagccagagaacaatgacgtattacctgtagaggaacaatgatttaaatgactgtggatttctcatcagaaactgtattagcccgttctcatgctgctatgaagaaatacccaagcctgtataatttataaaggaaagaggttttattgactcacagttacgcatggctgcggaggcctcaggaaacttacagtcatggtggaaggcacctcttcacagggctcactgtcacaagaacaggagkggggaaaccatgcccatgattcagttatctctacctggtccctcctacgacatgtggggattatgggaactacaattcaagatgaaatttgggtgaggacacagccaaaccatatcagaaacaatggaagctggaagacagtagcatttttttggttttttgtttttgttttgttttgagacggagtctcgctctgtcgcccaggctagagtgcagtggcgcgatctcggctcactgcaacctccgcctcccgggttcaagcgattctcatgcctcagcctcccaagtagctgggactacaggtgcccgccaccacaccggctaatttttttgtatttttagtagagacggggtttcaccatgttcaccaggatggtctcgatctcctgacctcgtgatctgcccgcctcggcctcccaaagtgctgggattacaggcgtgaaccactgcaccaagcttgtttttttttttttttggcagagtttcgctcttgttgcccaggctggagcgtagtgactgcaacctccacctcctgggttcaaacgattctcctgcctcagcctcccttgtagctaggattacaggcacacgccaccaagctcagctaatttttctatttttagtagagacggggtttcaccatgttgtccaggctggtgtcaaactcctgatgtcaggtgatccactcgcttcggcctcccaaaatgctgggattacagctgtgagccactgcgcctggccgatagtagcacatttttaaagtggctgagaggccgggcatggtggctcacacctgtaattccagaactttgggaggctgaggcaggtggatcacttgaggtcgggaattcgagaccaatctggccaacatggcgagagccccatctctactaaaaatacaaaaattagccgggaatagtggctcatgcctgtaatcccagctactgagaaagctgaggcatgagaatcgcttgaatctgggaggcagaggctgcagtaagctaagatcgtgccagtgcactccagcctaggcgacagagtgagactccatctgaaaaataaaatgaagttctgagagaattgtcaacccgaaattctttactcagtgaaaatacctatcaagaaaggtgaaatgaaagtattaccagatgaaggaaaacttaagagggttcgttgccaaccgacctgctctaaagtcattgctaaatgaagttctttagacagaagggaactttgtacatcaagaatgaagaatggtaaatacctgggtaataaatacaatagatgatttttcccctattgagttctttaaaatatatttgacagttgaaaacaaaaattataactgatcaagttttaacagatgtagatgtagtaatatctaagacgagtacaacataagtaagggagagtaaggtatcctatacatttgtacattcttcttgaagaggtacaatattgattctaagtagattttgaaaaattacgtataggccgggcacggtggctcacgcctgtaatcccagcactttgggaggccgaggcgggtggatcacgaggtcaggagatcgagaccatccaggctaacatggtgaaaccctgtctctactaaaaatacaaaaaatgagccaggtgtggtggcgggctcctgtaatcccagctactcaggagactgaagcaggagaattgcttgaacccaggaggcagaggttgcagtgagccaagatcgcgccattgcactccagcctgggcaatgagagtgaaactccgtcccaaaaaaaaaaaagaaagaaagttggagtggctgtattaatatcaaggttttcttctgtgcaaagaaataaccaggggtaaaaaagacattacataataacagattcgtatatgtcccttaacaacatagcttcacacaatacacgaagcagaaatggacaaatctgcaattacatgtggagacttcagtattcctctctcaataatagaagtagtagacagaaaaccaacaggatgtagaagaactgaacaacaccatcagccaacttggtctaattcacatttatagaacactcagctgaatatacattctttgcaagtgcacatggaacattcatcaatatagaccatgtcctgagttagaaaacatacctcaacacatttagagtagactaagctttccaggcccttgtgttttactttgttttttcacttttctttaaaatataatttacacaaagtttgcaaatctttttttttttcgagacggagttttgctcttgttgcccaggctggagtgcaatggtgcgatctcggctcactgcaacctccgtcccccgggttcaagtgattcttgcctcagcctcccaagtagctgggattacaggcgcctgccaccacgcccagctaattttttgtatttttagtagagatggggtttcaccacgttggccaggctggtctcgaacgccagacttcaggtgatccatccacctcggcctcccaaagtgctgggatgacaggcgtgagccactgtgcccagcctgcaaatcttaatagtaccatgtgatgaatttatatgtgtatgcctgtttaatcacccagttcaagatacagaacatttccagcaccccagaagattctcttgtgctacctcctaatcattacccctccccaaggtaactattctgacttctaacacagagtagttttgacttctacagagtagttttgctagctccttgggttttaattcactattaagtaacctctggcagtaaggtttatatgcgttagcggaatttggactccttactcaggttgcagttacaacccagttttcttttataaagcacatgtgtctcattgatcaccattgtattgtcttttttgttttttttgtttttttttttgaggcagagtctcactctgtctcccaggctggagtgcagtggagcgatctcagcccactgcaatctccgcctcctgggttcaagtgattctcctgcttcagcctcctgagtagctggaattacaggtgcccgccaccatgcctggctactttttgtatttttagtagagacagggttttaccatgttggccaggctggattcaaactcctgatcgcaagtgatccacttgcctcggcctcctaaagtgctgggattacaagcatgagccactgcgcccggtcccgtattgtcttttagaaaaactgtataactatttaaatattttcagtcaccaaactaaaaaacaaatactaaagttgaagtttattgctccccagaatgaaactacaaattacatctgatggccatttttacagtttaaccaataattagttctctatcatattatctttgtttcgttttcctttaacagaatacctaagactagtagttgttctttttttttttttttgagatggagtttcgctcttgttgcctagcctggagtgcagtggcgcaacctcggctcactgcaaactctgcctcccgattcaagcgattcttctgcctcaatctcctgagtagctgggattacaggcatgtgccaccccatctggctaattttgtatttttagtagagacagggtttctccgtgttggccaggctggtctcgaactcccgaccccaggtgatccacctgcctcggcctcccaaagtgctgggattacgggtgtgagccactgcatccggccggaagttgyttttatttttttactatttttaatttttttaaagaggtttatttggcccacaattctgtagctggaaagtccaagattgggcagctgcatctggtggggacctcatgctgcttccactcatggtgggaattggaaggggaccaggtgtgtatcaagagatcacatggtaggccgggcatggtggctcaggcctgtaatcccagcacttcaggaggccaagacaggcggatcacgaggtcaggagtttgagatcagcctggacaacatggtgaaaccccatctctactaaaaatagaaaaattagccaggcatggtggcccatgcctgtaatcccagctactcaggaggctaaggcaggagaatcacttgaacccgggaggcggagattgcagtgagccaagactgcaccactgcactccagcctgggtgatggagcaagacaccacctcaaaaaaaaatatatatatatatatgtgtgtgtgtgtgtatatatatatacacatatatatgtatatgtatgtgtgtgtatatatatatatctatatctcacatggtcacatggcaagagaggaagcaagacaggaaccaaggatgccagactcattttcttttcctttcctttttttttttttttttttttttttttgagacagagtttcactcttgttgccctggctggagtgcagtggtgcaatctcggctcactgcgacctctgcctcctaggttccagcaattctcctgcctcagccttccgagtggccaggactacaggtgtgcgccaccacatctggctaatttttgtatgtttagtagagacagggtttcaccatgttggccaggctggtctcaaactcctgacctcaggtgatccacatgcctcaccctcccaaagtgctggaattacaggcatgagccacggcacccggctctttttcttttagtatggagtgcttcacaaatttgtgtgccatcctcgtgcaaggaagccagactctttttaacaacctgctgtcttggaaactaatccagtccttggagagtgagcactcattcacccatgaggagggcattaatctattcatgagggatctacccccatggcccaaacacctcctactaggccccacctcccagcactgccactttggggatcagacttcaacataaattttggcaaagacaaaccacatctaaaccatagcagatatgataagtcacgtgagctttgaaggactgtgacatggtagaacagcatccacaggctctaccagagtttggtggaacagcatccacaggctctaccagagtttgagggagcagcatccacaggctgtaccagagattgagggaagctggtacaaattactggatccagcaccatagaaggggactctgggagaatcccatgtaaagattttagctagtccaggcatagtggcacacacctgtaatcccagcactttgggaggccgaggcggacagatagcttgagctcaggagttcgagactagccttggcaatacagcaagacccccatctctacgaaagaatacaaaaattattcaggcgtgatggcgtgtacctgtagtcccagctactcaggaggctcaggtgggaggatcatttgagcccaggaggtcgaggtcgtagtgagccgagatcgagccactgcaccctaacctgggcatcaaagtgagaccctgcctcaaaaaaaaaaaaaatttagctagttatcctttaaatgtatttcacccatacatgcatatgcctgctgtgtacctacaaaaactttttaaatctaaaatattaacatttggaaaaaaaatgtattttgctggggccaaaatccatacttggtagccctgagtatcaacagcattttttgagcgcccattatatataggatatcaaacttataattgtggagaatcacaagggaggtataaaataaatttcttgtccaggcacggtggctcacgcctataatcccagcactttggtaggccgaggcaggcagatcattttgagctcaggagtttgagagcagcctgagcaacatggcaaaaccccatctctactaaaaatataaaaattacccgggtgtggtggcgggcacctgtaatcccagctactcaggagactgaggctggagaattgcttgaacccaggaggtggaggttgcagtgagtagagattgcgccactgcactacagcctgggcgacagagcaagactctgtctcaaaaataaaataaagtgaaaattttttttttggcaagaatgtagaatttagaggtagaagatttagagcttggaaacaaagctgtatacctatatgtaaacacataggaaaaggtctgaaggaattttcacatgattacttaactctaggtagggattaagattgggatgggctgagggaggaagagtgaaagggaattaygtatttttttaactttactgaggaattactagaaatttttggtacatattacacgcataaacacagcaacacaaagatttgttttgagctttggctgccagttattagtggtttaaccccagagatgaattaaatatttatgytgttgttgttgtcattttcatcatgagagctggctgggtcttagaatcatttggtacaatccccactttttatagataaagaaattctaagattcctgcttcaaggcacrtatctctgattgcctaaccattgtgcttacttcttgtgagaggaggtaggccctctgtgcagtctgtggatttcaaggatatggaatacagatgcgtggtctctttggaatgtccaagtcgaaagttaaagatgcattaactagtttagggaaaatctaagattttatgggaagataaataaaaaagtttatgctcaaataaatccatgtatggcatgattgaaagattatgtttttaaatgaagttatgtttcctaaagaggaaagcagaccttttctgtggtaaatatagccttgcatgtgttttcaagaatggtgctttggaaaccatttttttctacagaagttagtgggagagggcagatggaaacacagattcttcctacctagtgccaaaagcactgagaaaatgttgcaaggagctaataacaagtacaaaaatgttagaaatgtgttaaatatataggtctgatatgtgtaagcatagaccaaaaagactacctgacctgagtttctaatgttctgttttgaagttaaacatatgatcccttttccttagcattcaacaagccaatgagatttcatggatttgccttcagagctgtctttttttttttttttgagacggagtcttgctctgtcccccaggctggagtgcagcggcgccatctcggctcactgcaagctctgcctcccggtttcacatcattctcctgcctcagactcccgagtagctgggaccacaggtgcctgccaccacgcctggctaattttttgtatttttaatagagacagggtttcactgtgttagccaggatggtcttgatctcctgacctcgtgatccactcgcctcagcctcccaaagtgctgggattacaggcgtgagccaccacacctggctgggtggttgcagttttaaatagcattccagggaaggtctgactgagaaggtgacagttgaacaaagacgtaaagagcatgaccaacacaccatactgacatgtctgtattccaagaaaacggaagggaaaggcactgagcctgaaacatgtcttggatatttcgcattgagaaaagtcatgcttcagaatgttacaagtatttcattggcttatactttatagacatattttaaagaggtgcagaaaggacagtttttgtctcaccatagcagccaaggtgcatttgcccagtgccttccattgtctttccctgtgggagtaacttttaggtccagtgatgaggagcctgtgatgtctgtgttctggtttgttgataacattaccatacagggcttcacgggtgtccttcttagcatggattgcttccattcattggttgctggaaaatttgctttcaaatgtttttaacagtgactcttagggaaaaaaaatacattttattagatgtccattctccctaaatttacctgagttcaactgaattccaataggtttttttttagtgttaatttaaaaaaacaagctggccaggtgtgatggctcatgcctgtaatcccagcactttgggaggccaaggtgggcggatcacttaaggtcaggagtttgagaccagcctggccagtatggtgaaaccccatctctactaaaaatacaaaaattggctgggcgcagtggctcacgcctgttaacccaacactttgggaggccgaggcaggaggatcacgaggtcaggagatcgagaccatcctggctaacatggtgaaaccctgtctctactaaaaatacaaaaaaaaggccgggtgcggtgcctcacacctgtaatcccagcactttgggaggctgaggcgggcggatcacgagatcaggagatggaggccattgggctaacatggtgaaatgctgtctctactaaaaatataaaaaattagccgggtgagatggcaggcacctgtagtcccagctactcgggaggctgaggcaggagaatggcgtgaatccaggaggcggagcttgcagtgagccgagattgcgccactgcactccagcctgggcgacagagcaagactccgtctcaaaaaaaaaaaaaaaaaaaattagctggatgtggtggcacgtgcctgtagtcccagctactcaggaggctgaggcaggagaattgcttgaacctgggaggtggaggttgcagtgagccgagattgtgccactgcactccagcctgggcaacaagagtgaaactccatctcaaaaaaataaaaataaataaataaataaataataaaaatacaaaaattagccaggtgtggtggcacacacctgtaatcccagctacttgggaggctgaggcaggagaatcatttgaacctgggaggcagaggttgcagtgagccgagattatggcactacactccagcctgggtgacagagcaagtctctgtcttaataaatacataaataaaaatgataagctgatttaaaaatgcatatgaaattgtagtgggtggaatagtcatactagtggaaaagaggaagcaaatgggagaagttgctattaggtaacaaaacttatagagctttagtaattaagggagtgtggtattagcacaagaaaagatacatagatcactggaacagattagagaagtcagaagaccarcatgtatatggatacttgagtaattgcaaaggtgatacgacaaagtctttttcagtaaatgatgtgggacagctggatatgaatgggaagaaaaatgaaactggatccctacctcacttcatatggtggttattttgagcactttaaagtattaatgccactgtctcttgactgctgagattctgctggcagtgtaattatttcctttaccgggaatttgccttgtctgtttctgctttagatcttctctaatgatagagtccctggctttaggcttcttccttcaactccagtggatattccctactttgttttgtcctatggagttaagaaaattattccagaaaagcagatatctttgtttaacttccagatcattaaaaagttgtgttagtattcaaacattaaacagatgttctttgttagtaaaaggaggaaaatagtgtaaccattcttaataattgaatgaattcatatttggtcttaaatatttcaaaatatttcagatcaattctttggtatgctagtggtttctactgaaggttaagctttgacctactaaaagcagctcataaagaaagctttgtcagacttcagttcccatgaacctgctcacaaagaacactttttcccaatgtagttttgtcttgtgtatgaaaggaaaactgcctgccaaggaggctaagaaggttagctgaatgctattgtaatggtgagatgtttgtccagaaaaccattcctgacacctttcaaatcaaaagccttttttttttccttaaactttttgattgctggatttctgtttgaggaagttatgttgctacaatgagggtagcaataaatgcctcctgggaagttggaaataaaggcaaaggagagttaaacacaatagatgagatcagaaatgggcaaagttatcttaaagagacagaatggctccctggctagaataagactgaattgtccctagatcaaaaaaagaagagaatgtgtgtggcagaaggaagaaagtggactctacactgtgttagttaggaaaaccagaaattgggccaaattgcctgtttagtgggagagatagcttttgagagctgtgatcccgctggtgtggctggctctgggcagatatttgtatctgaaatgactcatgctgtgggacccttcctgagatctaacacttacagtggtttgatcagaaattgcaccatgcttgccaagcaacttttggactaaaagttgctgcccacgtatatcaggggaagaatatatatatatatatatatagtacctatcttagcatctgatttgtatgaccattacttcaatgtaaaataataaattggctttccagcttaaacttcaatttcttgtatattatatgatcatgagacaacctccctgggctgatcaacagcaggacgctaaaaagattgagtatctgagtcaggaaggtagagggccagaccctacatgtagctaattcaccattgtgaatctgcatgttaggtaaaactatggatttgttttttgtcttttgagacagattctcaccctgttgcccaggctggagtgcagtggcatgatctcagctcactgcaacctttgcctctgggttcaagagattctcttgcctcagcctcccaaatagctgggattacaggtgtgcaccaccacgcccaaccaattttttgtatttttaatagagacgggagtttcaccatgttggcgaggctggtctcgaactcctgacctcaagtgatccgcccacctcggcctcccaaagtgctgggattacaggcatgagccactgtgccaggcctaaaactatggtttttaaagatatacacgcatgtggtaaagctatgaatcaaagcaagagaatatttcatctcaatgttaggagagtggttttggtgggrtggggtatgtagtcaggcagaggcacacaagagcttcaaaggtgctgttaatggtccctttcccaagctagatggggattccatgggtgctcattttttagtaactctaatttaagctgtacatgttatatatagtcatggatatataatcattattttaaaaatgaaggcaaggaggataccataaaatgaggtacttcatatttaaccagctggcatcctaagcacctttcctgccctcccctctctgcacctggcagagttgatcacatcctccccattacccactatacatgggtgtcagtgccaatagtgctttgctcttgtattattgatgagtcttgctccttttcctaaattgtgaggcctcctgaaggcagcacccttgtcttatgaaaaagttgagcttctgaggatatgtctttggtgaattttggaaaacgtttagcctttatctctgaagataccacttttcattaccctctcttttcatttcctgctgaaacccctttttttgtttgttttttgytttgttttgttttgttttagacagagtttcactcttgttgcccaggctggagtgcaatggtgtgatcttggctcaccgcaacctctgcctcccacattcaagtgattctcctgcctcagcctcccaagtagcagggattacaggtgctcgccaccacacccagctgattttttttgtatttttagtagagacggggtttcactgtgttggccaggctggtcatgaactcctggacctcaggtgattcacctgcctcagcctcccaaagtgctgggattacaggcgtgagccactgcgcctggctgagaacccacttatgtgtagcttggacctttatgttctctcttctatgtctctaaacttctctttcatgttttgaatcttttcatctctttgttgcatggtaggtaatttcctcagatctgtcatctagttcaatacttttttttccagctgtgactaatttgctgttcattccacccagtgacattttaaattctcttggattttttcatttctatttccaatagtagttgttctttgcttacatttcagtttcctgttttatttttaaaacattttaatcatttttcttttatgttctgtgttcttcaatctaagtgaaatacttggggttgttcagtgctgttatggcttgttttacttgactcattcatgggcctgcttccctatcgtaatttctaattacgagcaatgtggctgatcctaatgtatgagaaccctgggggacctggatcgggactgctccacagatggggtttatgtttaccaatgccaggcaccttggagtgctaccaacatagaagcacttcagattaaccgtctgcatagagctttgcttggaaagagaataaattcaaactctgatgctgaatggggcaggcttatgatgacacattcttcggaaagattcttttttattcgttccaatcaatgcttgagataagacagatttccttgccagctccatttgccagcaaatcaatttttccctagcttactccttcacttagggttaggtccttgggattctggcttggcagagaatatcagctccagctccccatcatctactccgctctgaaaaccaaggctccagaggtgtgccagatagttacagggtagcctgtagcttcagggctagcttctgttttagtttgggggcattcttcttggttttggggtcctgtggattttccatactttcttgaaaattcagctgtgcatttgaaaggctttgttatatattgcactcagcattgccaggtgtttggagaggggtgttttgggatagctaggctattgtattgtgcaaaattaaagcctcatattctatttctatatgaactgtagttaagtgttaataatctgatgtctgggatgttttgattcttacatcaataactatgacatttattaataatcatattaaataacattaactcaagctcattggttacattacaaaggacactgatacattacaaagcacacatacaagcactgcacaccagtattgaggcttccagccccctctacatgatcatttatttatttatttatttttgagacggagtctcactctgttgcccagactggagtgcagtggcatgatcttggctcactgcaacctccgcctcccaggctcaagcgattctcctgcctcagcctcccaagtagctgagattacaggtgcgcaccactaccacctggctaatttttgtacttttagtagagatggggtttctccatgtgggccaggctggtatcgaactcctgacttcaaatgatccacccgcctcggcctcccaaagtgctgggattataggcatgagccaccgcgcctggtcatgatcatttttattttggaaccattcattcagaaaaatttcacagccattttgaacttgtgctatgacatggcaaaatctctagtaaatcattttaattcctgatgagttcatttttataatgataaatttctaaggaaaatattttgttttcaacttcttgccaccatgtcaagactgtacattttaaaacatattacatcacattttcccttcaaagcaatgccagtgaattctgttaatggtatcattcatctcatgttacccaactccagatcataaagtttccctcattctccttcctttccacaaacctaccaaatcctctatcgccaagtcctttgggttaattcacggagaaagtatcgagcacagaggcagaacagggcctctggagagtgtcacatttgtgtgtgaatcctgactcttgattttcactagctttgtaaccttagacaaattactaccaggcacggtggctcacacctgtaatcccagcactttgggaggctgaggcaggatcactggagtccaggagtttgagaccagcctaggcaacatagcaagatcctgtctctacaaaaaataaaaaattagctgggtgtggtggcacacacttgtattcccagctacttgtaggggctgaggtgggaggatcacttgagcctgagaggtcaaggctgcagtgagccatgatcgggccactgcactcagcctgggtgacagagcgagaccctgtctcaaaacaaaccaaaaaacaaattagttaacctgtctggagctcagtcccatatttgtaaaatgtggctaactacagcaccttcccttatagaaagctgtttgaggatccagttatgcatttaaagggcttaacacattacctggcacaggaaaacaaagacaagctgctgtcctgttttctttgttgctgccatccttctcacaaggtctcgacggagtctgtcttcatcacgatttcactgccctcatgcctgttctgtttaccccttttctagactgggcccttacttaccttagcctgagctattgtgaaacactcccagcggcttcctgacttgccccactccctccttccgccgtcctgtcctgctcctaatcgtgtttgtcagaaatgcctctgactgatacactggcaaaatcagaaatcttcaagggatccccctttttcttgctgtagcttaagatctaaatctcttaacctagatcacgatctgacactagatatatttatagtccatgaaaataccctgaaagctttcaagtaccagatgaaagtgagctccttcattaccacctcaactcactgtaggcggcttttcatgtgcaacagctaagctttaagagggctgggactgtgacctactttattttgtattgttatagcagctcacttggtacccagagcaaggaggtatatttgtttcttgcatatttggcaggttgattactatataaattactctattgaagattaaaatggtttactgaagatgtcgccatatatcttagcaaggtcaaaacagttgtgtaatttttctgaatgaatactttcaaaataaaaaagaccactcagaccagaagcctgaacatctgtgagcaatgcttatacatgtgctttttaataaaccaacatgttgggccgggcacggtggctcacgcctgtaatcccaacactttggaaggttgaggcaggtggatcacaaggtcaggagtttgagaccagcctgaccaacatggtgaaaccccgtctctactaaaaatacaaaaattagctgggcatggtggcgtctgcctgtaatcccatcgactcaggaggctgaggcaggagaattgcttgaacccgggaggcagaggttgcagtgagccgagatcacaccgtggcactccggcctgggcgacagagcgagactctgtctccaaaaaactaaactaaactaaactaaaataaaccaacatattaaactttaataggattattgatctgaaaaccaaaacatggtaggaattagtttataagtcatatttagacgcatcatcttataaccctctcagcaaaacctgtggggcaggtagattatggataacaagtgttcacttcatgaattgtccctgttgatcaggtgaagtagaacttggatctggggcagctcttgtgactccagattcttggtttttgagcaggtgttgggggaaatacctttcttgttgaagttctttagtactcttttttttttttttttgagatggagtcttgctctgttgcccaggctggagtgcagtggcgcgatctcagctcattgcaacctctgcctcatgggttcaagctgctctcctgcctcagcctcccgaacagctgggattacaggcacacaccaccacgccaggctagtttttgtatttttagtagagacggagtttcgccgtgttggccaggctggtcttgaactcctgacctcaggtgatctgcccaccttggcctcccaaaatgctgggattacaggcataagccactgcacccggcccatcttttaataagagctcrgcatattcatacttgattgatcagcattttcgtcattagaaatgaggtggggtttttttgtttttgtttttttgtgttttcatttcaaagattaaaaacctagagaggaaggagagtatttggggaaaatggtggaagagggagcaccagtcatctgtctccacacctagacatcaattgtactggcaggatctgtctgatctaactattttggaactcggaagtctactgaggyttacacattcttgctgggatggcaaactgtggttaattttggtcagtttcaactcttagcacagtagcagctatgcactccccaaccccagttctgtggaaggcggctacgcgggtgttcctagagcttgcacacagcgtgggagccagaataggcaaaaagcatcttgtcctctaaatatttggggtctgtgctctgactgctgattgctgcttctgatcgtagaggtgcagacaaagagatgggtggccattgtcgttacacctcctcattattgcaagttcttccccctccaattaacaagacttccaggggatttaaagagctaatggtcctgctcccttgcttcacttttattttttcccatttgggagccagatgttagagaatatgacattgaaaagcaactgcatataagggggagaattaagaagtgactgtgcatgcctaggaaaaggtataggcacagtaaagacctgagaagaccctgagtttatacccaagactgatctttggcacagacggcctacagtaaacaaaaagaatcacacacacatccacacacagaataacaaaacccagtaaacttgaaaaggggaggatctgattttctgaattaccacagtattagattcaaatgttcagttttcaacaaaacaaatcacgaggcacacaaagaaacaggaaagtatgctcttccaaggaaaaaaaaaacaactgaaactgtgagaccacatagtagacctactagaaaaagattttaaaacaactgtcttaaagatatgcaaacaactaaagaagatgtggcgctgggggcggtagctcatgcctgtaaacccagcacttggggaggccaaggcaggtggatcacttgaggtcaggagtttgagaccagcctggccaacatggggataccctgtctctactaaaaatacaaaaactagctgggtgtggtggtgtgcactggtaatctcagctacttgggaggctgaggcaagagaatcgcttgaacctgggaggcagaggttgcagtgagccgagattgtgccattgcactccagcctgggtaacagagtgagactccttctcwaaataaataaataaataagatgtggaaaaaggtaaaacagcgtatgaaggctgggtgtggtggcttacgcctgtaatcccagcattttgagaggcagatcagttgagtccaggagttcaagaccagcctggccaacatgttgaaacccgggtcatcgctagtaaataagacaaaaattagctgggcgtggtggcacaagcatgtagtctcagctactcaggaggctgaggcaggagaatcacttgtacccgggagatggaggttgcactgagccaagatcgtgccactgcactccagcctgggcaacagagacagattctgtctcaaaaaaaaaaaaaaaaaaagaaaaaagaaagaaaagaaaaaggaaaacagtgtacaaataaaatgtaaatataaataaagagatagaaaccctaaaaagaaactgaaaataattctggaactgaaaaatacaataactgaaatgagaaattcactggagggattcaaaggcagatttgagtaggcagatgaaagaatcagtgaatttgaagataagatattaaaattatcaagtctgacaaacagaaaaatgtttgaagaaacatgagcagagcctaagggtcatcatcaaagagactaacatgttttctgggagttatagaaagaaatgaaagggggagagagattatttgaagaaatagtatctggaagcttcccagatttgacgagagacatggatataaacatctaggaagttaaacgacctccaagtaagatgaactcaaggacacccacaccaagacacattacaatcaaactcccaaaagcgaaaaccaaagaacctttgggctggattcagtggctcacacctgtaatcccagcactttgggaggacaaggcaggaggatcacttgagttcaagctcagcctgggcaatatagtaagacctcatctctactaaaaatcaaaaaaattagccgggcgaggtggcatttgcctgtagtctcaggtcctcgggaggctaaggtgggaaaattgcttgagcctggaaggtcgaggctgcagtgagctatgattgaggcactgcactccagcctggcctaccgaatgagaccctgtctcaaaaaaggattcaacctgaggaagctgactaaaaaaacaaacttcagagaggagagaaatgcctcctcatatacaagggacccccaataagattataagcagatttctcatcaaaaactttggaggggycaggtgcagtggctcacatccataatcccagcactttgggaggctgaggcaggtggatctcttgaggccaggagtttgagaccagcctggccaacatggcgaaactctgtctctaaaaatacaaaaattagccagggatggtggcgtatgtgcctgtaatcccagccatctgggtgcctgaggcacaagaatcgcttgaatctgggaggcagaggttgcagtgagctgagatcaggacactgcactccagcctggatgacagagtgagaatctgtctcaaaaaacaaaacaaaacaaaaaaacaaagtttggaggcaagaatacagtgggctgatatattcagagtgttaaaaagaaagaagacctgtcaactaaccatctaatacccagcaaaactgtccttcagaaatgaaaaagaaattaagatattcccaggtgaacaaaaatggagggagttcattagccacaagacctgccccgcaagaaatactcaagtgagtcctgcagagggaaattaaaggatattaaacagttactcaaagccatataaagaaatgaagatcttggccgggcacggtggctcatgcctgtaatcccatcactttgggaggccgaggtgggtggatcatgaggtcaagagatggagaccatcttggccaacatggtgaaaccccatctctactaaaaatacaagaattacctaagtgtggtggcttgtgcctgtagtccccagctactcaaggaggctgaggcaggagaatcgcttgaacccaggaggtggaggttgtagcgaactgagatctggccactgcgctccagcctggtgacagagcaagactccgtctcaaaaaaagaaatgaagaaaaaaaaaaaagaaaaagaaatgaagatctcaaaagtgaaggatatgtgcaattttaaaagctaatattactgtaacaatggtttataattgcatttttgtgttctacatgatttaagagactaaaatgcttttttaaaattagtctaaaagctagtagtattgtaatgttggtttgtraatccacattttcttttcttttcttttttttttttttttagatggtgtcttgctctgtcacccaggctggagtacagtggtgtgatatgggctcactgcaacatctgcctcccgggttcaagtgattcttgtgcctcagcctcccaagtagctgggattacaggtgtgtgccaccacacccagctaatttttgtatttttagtagagacggggtttctccatgttggccgggctggtgttaaactccgacctcagttgatctgcccgccttggcctcccaaagtgctgggattataggcgtgagccaccgtgcccagcccacattttgttttctacataatttaaaataatttttttggtaaaataatttctaaagcatttaaaataattatttactttatggtttggggcacacagtttataaaggtataattttgtgatatcagtaagcaaaaaggttgaggacccagctgtaatggagtggagcttttctgtgttactgaaattaagctgatagaaatttaaattagtgttataactttaggatgttaaatgtaatcctcatggtaatgacagagaaaatcactgtagaatatacacaaaaggacatgagaaaggaatttaaatattttaatgtacccccaaaaatcaactaaacacaggagtagacagtaatgcaggaaactagggacaaaaaccttaaggcatatacaaaacaaaatgacaagccaggcgcggtggctcacgcctataaccccagcactttgggaggccgaggcgggtggatcacgaggtcaggagttcaagactagcctggccaagatggtgtaaccccgtctctactaaaaaaacagaaaaattagccaggcatggtggcggggacctgtaatcccagccacccgggaggctgaagcagagaattggttgaacccaggagacagaggttgcagtgagccaaggtcacaccattgcactccagcctgggcaacagagtgagactcgtcgcaaaaaaaaaggaacaaaatgatagaaataagtccctgtttattggttaattaccttaaatgtaaatggattaaactctccaatcaaaagacaaagattgtcaaaatggtttttaaaaccaatctgggctggacgcagtggctcacacctgtaatcccagcactttgggaggccaaggtgggtggatcacctgaggtcaggagttcgagaccagcctgggtaacatggtgaaacccaaactctactaaaaatacaaacattagctgggtgtagtggtgcatgcctgtaatcccagctacccaggaggctgaggcaggagaaatgcttgaacctgggtgacagaggttgtagtgagctgagattgcaccattgcactccagcctgggcaacaagagcaaaactccatctcaaaaaaaaaaaaaaaaacaaaaaacaatcctactatatgctatatataagagactcacggccaggtgcagtggctcaagcctgtaatcccagcagtttgggaggccgaggccagcagatgacaaggtcaggagatcgagaccatcctggttaatatgatggaaccctgtctctactgaaaagtggaaccctgtctctattaaaaaatacaaaaaaattagccatgcttggtggtgggtgcctgtagtcccagctactcaggaggctgaggcaggagaatggcgtgaacccgggaggcagagcttgcagtgagccgagatcgcaccactgtactccagcctgtgcaaaagagcgagactccgtctcaaaaaaaaaaaaaaaaaaaaaaagagagactcactttaaatccaaatgttgctggtgaaaggatagaaaaagatattccatgcaaatagtaatgaaaagggatcggggtggctattctactatcagacaaaaagagttacagaattgcaggaagaaatagacagttctacaataaaagttggaagctttaatatcccactatcaataatggatagaaaaataaagaaactttacatgataaaccaactagatttaacagacatttatagaacactctacccaataacaatagcatacattttctcaaatgtagatgggatgttttccaggatagacyatatgttaagccacaaattagtgtcaatagattttaaaagatatacaaagtatgttcttattgcaaccacaacaggataaagttagaaatcagtaacagaaggaaaattggagaatccacaaatttgtgcaattaaccatatactcttagtcaaccaaagggtaaataaagaaattacaagagaaatttaaaaatacttaaagatgattgacaatgaaaacacacataccaaaatttatgggacagtgaaaacagtgctaaaggagaaatttatagctttaaatatatacattaaaaaataagaaaaatctcaaatcaacaacctaaactttaccatttaaggaactagaaaaggaagaaaaactaaactcaaaactagcagaaggaaggaaataataagattagaacagaggtaaaggaaatagagactagaaaacaatagagaaaatcagtgaaaccaaaagttgaatttttgtaaaggtaaacagaattgacaaacctttagccagatggatcaagaagaaatgagagaagacacaaatgattaaaaccagaaacaaagtagacccttactattgattcaacagaaacaaaaaggattatgacaggatggtgatctgttgaataccaacagattggataacctagatgaaatggacaaacccctagaaacacaaaacctactgagactaaaccgtgaaaaaatagaatacccgagtagatctataattagtaagaggatagaatcaataatcaaatatctccttgtaaagaaaagccctagacacgaagccttcaccagtgaatttaaccaagcatttaaagaagaactaacactatttcttctcaaatttttccaaacagttgaagaggagggaatacttctgaattcactctatgaggccagaattatgctgatatcaaaactagaaaagataaccacaagaaaaatacacatcagtatccctcatgaacattgatgcaaaaatcttcaagaaaatactagcaagtaaattcagcagcatattaaaaggattatacaccatgaccaaagtgggatatatttctggaatgcaaggatggttcaacatatgaaagtcagttacctaatatgctgttttaacaaaatgagggacaaaatcacatggtcactccactggtccataaaaagcacttgacaaaattcaacacccttttatggtaaaaacactcaacaaactgggaatagaaactaccccaacataataaaagccatatatgaaaaacagtgaacaattatacttaatggtaaaaaacggaaagcttttcctctaagatcagaaacaaggcaaaatgcctgcttttgtcacttcagttcaacacagtgctggaaattttagccagagtcattagccaagaaaaagaaattaagaggcatcaaaattgggaaggaagaagtaaaagtatctctgtttgcagatgacatgatcttgtatgtagaaaccctaaagattccacaaaaaattgtttgaactaatacatgaaactgacatagtagcarcatacaaagtcaatgcacaaaaatcagttgcatttctaaacaccaacaatgaataatatgaaaaagaaattaagaggaaaattccacttaaaatggcattaaaaagaataaggaggtgaaagactcatacaatgaaacatgaaacattgctgaaagaaattaaagacataggtaaatagaaacacattgtatgttgagaaattggaagacttaacattgtgtgtttggtttttggagacagggtcttgctctgtcacctaggctggagtgcagtggcacaatcacagctcactgcagcctcaatctcctaggctcaagtgatcctcccacctcagactcccaagtagctaggactacaggcatgcacaactatgcccggctttttttttttttttaattttttgtagagatggggtctcactatgttgctcaggctggtcttgaactcctgggctcaagtgatcctcctgccttggcctcccaaaattgtgggattacaggcatgaatcaccccgactagcctgacttaatattgttaagctgtccataccacccaaagtaatttataagttaattcaatacaatttctatcamactcccaaggccattttttggcttgggagttttagaatataaaaatttattctaaaattcatatgggatctcaggagaacctgaaaagccccaacaaacctgaaaaagaacaaagctggagatctcaaacttcctgaacttaaaacttaactgcaaaaatgcagtcattgaaacagtgtattggacttggctgtggtatgaagaaataagaaaaagaagagaacagcatgatacataaaaatagacatagagaccgatgaaatcaatagcccagaaataaaccctcttatatagtcaagtgaaatttttttttttttttgagacagactgtcactctgttgcccaggctgcagtgcaatggcgtgatctcggctcactgcaacctccacctcctaggttcaaatgatgctcctgcctcagcctcccgagtagctgggactacaggcgtgtggcaccacacctggctaatttgtgtatttttagtagagacaggatttcgtgttagccaggctggtctggaactcttgacctcaagtgattcgcctgcatcagcctcccaaagtgctgggattacaggtgtgagccaccgtacctggcccagtcaagtgatttttgataaggacgtgaagattgttccacagggaaaggacagtcttttcaacaaatggtataggggaaactggatattcacatgcaaaagaatgaagttggacccttacctaatactacattcaaaaattaactcaaaatggccggggcctggtggctcacacctgtaatcccagcacttgggaggcccaggcaggcggatcacttgaggccaggagtttgagactagcggggccaacatggggaaactctgtctctactaaaaatataaaaaattagccaggtgtggtgatgcatgcctgtagtcccagctactctggaggctgaggcatgagaatcacttgaacccgggaggtggaggttgcagtgagccaaggttgcaccattgcactccagcctgggcaacagagcgaggctccatctcaaaaagaaacaaacagacaaaaaactcaacaatgaaaaaacccaattcaaaaatgggcaaaggacttgaatagatgtttccccagagaaggtaaacaaatgaccaataagcatatgaaaaatgaccatcactaattattagggcatgcatgtcaaaactataccccacacccattaggatggctactgtcaaaaaaaagaaaaaaaggaaataacaagggttggtaaggatgtgagaaatgggaaccctggtgcattgttcacaggaatgagatgatgcagccaatactagaaaacagtatggtggttgctcaaaaaaattaaaaatagaattaccatatgataccaaaattcagtcctgagtacagtatgtacccaagataattgaaagcagtatctcaaagagatgtttgtacactcatattcataggagccttattcacagtagttaaaatggggaagcaatccatgtgcgtctatcaacggatgaatggataaacaaaatgtagtatgtacatacaagagaatatgagtaagccttaaaaaggaaggagttctgatatgtgctataacacggatgaaccttgaagatactgtgttaaggagataagccagtcagaaaaaaggcaaatactgtatggttccatttgtatgaggtatttagagtattcaaaatcacggtaaaaggaatctgaggagattaaaaaaaaaagagtagtcaaaatcataaagacggaaagtagaatggtagttgccaggggctggggggagggatgaatggggaattattgtttaatagagtttcagttttacaagattaaataktcgtggagatggataatggtgatgattgaagagcattatgaatgtattgaataccactgaaatgtatactttaaaaagggatactggtaattttacgttatgtgtattttaacattaaaaaattgggggatgagggctgggcatggtggcccacacctgtaatcccagcactttgggaggccaaggcgggcagatcacgaggtcaggagatcgagaccatcctgcctaacacggtgaaaccccgtctctactaaaaatacaaaaaaagcggggcgtggtggcgggcgcctgtggtcccagctactcagtaggctgaggcaggagaatcgcttgaacccaggaggtggaggttgcagtgagccaaggtggcgccactgcactccagcctggtgatagagtgagattccatctcaaaaaaaaattaaaattggggcatgagggcagggtgcagtggctcacatctgtaatcccagcactttgagaggcccaggcaggaagatcccttgtgcccaggagattgagaccagcctgggcaatatagtgagaccttgtctctacaaaaaaaaattaaaattacctgggtgtggggcacacgtctgtagtcccagctacttgggaggctgaggtgcgaggatcgcttgagcctgggaggttgaggctgcagtgaactgtgattgcaccactgccctcctacctaggtatatttgttttttggtttttttgttgttgttgtttcttgttttttgagacagagtcttgctctgtcgcccaggctggatgcaatggcacgatctcggctcactgcaacctccgcctcctgggttcaagtgattcttcctgcctcagcctcccaaatagctgggattacaggcatctgccaccacgcccagctaatttttgtgtttttagtagagacggggtttcgccatgttggccaggctggtctcgaactcctgacctcaggtgatctgcttgccttggcctcccaaagtgctgggattacaggcgtgatccaccacgcccagccctgtttttgtttttgttttttcaacagatgtaatttctgacttgtataccttttcaatcaagaatatgtatggactgcagcctgatgaagtttttcactcctttagtaatgtcctccttgttttacattttcaaagcctgcatagttacagattcatttgttttcaacgtttccccaggggaagacggaatctatcactgtggtgaagctgctgagctgctttgatgacctggtggcagcaggcacagcctctggcagggttgcagtttttcaacttgtatcttcattgccagggagaaataaacaggtgagtactcatgatcttaacacgtgttaacttcttggcacattcctcatggatttttaaaattagaaatcctcatctgcttrgaaagtttatgctcagagaaagccgggcacgactttctctgcccaggctcatgcctgtaatcccagtactttggaaggccaaggcgggctgatcacgaggtcaagagatcaagaccatcctggccaacatggtgaaaccccatctctactaaaaatacaaaatttggccgggtgcagtggctcatgcctgtaatcccagcactttgggaggccgaggcaggcagatcacgaggtcaggagatcaagaccatcctgactaacacagtgaaactccatctctactaaaaaatacaaaaaattagccgggtgtggtggcgggtgcctgtagtcccagctactagggaggctgaggcaggagaatggcgtgaacccggaagacggagcttgcagtgagcggagatcacgccactgcactccagcctgggcgacagagggagactccatctaaaaaaagaaaaaaaatacaaaaattagctgggcgtggtggtgcgtgcctgtagtcccagctactcgggaggctgaggcaggagaatcacttgaacccgggaggcagaggtcacagtgagctgagattgtaccacgctactgcactccagcctgacggagcgagactctgtctcaaaaaaaaaaaaaatgctcagagaagcttaacactgtgctgtttataattggagaacatttttgtgctgggttggacacttggcataaagtacatgtgggtcatttcatttttgcttaatattctcaaggtatgctctctgtgggttttgaaggtgactagacagatggaactttgtgcagggttctgcttggaaaacgagattgggaaaaccagctcttccctaactaggagygattgtataccttttccatgtagccccagctcacagcatttatcctttttttttcttgtgtatatttttatcccttgttcatagcttcggagatttgatgtcactggtattcacaaaaatagcattacagctctggcttggagccccaatggaatgaaattgttctctggagatgacaaaggcaaaattgtttattcttctctggatctagaccaggtaaaattattttcagaaatactgttggctcttaccttcttacatttggaaaaactatatttataacttgtatttttagtcaacttgtattcttgatcatcatccctttataatctcaattgttatttgtaacatttacttttatagacttatgttttataagcttccacttctatgactaaggagttggcctactggaacattcacttttttcattccactgttgtgtattacttttacttgraaaagaagctattatcattcctacttccttgaaaggttagtaggagtgatgccaagcacttctgaatcctaactgtggacaagtcagtgatttcaatggatggaggactctgccagccacctggcctgtgtgagatgacctcatgtgacaggaagtggcagaggaggttaggtggcagtatggtgaagatgaagaaactggagtgccaagagatccaggaactagtccaggggtgcaggcttgcacctcacagagcttgctttcaaactgtgcttctgcttcgacgcccgtgccttttccactgcacgtatggcttgatgatctgctgggttttatttgttttgtcatgtgtctgcaaccaaactgaactccttggtggcacagtcctttctttttcttatttgtagccttcattcctagagcactataggaattcagcaattttttttttttttgagacagtctcgctcttgtcgcccaggctggagtgcagtggcccaatctcggcttgtgacaacctccatatcccgggttcaagcgattctgccacctcagcctcgcaagtagctgggattacagggacctgccatcatgcccgactaatttttgtatttttgtagagacggagttttaccatgttggtcaggctggtcttgaactcctgaccttagatgatctgcctgcctcggccttccaaagtgctgggattacaggcgtgagccaccacgccyagccaagaattcagcaattattagctgcatgactttcagtccctctgatccaagactgacctagtacaaatattctctagtagtagttctcaagctttgtagtcacaggatccctttacactcttagaaagaggaccccaaagcatttttgttcatatgggttatctctaccaagtacaccatgttagaagttacaactgagaaatttaaaaatatacatatttttttgagatggagtctcgctctgttgcccaggctggagtgcagtggcgcgatctcggctcactgcaacctccgcctcccgggttcaagggattctcatgcctcagcctcccgagtagctgggactacaggcacctgccaccacgtctgactacttttttgtattttttgtagagatagtgtttcaccgttttagccaggatggtttcaatctcctgaccctgtgattgaaatctcccacctcagcctcccaaagtgctgggattacaggcgtgagccactgcgcctggctgaaatttaaaaatattttactttgaaataataaatccataacatctgcacataagtgacatattttgtgaaaatatctctatagctctattttcaaaacaggtgagaagagtgagtggcattgatttatatttttacaaatttctttattatctggcttaatagaagatggctggattctccctaatctcaagtaatcagggacacaaacactgcggaaggccgcagggtcctctgcctaggaaaaccagagacctttgttcacttgtttatctgctgaccttccctccactattgtcccatgaccctgccaaatccccctctgtgagaaacacccaagaattatcaataaaaaaataaattaaaaaaaaaaataaaaaataaaaaataaaaaaataaaaacacacctcaccaagctcagccaccaacttaaaaaggactggacaatacttttaccactttcccttctcagaattcaggcctgtcctcggaatgctacagggtacagcccatttgagctcctgtatggatactcctttttgttaggccccagtctcattccggacactagaccaacttagactgtgccccccctcaaaaaaaaaaaacttgtcatccctactatcttctgtctagtcatattcctattcaccattctcaactaactcatacatgccctgctctggtttacactgccggtttacactgtttttccaagccatcgcagctgatatctcctggtgctatccccaaactgccactcttaactcttgaagtaaataaataatctttgctggcaggactgtgctgaatctccttaggcactctctaatcagatatcctgagtcgtcccaattcttagaccttttatacctgtttttctccttctgttattccatttagtttctcaattcatccaaaaccatatccaggccatcatcaatcattctatatgacaaatgtttcttctaacatccccacgatatcaccccttaccacaagacctcccttcagcttaatctctcccactctatgttcccacgccgcccctaatcctgcttgaagcagccctgagaaacatcgcccattctctctccataccaccccccaaaaatttttgccgccccaacatttcaacaccattttgttttatttttcttattaatataagaaggcaggaatgtcaggcctctgagcccaagccaagccatcacatcccctgtgacttccacgtacgtatacgcccagatggcctgaagtaactgaagaatcacaaaagaagtgaatatgccctgccccgccttaactgatgacattccaccacaaaagaagtgtaaatggcctgtccttgctttaagtgatgacattaccttgtgaaagtccttttcctggctcatcctggctcaaaaagcacccccactgagcaccttgcgacccctgcccctgtccaccagagaacaaccccctttgactgtaattttccattaccttcccaaatcctataaaacggccccacccctatctccctctgctgactctcttttcggactcagcccgcctgcacccaggtgaaataaacagccatgttgctcaaaaaaaaaaaaaaaaaaaaaaaaaaaaaaaaaaaaaagaagatggctggattctgcattcaatctgttgccatacattgttttgattgaagtgtataaagaaaaactggctttacacagacatgtagttggaaatgggaggagtattttgatagccttttcagatagttgtggacattctttaataatatcctcatatgactacctcataaagcaaatggtagttgctttaaaggttacggtgacaaatgacaaatggtagtttctttaaaggttagtaaaaatgtggaatctgaaaccacatggatgaatttttcctactctgttacattaaaatctactttacccatgttggattttgtaacattatgtattggtcacttagaaaatactattcacagagtgatgcagatcttccaaatgttgacacttttttttttttttttttttttttgagacatggtcttactcctctcacccaggctggtgcacagtggtgcaatcacggctcactgcagctttgacttcccaggttcaggtgattcycccaccttggcctcccgagtagctgggactatgggtgcacaccaccatgcccagctgatttttttgtatttttatagagacagggcttcgccatgttgcacaggctggtcttgaacatctgggctcaagcaatctgctcaccacagtcttccaaagttcttggattacaggtttgagccaccgtgccagctgataaattttctaatacaatatcaaaaaaataccttcattaacatcaacatcattgtaatcgggaaagtctagctataaggaatcatgtcaagttcacagggacagatacaagttttcagattgctaatctttgtgtgagagcaacaaataccattacttgttttccttgaagtgacaggcttttttttttttttgagaaaatgtctgctaaatacccaaatttgaataattacagcatttcaaataaaaatggtgttttgtgaaaaaagcagctggctcagctcatagctgcaacagttgcacaagtggtttccttgagagaaccactragtgtatttcagtgtgcagcagaagggagaatacaaaagtacctatcctctggccaggtgtggtggctcacacccgtaatcccagcactttgggaggccaaggcaggatgatcacttgagcccaggaatttgagaccagtctgggcaacatggcaaaaccccatttctaccaaaaaacataaaaattagccaggtatggtgatgcacacctgtaatcccagctactctggaggctgaggttggaggatcagttgagccttggaggtggagattgcagtgagctgagattgcaccactacactccagcctaggccaagagccagaacctgtctcaaaaaaaaggtttgcaacattttcatgtaatggaaatttctttatcttgattttggtgttggttacatgactataaatttgtcaaaattcatagaattgtatacccaaaaagggacgaaatttactgtaagttttaccaacaaatctgatcactgccccctacttccctcacaaaatgtcagtgatgttacagcagtatttctgaaataattgatgaaacttttcatatatatattggatttcatatatatgaaatatacatatatttcatatatatataatgtatatatatwtwtwttttttgagacagagtctcactgtgttgcccaggctggagtgcagtggtgcgatcttggctcactgcaacccttgcctctgggttcaagtgattctcctgccgcagcctcccaagtagctgggattacaggcatgtgccacctcgcccagctaaattttgtatttttagtagagacgaggtttcaccatgttggccaggctggtctcgatctcctgacctcaaacgatccacccacctcggcctaccaaaatatagggattacaagtgtgagccactgcacccggcctgatgacacttttctgtaaaagtaacttacagaatcagattttttatacaatgaaatatgctttgtgttagcagtcgtatgccttctagaattttattttgtgtttatatataaaatatggtttttttttcttttttaaagacagagtctcactctgctacctgggctagagtgcagtggtgtgatcacaactcactgtaacctgaactcctgggctcaaatgatccttctgtctcagcctcccaagtagcggggaccataggcacgtgccaacatgcctggctaataaaaaaaawttttttgtagagacatgatctcacaatgttgcccaggctggtcttgtaaagtatcattttatgttaatagcattttatatatttaatatcatttaatttcttctaaccttctgttttctattaccctttcagttggcaaggatataatgtcctcaaagctgctttgaaccctttgtgaggggagactataatatgaacttacagagctgattattgtcgcaataattttatagaatgttccattccattgttttataatagaataagcaatacacacagtgcaacagatttctgtttagatctttatggattcttctttgaactctctgcatgtttactgcatcatccctgagcctgctatggtgcacagtaaagaatgtatctactgaggacatgtttttaaaaattatgcagattttaaaatgtttcctgtcaaactggatgcagcatgagggagatgttagtatggactcttttcccatccgtcaaataatctcgctatggtgggttgagagtgaatctgcagagagtgaaagcatgcgttaagtaaggtgcaagctgacctaagcacagctagcgggaaggacactgacttgtcctaagggaggtccattctttagcctggcgctgatgtgaggtgtaaccagactttctctgccaggggctctgtaactcccagctggtgttggaggagccatcttccattgtgcagctggattatagccagaaagtgctgctggtctctactctgcaaagaagtctgctcttttacactgaagaaaagtctgtaaggcaaattggaacacaaccaaggaaaaggtaagtttcacaagtttgccagtttggcctaaatgctgggccttgttgtagaaggtgctttagggtttcttaggtctcctgtttgccggagacctcctgtttgcaaacccacagcgcctctaagcctggggttcctggtggggccctgtgcctgcttaggatttctcctcccagaggcagacaagaagagtgkgttcttcttgtcgcagagctgtaggagcctgcacacacagccactctgcctctcagggtgccacagtcagcgcagagaagcctcaggggtggcctggtctatctgttccttgtggagccacctcctccacacagccctggtgaggggtcagggttgtggggstcactcgttattcagcacgtgtttaccatgcacccctgtgcactgtggcaggctcagcagtgacatggtaaacacggcagatctgagccctccgttgtggaaatggaaacacagatagaacacttgttgaccactgtgtcagctgctgtggaccaaaatacacaggatgctgtgtgagtttagacacacttttgtccaggtgaagggtcagggaagacatcctgaaggcatgggttccaggttgagagatcattcctcctttgaccagtgatgtggaggaagggcatcgagaagtccaccagccataccagccgtgtgggaaaagacaactggaacacctggggaacctgtaattcatcatcccaccctagcctgtaaagcactcttgtaggactctgcagcgagtttgcgtggggatggggtgaggaggggtaggtagagcagtggagctgacccctcctatgccaaggaggaggtagactggggccaacgtgggggtgggaagcagagggcggcattagtacagatcatgcgttgatgagtctacagtcatggattgtcgattggccgatgggagctggaagagttcccgtcttgtgtctcccaggaaagggcactgtttgcctgcatagaatcaggggcagggcagctgatggtcacggcatgtggggagggcttgaggctggccctgtggagagtgacagcagggactgggaaacatggtgagattggcaggcgttgatgaggccctgcggctggtggtgccgttggggacaggccgtcctggagagtcgggtgaggcggagccagcccctgtggtcgtagtcacygcccgttattctgtgttctgggctttgcggcaacacacaagtttattctcttttctgcatggcagccctccggctgttaaaagacgctctcaaacctcccctttcttctattttcgatgctgaacaccttcttttttctttttctttttcttttttgtttgagacagagttttgctcttcttgcccaggctggagtgcagtggtgcgatcttggctcactgcaacatctgcctcctgggttcaagcgattctcctgcctcagcctcctgagtagctgagattacaggcatgtgccaccacacccggctaattttgtatttttagtagagacagggtttcaccatgttggtcaggctggtctcaaactcccgacctcaggtgatccgcctgccttggcctcccaaagtgctgggattacaggtgtgagccaccacatgcggcctgctgaacaccttcttaatcccatcaacaatctggcctttttatatctgcagtctccctttcggtccctggagaactcagtggaatttatggccctgcagatcttagttctgctgctctctctgccagtatcctactcctctggcattttatcctggttcgtctgtcaatgttttactgcactgtcttggaaggaaggcagagtgtaaagagaggcattgaaaaccaattactttacatgtgggtcctattcccaacaatctctcttaaaacctggcccttggccggacacagtggctcacgcctgtaatcccaacactttgggaggccaaggtgggcgggtcacttgaggtcaggagttcaagaacagcctggccaacatggtgaaacctcctctctactaaaaacacaaaagtttgccaggcagggtagcaggcgcctgtaatcccagctactcaggaggctgaggcaggagaatcgcttgaaccggggagacaaaggttgcagtgagctgagactgcaccaccgcactccagcctgggtgacagagcgagacttcatctcaaaaaaatcgaaaacaaaaaaacaaaaaacaaacctggccctttaacctcttgtgtggagacccaggcagtttctgtaaacctctcctagtgcgtctgtgcagtcaagtctttagggaacattgattgaaagcgtgctctgctccccaggaacgttttaggatgcagaaacaaataaatgtgtccccttctcagaaggagagagattttaytgagccttggggaaatgagggctaacagaataagaggaaatgtttttaacatctgtgtcttaaagacttgctttctgctgtagactattgtgtgcgtctatccctggaagcagtgcttccctcacaactgtttagtgagcggagctaggcatgtacacgtggaggcgtgacagcaagtacggaggcatccaaggagacaaggcctctgccctcaaacacaatgagagagactgtcggtcagcaggaggagagtagaggctgtcagtgctgtaaaggagcgggctaggtgaagcattagggagtgctaggcatggggcaggaagttgcatttggataggatggtcaggaaaggcctctacaagggcagtgatctttgagctgaagcctgggaagagctgctggaagagcattccaggctcagggaacagcatatgccaagacctcaattgggcaagagcttagatgttcaagaagccagaagtgactagggcactggctatggctggagtccaggggagccgtggggaggctgacacgggagtccaggggagccgtggggaggctgccatgggagtccaggggagctgcgaggaggctggcacgggagtccaggggagcctggcatgggagtccaggggagccgtggggaggctgccacgggagtccaggggagccgtggggaggctggcacgggagtccaggggagccacggggaggctgctgcaggagtccaggggagccgcagggaggcaggggagccgcagggaggctgccttgggagtccagggaaaccattgactgagatggagactggagactggggaaggctgggccagaggtcaggacatcaggacctctgctgtggacataaggggtttgacgggcctgtcaggtggctgcgtgggagtcgcagaagagagttctgtggaccggtctggagcccagggaagaagtcttgaccagaggggaaaatgaggtcaccagatacaggtgacactgacaccctgacattggatgaatccacgcagggaatgtctgttcattcagcgctggagctttgcgccaagcctctgccctgctccagtactcctcatcgggggatatctrtgaacaaggcagaacagatctctaatctcagggagctgtgtgcagagtagtgaacagataaacatgtcagagggtgcagagccagagagggaggagcaggagacacaggtgtctctttaataggatgacagggaaggctcctctgaggaggtagcatgggctgattcctgaaacaaagaggcaactagtgcgagaagaccttagagagaggctctggaggcagagggccctgcgcaccgaggatctgagcagccaggctggctgtgtggagcacggtgtggggagccccctcccgtcggctttgtgggccctgcccatggggctctttcagtccagtgctgtggtcagtcacagagggctgtggccaagccagggaggtcactctggctgctgcttggaatatgctggagggggcaggtgtggcagctcagcagggccagcaaggattctgggtgatccgggtaggagaagacaggatggggcggggttggtggtcggactgcttccaaggcagagctggcagatttgctgccacgttggttctgaggtgtgagagggatgagttggagatgattcctaggtctgtggtctatgcagctgggtgagtggacatgcygtggattgacgcagagaatcctggaggcacggggagaaggaggagatggaacagcctgctgtggccccgccatgtcctctccctgcagtggagagctggcgtgggaggcgggtggcgggtgtacctctcggggagctgtgcgctggcagccactggcatgcagacaggagctcgcctagggagatttgggcaggcttgtgttctgaagaggaaasggcatcaggagagaacaggagttggggggtcagaggagtcggaggccatatggagggacatagcagctgctgcgagaccgggggctgaggcagcttcgacgggcctgagtctgtagcatggaggctgtgcasagccctcctcatcagcagggccaagggattggaagggctgaaagaggagttgacggcgagtatggagagcttttaggaggagtgtttttgtagaagagaacaaagaaagacaaataggtggtgcccaggggggaaccatgtggcctggtgggagttttgggagaggggccgtgtggcagcacattggtgtgtgacgcrggtgcctgtggagggaacacagtgctggtggggacagagtgcaggcggtggcctcagttgggccctctcatgggcagcagtgtagggttgaccagaaaccgggacagagactctcttccagagaaagggcagggcactgagcacagggcaggtgcaggcaggtcaggaggcccagaggtagaagacgaggggtcctcttcccgtcgagtccgtgaacctcttcagaccggatgatgtgtgttacatccagaaaacctcagaggccctagccatctgcaaccgtgggtttgctgtcctgtgtatttatgttgcattgtttcatgtgtcagagccctctgcagacctgttactgtgtcccctgtgagtctagtactcagggaagccctccctggcagtagcactttgccctggggaaggagaaggagacgcagcaatctgtaggtgtggcgcccgcatgtgggtaagagccagcagccggttctggaaccccgcgactagcacatctgtttggatggccagtgggtgttagctgttgagatctctggcagggcttctgtggatccttcttctcactcagcttagactttcaggctcccattttgggtgctgtcagctttcagcgtatcagctctgtggcaccatacattatgcacaaaatcataaaacaccattttatagctagaatttgttagccagaacacactccttacatatcaacgtggtctataaagggaattaaaatttttttaggtaatcartgasgtttttggaaatcatctctaccgaaattaagaaattatattaatttgtttatgattttagaatcctgcaatacttagaccttaaaagttggagcttcagtgtcaaattcagaaagcaccagcaagtactgcagaatcgcactgcaagtggatggtggctgagtcgggggcttaggacaatttgtacctggctctagctggttcttcacaacttcactgcctttgaccaacccactcatcagacatttccgttctttttattttttagagacagggtcttgctgtgtcaccaaggctggggtgcagtggtgtgatcacagctcactgcagccttgaacagctgggttcaggcgatcctcctccctcagcctcccgagtaactaggactacaggcacgcaccaccatgcctggctaaattttttaatttgtagagatggtgtctctctaggtcacccaggctgttgtcaaactcctgggctcaagcagtcctccctccttggcctccaaaagtgctgggattacaggtgtgagccaccatgcccagctattcagcagttttagaggcagccmctcccaggaccttgctcagcagggctcctttcccttcctccagggtaagagtccacctggtgttcaggacctcgccttctcatgcccactcagatgcaccaccttgatctgagctctttgagcagctctttgagcctcagatggcgcttccagatgctgatgtgattgttcacacaggtcagcacagtgttatgagacaggctgaggacctcatcttatttattttttattttacccagagcatcaaacacgatgtcttacagaatgtaggaatcactaaatgtttgttaacatgagtgctttagttacataagatgaaccagtcaaaatggaaatgacaagagatttttcagaggtcctacaaatagaaggaaaacatttaaaaattggatcgccaagagaaattgattgacaggaaaggcagaggaagagattatgggctcccttgctggaattcctctggttcgctctatttagaggacatctccaraacaaacccaccaaaggcagtaatcagatacgatgctgttgatagagttgtccataaaagatccacgatgtcaaaacacccttggttcgtcctaacgatcattgtttcaaagctgaatttgatatataatatcctccttggaccctatccaaagggatttagttactgaggtgccagagggacctagtgagattytggtgtgcgaagaaaccccgcaaataactatctgtttgcctatgtgggtgggccctgggggtgscctctagggttgggtgtgctgctgtgtgcagggagtgtgggaacaggcacagcacaagttggccgaggtctggtggggaagcagtggcacggaggcagctctcaactgtgacctgcctgtagcctcgttcaggacaattgagcacttatggggacttagtgtcacaagcattgcttttgtgctgcatgtaagtaatctcattaattcctcacttcagcctttgagatgggagttactctgcctggtttacagaatgggaaacgggtccagaaaagttcaataattgcacgtaccacatacccactaggtgtcagggctggacatcgagcccagggctagctctaaaaccagtgctgtttctgcttttcacaatctgagaagtatttgggagaaggaatcagccaggcatagggctgaactgaaatgcttacatgtgaactctgttagcatcctgagaaataacgagaactcagattgccagtgggagtgtagattgtataatcacgtttaaaaagcttgaagttgtcttctaaacttgaatatgctctcagcaacccagcgattaccccacagcccaccaactgcatcctgagtgtccgtgacagactctgacacctgtgggctaaggggtatgcacagaaatgctcatagcacaattgctcaaaatagctttaaaaaataataattgaaatatccatcaacaagaaaatgaataaatgaattgtggaatacattaagtcctcgtttaatgtcattgataggttcttggaaactgcgacattagcaaaacaacgtataacaaaaccagtgtttttccctcaccaatgttgttgaaggagatggtgttatctgaggacctgctctatgtcatttcgcttacagttgtagtttctaagaacctgtggacgctgagtaggacgtactgtaccattcagcagtagaaatgaattagtgcgacagcttctttttatcaagaaggataaatctgagaaacatagtgttaagtgagaaaaagcaaaagagtacaattagcatcatacattttaataaaaatgaaagataaacaatactaaattatattgtctttagagatacatagatatgtgattaaaccaacaaaaaagtgaggaaatgataaaggcaaaatgcagtccagtggttccatctggggcacaagggggcaggaagtgttaggagcacaggagaacattggttggrtgactgatgatttctttcctaagtttggggatgggttcccaggtgtacctttccttgctaggcttcataactgcatggatatatgtacatatacacagtggtgcactgcataacaacatttcagtcattgacggactgcatgtatgacagtggtcgcagaagattataatggagctgaaaaaattcctatcagctggtgtcttagcgccacacattacgtgttctgtttttagatagacaaacagtcatcattatgttacaggtgcctacagtgttaagtacagtcatatggagtacaggtttgcagtccaggggcaataggctagactaagcttgtccaacccacggcccaacacaaatttgtaaactttcttaaaatgagattttttggccaggcgcagtggctcatgcctgtaatcccagcactttgggaagccaaggcaggtggatcacttgaggtcaggagttcgagaccagcctggccaacatggtaaaaccccatctctactaaaaatacacagttagctgggcatggcggtgcacacctataatcccagctacatgggaggctgaggcaggagaatcacttgaacccaagagggagaggttccattgcattgagcccagattgcgccattgcactgcatcctggacaacaagagcaaaactctgtctcaaaaaaaaaaaaagaggttttttttgtgactattattattattattattatttttagctcatcagctattgttagtgtattttatgtgtggcccaagacaattcttcttcttccaatgtggcccagggaagccaaaagattggacagccctgggctagactatgtgggtgtgtcataggctgtgccatctaggtttgtgtaagtacgctctatgatgttcacacaacgaagacatcgcctaatgacatatttctcaaacatccctgtcactaagtgacctgtgactctatatatagcatattcttttgtttgtgtcagatatttcataatttcagaaagaaaaaatatcaagcttgggggcaggaagggacattggtgcctctgatgggtttagagaaattctgaaaaggcaacaatatagatgggttgctgtgaagctcattcattcaggatgtggactgagcacagcaatcagacgtcagaagcaacagaatcagagcagggaaaggatgagcagacctggattcttcaccttctgcctcagtttcctctcctccaaaacgggagttgtaatacagtcatgtgtcacctaacaactggaatatattctgagaaatgcattgttaggtgacatctttgttgtatgaacagcattgagtgtactgacaagcgtaggtggtaggtacagcctacttccacctgggctaaatggtacagcatattgctcctgggctacagacttgcaccacatgtgactgtactgaatactttaggcagctgtagcacaacggtaagtaattgtatgtctaaacatagaaaaggtaccataaaaatatggtattataatcttatgggaccactgttgtatttgcggtccatcattgactaaaatggtttgttgttgttgtttttgaagcagagtcttgctctgtcacccaggttggagtacagtagtggcactatctcagctcactgcaaactctgcctcccaggttcaagcgattctcctgcctcagcctcccgagtagctgggactacaggcatgcgccaccatgcctggctaatttttgtatttttagtagaggcatggtttcaccatgttggccaggctagtctcaaactcttgacctcagatgatctgccgycttggcctcccaaagtgctgagattgcaggcatgatgcatccagcctgaatacaatgttatgtgatgcgtgactgtatctgccactcatggttgttgtaaggattagacacgagagtgggatcaagtgccaggcacagtgcaggctgtgtgagtactcagtgaatggttccctgtgtgctaatggggcacacacctgtgagggtgtggtcrggcctctgttggtacagggatgacagtgtggtttgacaaaaaacaaacagtagaaagggtgaaaaatcaattattgtcttagccaaaaaattcttgttgtacttaatattaagggttgacaactgcattactttaaatcagtccatgtctgttttttgttctttctttctttcttctaattttagtactgggaaatttggtgcttgttttataccaggactctgtaagcaaagtgatctaaccttgtatgygtcacggcccgggctccggctatggaaggctgatgtccacgggactgttcaagccacgtttatcttaaaagatgcttttgccgggggagtcaagcctttwgaactgcacccgcgtctggaatcccccaacagtggaagttgcagcttacctgagaggcacctggggcttgtttcatgtttctttcaagaaggctgggtgctgagttggaatgaatatagtatctatctcctagacacagtcaaccaggtaagtgaagggackccrccatatcttctgtgtctataggcaagagaatgtatctctataaactgttctactcagggacctcagaatgctaccaggagcagtattgacttacactttactttttcctttgggccagtcaaggaaatcaaatgaaggtttggtaatttttatagatttgaaaaaaaaaatttggttttgacatttaggtccaattttctgccgagaaatgatgtatgttttttgtatgtaaacacaaaattaaacttgttctttttkttgttgttgttgttgttgttgttgttgagaaagagtctcgctctgtcacccaggctggagtgcagtggcatgatctcggcttactgcaacctccacctcccaggttcaagcgattctcctgcctcagcctcctgagtagctgggattacagacgcatgccaccacgcctggctaatttttgtatttttagtagagacagggtttcacaatgttggtcaggctggtcttgaactcctgacctcgtgatctgcccgccttggcctcccaaattgctgggattacaggcgtgagccaccatgcctggtttttttttttgttttttttttttgagatggagtcctagtatgtcacccaggctggagtgcagtgtgcagtggtgcaatctgggctcactgcaacctccacctcccgagttcaagcgattctcctgcctcagcctcccaagtagctgggattacaggtgcgcaccaccacgcctggctaatttttttgtatttttagtagagacagggtttcaccatgttggccaggctggtctcgaactcctgactcaggtgatccgccagcctcggcctcccaaagtgctggggttacaggcgtgaaccgccgcgcccggccgccacttggttttttttttgttttttgttttttattttcagttttctttacttagcaatatatcttgggcaaatttccaacatcattaaaatcatggtaggaaataatttctgcttaaaccaagatgataacagattatcatcagagacagatttagaaactttaaacaaagctgtttagtttcagtttcyccttgtcttaagagcagagcttttgctctttttaaaataaactccctgccttaccctcccgactcctcacccccagactctagaccaggccctgtcctgttcacgttcttccattctgagctcagcgggcctctgacaggcacccctttcttttataagcagagcctcactgtagaaaataaacagttttcagccaggcgcagtggctyatgcctgtaatcccagcactttgggcactttggaaggccgaggtaggtggataacctgaggtcaggagttcaaggccagcctggccaacatggtgaaactccgtctctactaaaaatacaaaaattagccaggcatggtggtgggcgcctgtagtcctggctactcgggaggctgaggcaggagaattgcttgaacctgggaggcggaggttgcaatgagccaagatcacaccactgcactccagcctgggtgacagagcaagacttcatttgaaaaaaagaaaagaaagggttttcttctttggtgtgtgtyagcagaacatgaagttcatcttctcctcattgaagtyttatgaattattatcagccgtacctggtaacactggtttggcagaaagaaaactggcccggggkggggggcagaactagactcgactcttctagcctggttctgcctttaaccaagagtctcttatcggccggagcctggtttgttttcctgtaaaatggggtgggggtrgaagaagcatcgacttaggggaatcaccaaggtgccttgagtttgttcattttataagggatattctgaaaggtatttttgcaccctttcctcagttacagagaacttctttccctggataccttttgaacttatgtgcacttattaattagtagcatcaagatgctttgtaactgtgcattggttctttcatctgagcatttacccgatgctttacccagtaggtataattaacttcattttataggtagagaaatggagacaggggaccgtctgggacagatgtcacagtcaccctcagagactggaccacycagtggcagcatgactggcagctttcggaaacaaatgttatgtttgcagcagtccatcagttatttaaaattagccaaaaacatagactctccttctacaacagactagtctctttatttgcactgtctacagcaaagcaaggacttgctttaagtcagtgtgggctcaggatgtcctgtgttttgttgccacccactttcagataatgctggaggaacctcccctcccttcatgtattcattcaaaacccatgagttgcagtgcgcactggcctctcctgcaggaatgcacacagtagggggactagacgtgtctgcacgttatttcagcccaggagtggggcgtcaagcggaagtttggatgaggtgctgcaagccctgagagccctgggtgttgcagcagagggcaagcttgtcagaggctgcttctcacagaggtggcgtctggagagaactggaacttccccagcaaacatggataggaaaggaatttgagcagaaagagaagcacgtgcattcaccatggaggaacagggctgggactgggctggcagggccggtgcacctgcagcagggacgagggcagggtggtacgtgggtcggagatgaccgaggccccaccatgccaggggacccctcagatcctgcttaccaatctgtgagatgttacctaactttggattgaattggaattttcagaaagttaccatagtaaagtgcagttatcatttgactgatttggactctcacacatgcatttttatgctttgagctgttaccgttgtttagttttgtgttttttgttttttttttttttttttttttgacaggccacarttgctggtttggaaggatccggtgatattgtgtctgtttcgtgcacagaaaatgaaatatttttcttgaaaggagataggaacattataagaatttcaagcaggcctgaaggattaacatcaacaggtttgtatttattataaaatgtaccatgtatatgatgggaagtactatactctgttgtttgtaattgcagttaataattgatcaaacttaccattgggccaggcatggtggctcacgcctgtaatcccagcactttgggaggctgaggtgggtggatcgcttaagctcaggactttaagaccagcctgggcaacatggtaaaaccctgtctctaccaaaaatacaaaaaactagccaggcgtggtggcatgcgcctgtggtctcaagtactcgggaggctgaggtgggaggatcgcttgagcctgggaggcagaggttgctgtaagctaagattgcaccactgcactccagcctggatgacagagtgagacctcatctcaaaaacaaaaccaaaaacttaccattattttgctaaactattgcaactttatttgaacttggaggatttggagggtttcctctgattctttttttttttttttgagatggagtttcgctcttgttgcccaggctagagtgcaatgaggcgatctcagctcaccgcaacctctgcctcccaggttcaagctattctcctgcctcagcctcctgagtagctgggattacaggcatgcgccattatgccaggctaattttgtatttttagtagagacagggtttctccatgttggtcaggcaggtctcaaactcccgacctcaggcgatccgcctgcctccgcctcccaaagtgctgggattaaaggcgtgagccactgtgcccggccgctcctctgattgttaaaatagcatttacagtacatttcttgaaagtcacctactttaaggcttacatcagatagtctcacatttagtggagttgctttcatggttgtggaagatggggagattgagaaaggaggaaggaaaaatcagaaaccactttactgatccctgctctccgtctgagacagtatgtgggattaatgctccaaaagacatagatttgcatagagttttagaatatttaaatctgtcatctgggacataccgtttacccttaactcagttcttccttgtaggatttatttttctctgtgcttttgacattttttggtaattcatacaagcccaaattttaatgagcaaagaatcctaatatgtgtcctcttgcggacatccacatgctttatatatttgggttcctcggggaacttgttcctcatggtggcaacaacagccatgtggaccccatcaccctcctcctcactaccattacctctgatgtcagagagggcaaattggggtgaatattccaaaacataatttgtataagaagtgaataagctctgactcttgagtttatgagctgggggcccctcagacagtgtcatcaaagggttagaatggctttcaggaagggtggtgacttggagccaccaggctaagctctggacctctgctgcccatagagctttctgcagtgatgaagatgctcccatctgccctgtctggtaggcagtccctgtccatgtgtggctgctgagtacttgcaatatagcaagtgcagctgagagatgaattttacattttgtttaatttttattttattttattttattttttgagacagagtcttgctctgtatcccaggctagagtgcagtrgtgcagtctctggtcactgcaacctccacctcctgggttcaaacgattctcctgccttagcctcccgaatagctgggattacaggtgtgcaccaccacaccaggctaatattttgtattttagtagaaagggggtttcaccatgcaccatgttacccaggctggtctcgaactcctgagctcaggcagtcctcccaccttagcctcccaaagtgatgggattacaggcatgagccaccgcgcccagcctaaattttgttcaattttgatcaatttgaatttcaatacttacaagtagctggtggctgcctrttggacagggagctctaggcaagatctgccattaagttatgtaatcttcagcaagtcgcttcacagcagagtcctcccctccagtctccagtgtacacttcattgcctgcagtctgcccctaacacatgccctcaatagaatgtgggtgcttcaagggcaggaattcctgtgtcttatggactgccatgtcccagcagctagccctgtgtctggcacacggaggatccccgataaagagaggatggcgaatggatcaaagtgggctgtggtcttgtgttgagggtactgtagctggaactgctctggccttgtgccctgtggtgtcgtgttgcagraaagatgagtccactgcagtgggaagctcactggcccttgggcttggggacaggagacaggtactcacatgcctgttctcactctgcggtctactggccttgatgctgtgtggtaatggacttctctgtcttgagtttgttctaatggaaaattacctttccctcttccaggaaacttaattacaggtacacatgtatttttcaaatgccctttgagtaatcttaaagtatattcaaggcagagtcttagtatgaagtataactaagctgttttgttatacacaggcatctctcatttgtaaataatttgtaaattgaagcgagaaatgctgtattcttagtatttttttactttttttttttttttttttgagacaggtttcactctgtcgtgcaggctggagtgcagtggcatgatctcagctcactgcaacctccacctcccaggctcaaatgattctcccacctcagcctcccaagtagctgggactatgggcgtgcaccaccacaccctgctaaattttgagactccgtctcaaaaawaaataaataaataaatataaaaagaaagctatggcaaattattttactgattttaatatatgagcttcttgaagaacaaaaactrtttcttagagtcttttgtatgattcttttagttttggtggattttttttttttttttttttgagacggagtctcactgtgttgcccaggctggagtgcagtggcgcaatctcggctcactgcaagctttgcctcccaggttcacaccattctcctgcctcagcctcccaagtagctgggacccccggcgcccgccaccatgcccggctaattttttgtatttttagtagagacggggtttcactgtgttagccaggmtggtctygatctcctgacctygtgatccrcccgccttggsctcccaaagtgctgggattacaggygtgagtcaccgtgcccatcctagttttgctggtttctatgaatttagaatcattcagttctttagctggctggtgcctctgtgacaactggtatttagggctagcaaacgtggataagtgcacatcagctctctcttggatcaccagtggtaaaaccagactcttctttcttagtgagagatggtctggagatgtctggatgctcagagcgtgtccacgtgcagcaagcggagaagctgccagggrccacagtttctgagacgaggctcagaggctcttccatggccagctccgtggccagcgagccaaggagcaggagcagctcgctcaactccaccgacagcggctccgggctcctgccccctgggctccaggccacccctgarctgggcaagggcagccagyccctgtcacagagattcaacgccatcagctcagaggactttgaccaggagcttgtcgtgaagcctatcaaagtgaaaaggaagaagaagaagaagaagacaggtaccctctgtagctggcacacacccatctggggttacagtctttccagattctctgggagtgctgctgctcactgagtgagcaatgctccatacatccaaaagcagagaacacatacatttcttccccaaaggagttttactgcaaaatacttcacattaacggaaaatmcacacacacacacacacacacactgtaaggtctaaatgatgacagaacacctgtgtgtactcaccaccctgcttaaagggtctcagttttgtacttttcaatatttatttatgtatttatattatttatttattttttgcgacagagtttcgctcgtcgcccaggctggagtgcaatggcacgatctcggctcactgcaacctcacctcctgagttcaagcrattctcctgcctcagcctcccgagtatgcatgcccagcgaattttgtatttttagtagatacagggtttctccatgttggtcaggctggtcttgaactcccaaactcaggtgatctgcccgcctcggcctcccaaagtgctgggattacagcgtgagccaccgcgcctggcatagtttttagtatttaaattaaaatgtcggggccgggcgcagtggctcatgcctgtaatcccaacactttgggaggccgaggcaggcggatcacgaggtcaagagattgagaccatcctggccaacatggtgaaaccccgtctctactaaaaacacataaattagctgggcttggtggcatgtgcctgtaatctcagtcactcgggaggctgaggcaggagaatcacttgaacctgggaggcagaggatgcagtgagccgaggtcacgccactgcactccagcctcgcaacagagcaagactccgtctcaaaaaaaaaaaaaaaaaaagtgttggtttatccatgtataccattgattaaatcagagattctgtgagcctgggtggaaagttgtggaaaccagaagatctatgctggtaaatacttgggacattttatgtttagtgttgaatatgctaccaaatatgggatttaacattgaatttttttctttttttttttcaacttttattttaaatacagggggtccatgcgcaggtttgttacatgggtatacagcacccaggtagtgagcacagtatgcagtaggtggcttttgacccatgccgcctcctctcccgctctggaggtccacagtgtctgtccttcccatgtttatgtccatgcgtgctcagtgtttggctcccacttacaagtcagaacatgctgttggttttctgttcctgttgcattaatttgcttaggattacggccagcggttccatccatgttgctgtaaaggacaagatttcattctttatttttatttatttatttatttatttatttattttttaatttattggagacagagtttcactgttgtcacccaggctagagtgcaatggtgcgatctcggctcactgcaacttccgcctcccaagttcaagcaattctcctgcctcagcctcccgagtagctgggattacaggtgcccactaccacgcccagctaagtttttgtatttttagtagaggcaggggtttaccatgttggacaggctggtcttgaactcctgacctaaggtggcccacccgcctcggcctcccaaagtgctaggatggcttatgagcgtgaaccaccgtgcacagcccagatttcattctttgttatggctgtgtaacactgaatttttcaaaccttttactccttggttcctgttaatcctctctagctaagatgactgcaacactgaaggaaatgttattagatttctaagcattttaataattataaggaattggtttgtgacccaggtgaacatctyagtttgtcccctggtttttcttagctgccctcaaacccatggatttgttcagtacttgcatgcatagaaagcatctctttgttgggattatttgtacttaagaggtttattcttcattcaccaaatatcctttatttaaaattttttttcttgagccaaaaatatgtgtgcaagttagtctcttactaatcatatagaaycgtgccttattttgaatgttcttattctgaattagaaggtggaagcaggagcacctgtcacagctccctggaatcgacaccctgctccgaatttcctggggacagtccccagtccttgaacacagacttgctgtcgatgacctcaagtgtcctgggcagtagcgtggatcagttaagtgcagagtctccagaccaggaaagcagcttcaatggtgaagtgaacggtgtcccrcaggaaaatactgaccccgaaacgtttaatgtcctggaggtgtcaggatcaatgcctgattctctggctgaggaagatgacattagaactgaaatgccacactgtcaccatgcacatgggcgggagctgctcaatggagcgagggaagatgtgggaggcagtgatgtcacgggactcggagatgagccgtgtcctgcagatgatggaccaaatagcacacagttacccttccaagaacaggacagctctcctggrgcgcatgatggggaagacatccaacccattggcccccaaagcactttttgtgaagtccccctcctgaactcactcactgtgccttccagcctcagctgggccccaagtgctgaacagtggctgcctgggaccagagctgatgaaggcagccccgtggagcccagccaagagcaggacrtcctaaccagcatggaggcctctggccacctcagcacaaatctctggcatgctgtcactgatgatgacacaggtcagaaagaaatacccatttctgaacgtgtcttggggagtgtgggaggacagctgactccggtctctgccttggcagccagcactcacaagccctggcttgagcagcctccacgggatcagacattgacgtccagcgatgaggaggacatctatgcccaygggcttccttcttcatcctcagagacgagtgtgacagagctcggacctagttgctcccagcaggacctgagccggctgggtgcagaggacgccgggctgctcaagccagatcaggtatgtgggttcgggtggtgggaaaagtagctgaggcttctttcttaagggtaataattgtcaagactgattattttccttctcatggaaagaaattctattcctactgcaaaatccgtaggccaactctgttttcaagtctgggtttcaggggatttccagcacagggactatgaatggcttgaactacttctgacctgttctaccctgctcagtaacctgcctccccaaccaaggtagcgtcttgctgtttcctctgaccccacaagtgcaggctggtgtaggcacttactgttagccatcgtagggcagggctgaattggcctggggccatctcagaaaaccagtgggcagaggactgtccacctgtggagtagagaaagctctgagcagtttggaggcagggagtctcctgtccttctcctcacacccctccaaggaaccatctgcaagagcacgaggccatttccagaactgctgtctcctcaacctccgaacagtggctccaaggctcccctgcgagctgtacaggaaccagtttggagtaaccagtctttgtaggtccacccagcacatgtaactaggagatgacttttaactgtccttgagcattttatattaaaagtgatttttttaaaagtgcctacttcccttagcaagtaattattactagatatatttgtttcaaaactgtgtcttgccctgtctcctactaactgtcgatgtgaggtatgaattatggctgcgcacttacagccacgtgtgctttccacagtctacrctggcttctgtcagtgctagcagtgtgacgctttgtcagtgctcaccatgtgcaggtatcccacaaagcactttagaggtttaactcttttacttctctaaacacgaactataaaataggcactcttcttgtccccattttacagaggagaaaatggaagcacagaacagctagacagcttgcacaaggtcacatagcaaatgaagggcgggccccaggaccccctcactcaccctctgtgctgtcatgcctcagaagtgaaacatgctgcttacttgttttgagacaaaacgccataagtctggcttttttttcttctttctttcttttttttttttttttctgagacagggtctcactctgtcacccaggatggagcrcagtggcgcaatcatggctcattgctgcctcgacctccccaagctcaagtgatccacctgcctcagcttcctgagtcactgggactacaggcatgtgccaccatgcccagctaatttttgtattttttgtagagaaggggttttgccatattgcccaagctggtctcgaactcctgagctcaagcaatctgcctgcctcggcttcccaaagtgctgggattacaggtgtgagctgctgtgcctggccaagggtggccttttattcagtcatccggcatttatcttttcaacccagtggttcttgagtggccttgactgtcagcctctgtgattatgctggggaccacagtgcagatggcagctagttgtggattccatcttcctgagcctcagagtcttgagggggagccaggtacatgttcacatcctcgcagttgagtgggactcaggtgagggtactgagcaaagtacagggctgcaggaagcgcaagcagcatggccccctaatgtctgggcgttagccaggcagactgtcggtggggtggggtattggaattctaggccagaaatttaggaaagccctcacttaggtgacagggatcctggccctttgagcccctgactctctaacttcctcccttcctcatcccactccaggtagctgggaagccaagaaattttatggtgtrtttttatttggaggttcggtgtggaagtaagacttgccatggtgagcagggctggattgagaagagttgggcaccattttctttgaagtagttaacttctatgtgggtatctgtacaaatacatttatcttctttgcatttattgaaaagtattaaagtacaaagactttatttagctttgatttttaaaagaattctagcaaggtcgggcacagtggctcacgcctgtaatcccagcactttgggaggccaaggtgggcgaatcacctgaggtcaggagttcgagaccagcctggccaacatggcgaaaccccgtctctactaaaaatacaaaaaatagccgggtgtggtggcagatgcctgtaatcccaagtactcaggagcctgaggcaggagaattgcgacttgcttgaacccaggaggcggaggttgcagtgagccgagattgtgcccctgtactccagcctgggcgacagagcgagtctctgtctcaaaaaggaaaaaaaaaagaaaatatggtggaaaaaagaaagacagtggtagtgccatatatccagtgcctctgtaatgattagactacaaaaaattgacttgcatccaaatgttgaagaacctggctctttgtgtaaggtgaggtatgcctgcagaataatagcagctccttcgtaacgtgatgtgatgctctaagcgttacatttgcaaaggtgttagaacaggagaaaatgtcatccagggactccagggagtctttgtagggagacagcagcacgcgtctcagaasgtttgtagtagaggggtgtccacagatagcaggggttgggagaagggttgacttggcgtcttgctgacccgttttaccgtctcgtgttaatgatatcctctcacctttcttactgagaacagtaagccaaatgtggctgtgtcctctgccacagaactcactggctcttcccttgttagtttgcagaaagctggatgggctactcgggtcccggctatggcatcctcagcttggtggtctccgagaagtatatctggtgcctggactacaaaggcggcctgttctgcagcgcgttgccgggcgccgggctgcgctggcagaagtttgaagatgctgtccagcaggtggcagtctcgccctcaggttcgcctccccgctccctgctcccgctccctgctcccgctcgccgctcctgctccccgcccccggggtgcagacatcttagtacagggctcccctgcagcagctctgggctcacgctgccgtgcgttcaccaggtttgcctcttcaggaacgtttgaggggttgtctccaaagaacgtgaattgcttcattggatgtcaattcgtagtgtaaatgggtgttcagtttgagtttttgttttctttattaattgcaatggtaagctctgatcgtatttttgtaagctagacaaaaagtttgaaaattgagggacttttttagggatattaatatactaactcttcataaaaataatacgtgtttctctttctcattgttgctttaaagcaaccgaactaacgaagacgggcctatggatatgttrgatatattccaattatttggcttcctctttaggaattctgttttaatgagctctctgctgtgggtgaacagtctactccctgactctaaaaggaaagtccattcattctttcatgctgctsttaggccattgttagtgaactgsagctggtgtttcctgaacgatgttctcctgagctggaagacctcccatatctgcatggaatcatttgcttgctttttctttctttctttcttttttttttttttttgagacagagtcttgctgtgttgcccaggctggagtgcagtggtacaatctcagctcactgcgagctccacctcccaggttcrcactattctcctgcctcagcctccccagtagctgggactacaggcacccgccaccacgcycagctaatttttttgtatttttttagtggacacggggtttcactgtggtagccaggatggtcttgatctcctgacctcatgatccgcccgcctcrgcctcccaaaatgctgggattacaggtgmgagccactacgcccggctttgcttgttttttcttaaggttgtgttggccacgtcggcacctacgccagtggggacacttttgccttgaagcagcctggtttactgtcaggacattggaatagaagtcagacgaagccgaagctgagtctgtggcttgggacctgtctgttctctgtaacttcactgtgtttcgggatgaatttcccttaattctccctggtctctgtcactgtttaaaatattagtttgttcagcgttgtttttcttgcttgctttcactgtttgtttgaaaaatatttttctttagagactggctaacaacccactccacaagctgtcattacacagttgtgtgttttaattcatttctcgttggtatcatttaccttcaggtttgtctccttagccttttagaactttggttctattcctgactatattagttacttgtattcccaggccccttggtccctcactgtgctagcgggaactctgtatctccatgagattcacctgctcagttgaggcgtccttcagggcccagtcccatgtccttggtgggcagcagagcccttgtgccgggggcaccacaggcagagatgctcgacaggccctctagtccagcccagctgacactcggtgatcactggtggccccttgccttgcctgcgtcggcctgctccaggcctccagctgcagcgctatcctgccttccctttcctctctcctcctccatctcttcatcaaagtcctcttcacagtgaaaacaggccaactcagtgcaagtgtgttccttctgtgcaccttttccattcagctcatccagaactgatccttctctttgaatccctaaaggactttttcagcctctcctagggcactagttgtgcttaggatgtttatttggagacttatcaaacctaataatgtcatcagtgtttctcctcccgtgtgaggagcgcctgtcatgtgcccagctctgtggccatgtggttgatctgcttccgtctgcagtctttagagcagccctgtaaggtggagatgatccccacggcccaggaggaaagtgaagcttggagacgggcggtgacatggagcctgaagctgcatagccactgggtggtggccaagggcccaaacctgggtctggtggcctctttccccacttggggggacagaacaggatgtgttttagaaatctttctcccctcaatgcccagcatgaagacttttgtatagaaatatattctagtatttattggacagtgaatagaatttttatttccataggagcccttctctggaagattgaacagaaatctaaccgggcttttgcttgtgggaaagtcaccatcaaggggaagcggcactggtacgaagccctgccccaggcagtgtttgtggccctgagcgatgacacggcctggatcatcaggaccagtggggacctatacttgcagacaggtaaccgcgggccacgcttagaggcctgccagctctgccgtcactgcctctgctgcaccctgctttgctagtaacatgcttaccacaatcrctatgattaagaggctaaatccattcgaattaagacacttctgggaagagagtatttgccatttggcatgtattagcagtttcctgcattgacacaaactcaacccaggacaaatttagggcaaaaatgaataggattatttggtgagatacagaaacagaatcttattctcctatggccaaccaccgcatatcacgtatcctacaatgttagatcttaagaggtaagaatacagaggaaggacataaaattcatttccccctttaagctaaagtttaagtggctgcattttttttttcagccatatcaaagcccggctcctatatacttacttacccgtgggccaggaaaaaaaaagaaataatttgctcttttttattttgagacggagtctcgctctcttgcccaggctggcatgcagtggtgccatcttgactcactgcaacctctgcctcctgggttcaagtgatcctcctgcctcagcttcctgatcacaggctgggattacaggtgcccatcaccacgcccagccaatttttttgtatttttagtagagatggagtttcactatgtcggccaggctggtcttgaacttctgacctcaagtgatctgccygcctcagcctcccaaagtgctgggattacaggtgtgagccaccacaccaggccataatttgctctaaatagcagttcaggccaggtgtggtggctcatgcctgtaatcccaacactttgggaggcctagacgagcagatcacctgaggtcaggagttcaagaccaacctggccaacatggtgaaactctgtctctactaaaaaaaaaaaaaaaaatacaaaaaattagctgggcgtggtggcgcttgcctgtaatcccagctacttgggagcctgaggcacaagaatcacttgaacctgggaggcagagcttgcagtgagctgagatcgcgccactgcactctccagcctggtgacagggcgagactccgtctcaaaacaaaacaaaacaaaaatagcagttcagcaagtcacaggaagctgccctcagggaagtttttagctgatggaagggcacagtgggacttgcttattaaaaataagctgtaatgacagtcagtgtttactgtcagcagaatggggaaggatcttccaccagcaatgtgatttatcagtatctggaaggactgtggggcaggagttatcgtcagttgtccagaggccacgttggatttatgtaaagatcagtcttccaggcgtttaatgttgttgattccaggagaatgttgttgttgttgttttgagacggaatctcgctctgttgcccaggctggagtgtagtggcacaatctcggctcactgcaacctccacttcctgggttcaagcgattctcctacctcagcctcccgagtagctgggactacaggcacatgccaccatgtccagctcacttttgtatttttagtagaggcagggtttcactatgttggccagtctggtcttgaactcctgaccttgtgatccgcccgcctcagcctcccaaaatgctggcattataggcgtgagccaccggcctcaggagcatgttttaatcactgctgtgagtcgtcagctggggatgartcttcaggttgaagctcttgcacagctggctctctcctagctgtgtaagaacctctggcctgggtgcacagccatgctggcttcataggccatatgctggcccaggtctctccagcctagttcctgtgtctttctttaaatgaaagtagctctgtcaaggcacatgcacatctaagctgccaggacatttgagctttggtcatggggaagacaggaggtgcttctggcctgggggtgaggagcgagtgacctctaaaccagtagtgccagaggaatcaccaggacagtgatttcacatgaggtggccccacccagacctgttggattaggtccaatccctctggagactgctcaggagtgtgtcgtgtaagaagtcctgccggtgattcccacctagtttagtggaaggaaatatcacccaaggactgcaatactataggtgcgtctgtgattagtcacggagcatatttgagtactgagacctaattgcaggcctaaggtcaaggaatacagggttgtaggcgacagttggtctgtctgctcccctgggaatagcctttgagctcatttagacatactttattgacagracacaaggaggcaaggggagagccctggacagggagccagggaccctgagctttggcctgccactgccttgcagtttgacagacctcagatttcatctgggaaattcggggtttcattttattagtggaacctcgcacccagtcagagcagagaggagccgccgtgctggagctctctgcaggaacgactgcaggcctcaggtccctgccaactccagcagcgctgcagccctctgcctggaagagctgctctgccctgcagcctttgggcctccatctggccactctcctgctcttggcttttgtgttcttctcttagaacttcttaagctacattgggacaccagataattctgaattgttcagttttcaaagagtgtctaaaactgttttcagatagatgttacatttaggcagaatttaaccactttatgttgattaaacttgacaacaaaaaagcggccggacagggcagctcctgcctgtaatcccagcactttgggaggctgaggtgggaggatctcttgagcccaggagtttgagatcagcctgggcaacgtagaaaggccccgtctatatttttaattaattaattaattaaagtttttttttaaagcactcatcataaaagaatayagcaaaataccaaaaaaggaaaaataagccaataaccaagtcaaaatgaggtgtggagttctgactgtgtgtctttggggcttcttcccatcttcctggcaggtctgagygtggatcgcccttgtgccagagccgtaaaggtggactgtccctacccgctgtcccagatcacagcccggaacaatgtggtgtgggcgctgacagagcagagggccctcctgtaccgggagggcgtgagcagcttctgtccggaaggcgagcagtggaagtgtgacattgtcaggtactggcgggccagagactcctttcacatcgtgcttgtcctacycttcgttcttgtccacttgacaccacaaggcaccatgaggccgttcctgggaggcagcacctgcagcctccatggctataggctaagcttgaatctctgcctaattctgaccggcaaactggacgttgagtcagagctcgctttttaaaaatgctgccgccctctgcgcagccctgagcatcacagcgtcatgagtctgtcatgacggtctctrttcagaattgcccaccgtcaggtagttctggtttagtgtctgtgacggcttaggtccaaatatttttctttattttcatgctaatcgaagttgatctctgaactgtagcttttttttttttttttgatacaggttctcactctgtcacccaggctggggtgcagtgccacgatcacggctcactgcagccttgacctccgggctcaggtgatcctcctgcctcagcctcctgagtagctgggactacagatgcatgccaccatgcccagctaatttttgtattttttgtagagatgagttttgggttttcatcatgttgcccagactcatctcgaactcttgggctcaagcaattctcctgccttggcctcccaaagtgctgggattacagacatgagccactatgcctggcccgatctctgaactgtaatttattaagctatttttttttttaccattcaagatgttagttatagaattgccatcagatcattttactagtatggaagtattaatagtcctttgaaaaactagattaggatattcttggtttgaatttagcaagccaataaactttcagtgaatacctattaagagccagaatggtccaggtgtggtggctcacgcctgtaatcccaacactttggaaggccaaggcaggcggatcacgaggtcaagagttcgagaccagactgaccaacatagtgaaatcccgtctctattaaaaatacaaaaattaaccgggcatctcaggaggctgaggcaggagaatcacttgaacctgggaggcggaagttgcagagagcygagatcgcaccattgcactccagcctgggtgacagagcaagactccatctcaaaaaacagacagacaaaaaaaagcaacaacaacaaaaagccagaatggtgctaggggctgggtgcgccaagagggctgagactggccctgctctcatcagttccaagtctcatgggggccccgtgcatggatggacacccattagcacagatggccctaaacaggagtgtggagcatgcagcactgagggaaccatggactccatgcagagatcaggaaggcagcrtgcagagtggaccaacagctaagccttgaagctgacgaggacttccccatatggaaggagggggagggcgtctccagcaaagagggcagtgtctgcctaggtccagctgcacagaatagcctggcacatcgggggagtttacagtcattcccttggtgagggagggagtagagagatggaggcgctcaggggccttggattggcgggggaaggagtagagagatggaggcactcaggggccttggattggcgggggaaggagtagagagatggaggcactcaggggccttggattggtaggggaaggagtagagagatggaggcgctcaggggccttggattccttttgtgcctactcgcttttttcttaggttattttctctcttaagagtgttcccrgccatyctgggtcatcagtgtgtctttcaaaagctgccacccacttgaaccatatctcttgcacagtaatttaactcagasycaaacttccttccctggcacctgctgatccgctccagggccacgtctcttctcccagccacgcctgccgggagaccctggatgtccgcagtccagacacactgggcactctgcctatgggtgctgacccccctgttctcctccttattttcagcgaaaggmaagctttagaacccgtctgcataacgctcggggatcagcagactctctgggccctggacatccatgggaacctgtggttcagaactggcattatttccaagaagccccaaggagatgacgaccattggtggcaagtaggtgttcagctctgcgccacgtgccgaggtctcccgaccttttctgcttccccttttcttacttctctcttttccttaacgatactagattaaatttaaaatactcacttttttattatttgtttgtttgttttgaaacaagatctccttccgtcatccaggcggaagggcagtggtgcagtcacggctcactgcagtcttgacttcctgggctcaggtgattctcccacctcagcctcccaggtagctgggactacaggcgtgtgccaccatgcctggctagttttttgtatttgtttgtagagacagggttttggcatgttgtgcaggctggtctcaaactcctgagctcaagagatccacccagactgggcagagtggctcacacctgtaatcccagcaatttgagaggccaaggcaggcagatcactcgagtccaggagttcaaagccagcctgggcaacatggtgaaaccctgtctctaccaaaaatacaaaaattagttggacatggtggcacacgccgttggtcccaactactcggaaggctgaggtgggagaatagtttgagcccaggagacaaaggtttcagccaagatcacaccaccacactccaacctgggcaacagagctagaccctgtctcaaaataaataaaaataaaaaagagagagagagagaaatccaccctctccgcctcccaaagtgctgggattacaagtggagccaccactcccagccaatagtattccttttttctatttgatggattagactttgctgtgtttgagtgcattagaaacataaaggacttttcatcataggaaataatttgcaaactctttgtgtaaataatgcacttaatttatttattttgatattgtttatatatttattattataggctaaataaacccagtgacatccatttgaagacctaggtaataatgatgtttaattatgaacaaatgtgctgagaaaagagcccagataataggtttgaaagcccaacccagaattaaaattgagctgtctctgcttattcagaaggcctctaagtagatggtatttcagcaaagacaggagaattttcccacgtgcttccagaaaaggaaacactataagaaacaggatgagggtataatcaagctcactgtgtgtgatttggtcccagcaagagcgcctagaatgaatttctcttttctttttcttttctttttttctggggcagagtctcactcttttgcccacactggagtgtggtggcaggatcacgacccacctcagcctcccaagtagctgggaccacaggcacatgccaccatgcctggctaattattttggtagagacaaggtcttgctgttacccaggctggtctcgaactccttggctcaagcaatcctcccaccttgacctcccaaagcgctgggattacaggtgtgaaccaccaccctcggccctagaatggattttcaaaggagtgtctactttccccttctttggtatagtttagtgttagtgttgctcccacagtctcccactgtggtaggtaagatttcactgatagtcgatggtcgtgaaatatttgatgtttcttttttttgagacggagtcttgctctgtcacccagtctggagtacaatggcgcaatctcggctcactgcaacctccgcctcctgggttcaagcgattctcctgcctcagcctcctgggtagctgggactacaggcacgcaccaccaggcccagctaatttgtgtatttttggtagagacagggtttcaccatgttggccaggttggtctcaatgtcttgaccttgtgatctgcctgcctcagcctcccaaagtgctgggattataggcgtgaaccaccgcgcccggccagtatttgatgtttctgaagtatcttgccccattggtttatgttttattgtcacctcagacttgctttgttgaaggcttgtcttgcattgactgctctgaggtctttcagatgagaatgtagaaaaatgagttgtgtttactctttgataaaatatgtattctatataatatgtacattatatacagatgtatctaatttatatactaggtaatatttgatagtcatgcaaatgattttaaaataccttttgtgtacttgtaaccatatatatacatatacatgtaaaaatatacatatatgtatttttgtagagacagggtttcaccatgttggcaggctggtctggaactcctgacctcaagtaatccacctgccttggcctcccaaagtgctgggattacaggcgtgagccactgtgcccgaccaggagtagggcatttatgccagtgatgttttatgtaatcaaacccagcagggcagaaatgtgagtgaacatcatggagaatcagattttcactcataaagaatttgccttatatcaagctgcccaagaagagaagagcttcctgcagggaggggtggttggagaaatgtctgaggtatatgaatgcttttcaggaatgttatagaagcaagctacccttctgagctagggttagagtctagatacccaggatggtcctagttgatgctcttgccctggagtaattattagtagtcccaattcagatcataaattagttcatcacagccttgcatggtggctcacacctgtaatcccagcactttgggaggcctgggcgggcggatcacctgaggtcaggagttcaagaccagcctggccaacatggtgaaaccccatctttactaaaaatataaaaaattagccggctgttgtggcgtgcgcctgtagtcccagctactcgggaggctgaggcacgagaatctcttgaacccaggaggcagaggttgcggtgagccaaaattgcaccactgcactccagcctgggtggcagggcaagactatgtctcaaaaaaaaaaaagttcatcactctacttgtgatacctttttagatgcatattatgtttctaagtaccgtatactgttgtccattggaaatacctgatttaaaagcaaaattaaagctgggcatagtgkttcatgccagtaatcccaacactttgggaggccaaggcagggagatcacttgagcccagaagttcaagaccagccctgggcaacacagggagacctgtctctacaaaaaatttaaaaattggctacatgtagtagcattcgcctgtatttgggaggctgaggtgggaggattgcttgatcctggaagtcaaggctgagtatgattgtgccactgcattccagcctggatgccagagcaagactgtctcagaaaagatggcaaaattattctttctcactctgattagaatgaaagtcttcttagaaggggtgtgagggggtgataatcacaaaagtaatacatgcttgtaacagatccatgttgtataaaagtatataaaatgtgaatatattcttccatacctttaaatccaaccctacgaaggagctggagttagcattagcagtttgatggcatcctgccacatttttttggtcctttcacaagcgcacacgtgcacatttgtgtttggatggtcatcttgttactagaaatgcagaggtgtggacctgagctagaaccttccctcaagrcagagagtctacacttgtaactgctctgacagcagggcttttgcttgtctcctccttccaggtgagcatcacggactatgtggtgtttgaccagtgcagcttatttcagacgataatccatgccactcactcggtggccacagcagcccaagcccccgtagaaaaggtggcagataagctgcgcatggcgttttggtcccagcagcttcagtgccagccaagccttctcggggtcaataacagcggtgtctggatctcctcgggcaagaatgaattccacgtcgctaagggaagtctcataggtgggtgaattgctgtaattttcacactggctttataggcagcctcactttaaagccaacatttaaagaaaagctttaagatctcaacttgaaaagataatttagtgccagyggtatgaagtgtctagtggaggcactctatgctttgtgatcagtttctctcctttttaaaaaatctgtcattcctaaaactcgtatccctgtgtctggatagtgtttcccctggaaaccttttatgacataagaaaagcaaatggaggtcatttttatgttaacaatttcacattttaaatgaaaaaatccacccaaacctagtgagagagaatggtccacttcctggagggaaggtgatcgccactgttggaaatgcaaggctctggccaggtctgtgaatgtagatgccagtctacacatcctggggtttgtttctgtgagtgaaccccttgcttttctccagccctctccctgctgcatggcctccacgaccctggactgggtgtggctctgcctggcagtattcagagggagatgaatgttaggctgtgattgctcatgtcgctttatttagggacacyctagaattatctggagaaagggtttgaaggccagctgtcgtccagaactaagatctgaagtggttttgtctatgctttctttctttaacacattcttcctatttactctttccaggcacctactggaatcatgtggttccccgtgggacagcttctgctacaaaatgggcctttgtgttggcttctgcagctcccacgaaggaaggtgggtcagtcttagcctcactgaagaatctagagcacagcttggccattggaaaggttcaaaccacagtcggactgtggccttgttggttatggggcatgcctcggagactgaccacgtgagggtgtcagaggccagtagcccttgttagctgagccgagggccctgaatcgggataggcctgaccaggagagcctctgagagggaccgagcgtggtgaagatgagggaaagtgtccttctgaaggaggggctcacacagtgcagccaccggggctggcagctggtgacttccagtggcacatggcaggggccacagcttctttgggcaccttcccatctcccctcgagaatccttctgtcacctcccagcaacttccttccgtcttgttcacagcctccggataacctaagtccgacatttgcaccgcattaggcagacctgccctgcagcggggtgctcctgccaaccacattctgggcagaactcagtgtccctgcggagtacagggtttgtgagggagccagggcaccagagggtgagggagctggcatctgcggccgggaggggcacttcccccacccgcttagctgggagccccggcagtcaggcgacctctctgggaagtagctgtacctcctcccaggattgcctgaggatgaaatgcaaagatgctgtgaaatctgtggtgaagagggaatcgtttgcttagttcaaaccattagtcccactaggatgcaggtgactgggtcagtacaataacttcttactcaccagattgttcggaccacagttctggaacccagaaatctctgaaaacaatgttatttcttgagtctggcataaattaatttggcagcaaaacctgaccggatctcacatagctgcctccagccttggttgatctgttggctgtgaccgcatccatgttgcagggatgttaccgcacttcaccggggagcgcctggcccctccgtggttgttttgtaaacctctggcatacccattagcttaggttttcaaaaatccagaaaaagtttgaattccaaaacgtggccacaagttgtagataatacttcatataacgtactgtgaccaagattttaactgccctaaggattatttgcattttaaacagaatctgttaaacctaaaggacttttttaaaatgctgtagggaatgaaaggacatgattttgaggcaagggtgggaagagaagcacttccagcttcctaagccttctccagcagctgccccaccccccggccccatccccagaaggtccgggagagcaccatggcgccatccttcctaggaactgccaaccctccctccctccagggcaccgagttgatagtcttctcctcttggtaaaattaactttctacattaaaaatgctttggtgcctttgttcaagtgaaaaacttctcagcccatgaaaaatgggaggtcaaagccactaagccaacattatggccttcataaaatctcctaagccttgccttctttccatttctttccaacatctcaggcgtgtttcttgttagtcacggtgtttccctctgccttctaccttaaagtgctacaccgctcctgcccgtgtgggaatgggcaggtgagtgagctggcatctgtggccaggtggctagcgtctgctgaaaggcaaaggctgccttgtgcatttagggcaggcggctyggtgcagacaacacctcgatgacaaacatgacccctttctgcaggaagcttcctgtggctgtgccagagcagcaaggacctgtgcagcgtcagcgcccagagcgcacagtcgcgrccctccacggtgcagctgcctcccgaagccgagatgcgcgcctatgccgcctgccaggatgcgctgtgggcgctggacagcctcggccaggtgttcatcaggacgctctccaagagctgccccacgggcatgcactggaccaggctggacctctcccagctaggtacggccacctcgtgagtacacctgccggtgccctgactgccctaaaccggcatcacaacgtgatgtcggacaaaactgccyggcctgtgtccaacctgtgagagttctgagggggtgtttataagctgctgaatttcaggagctcagttggccactctttcagactagacaggctctgggttttgtcccttcccctgccccttagagtttgcagggctgtcagaacccgaggagggtgtgcgtcctcaggtcaaggggccactcgctgcgagcggcttgaaggatactggtgatgcagctgccccgtcagtctttctgaatatggaacatagctttatgacctgaaaagctgaaaagatgggtgttccctatgacaggatcagtgccacgtttgtctatctcctcaggacagtacctggcggaggagagtggctcagcacacaggtgctagctctccttcagctcagccagatataggaggacctgcatccactagctcctgcttttctctgaatcttctatcaaaagccgtggagtaggctaagaaatgtagtgctatttgtaggccgggcgcagtggctcacacttgtcatcccagcactttaggaggctgaggtgggtggatcacctgagatcaagagttcgagaccagcctggccaacatggtgacaccctgtctctactaaaaatacaaaaaaaaattaggtgggcgtggcagtgcacgcctgtagtctcagctactcaggaggctgaggcaggagaattgcttgaacccgggaggcgggggttgcagtgagccgagatcatgccattgcactccagcccaggcaacagagcgagattctgtttcaaaaaaaaaaaaagaagaagaaagaaagaaatgtagtgctgctatttgtaaataattcattcatgttccaagaaataataacataagcccacaacattagatttctctctgagtagattcttggtggatcaggcagcataggtgtggtttgcctgaaggtggagttgtgcagatggcccccagggcccggatgagccctgcacttgcagcaggactgacttaggaacttcctggctgcaaggcttcccagtttttttaacttagaaccagcatttggttatgtggtagacttgaattgtataagcatttaatgtttgaaaactcaatcacatgtactcaccaaaaaaaaaaaaaaaaaaaggatggggagaaagaaagcaagaagagggctgggcacagtggctaatgcctataatcccagcactttgggaggccaaggagggcggatcacctgaggtcaggagttcaagaccarcctggccaacatggtgaaaccccgtctttactaaaaatacaaaaattacctgggtgtggtggcacatgcctgtaatcccagctacttggttgggaggctgaggcacgagaatcacttgaacttggtaggcagaggttgcagtgagctgagatccatgccattgcactccagcctgggtgacagagcaagactctgtctcaaaagaaaaaaaaaaaaaagaaagcaggaagagaagggcttgttccccttctccccaagcccctggctgcattgcagtctgtatgctaccagctgatgagagcctcttgccattccgtaaagcaagcatcgtcctaggctgcctggcagtggttggcgtgctcagccccgggggctcctacagggtgctgagtagacatcacccattcttttgcctgaaaaggcccctgaacactaactcagctgaagaagcaagttctgttccaaggcttggggactgaaggtttgtccagggcaacttttgttctttatgctttgggcctccccacctgccttttggacccaccagtcaccatctagctttttgagaacacccgcctctccacatcactgacagtgactgatagacaaggctgaggctgagagtggcctgaacattggtgctgactgacctgccgcctgccctggaaagcctttcatttgttcagagaccctactggtcctgagccattctccagcagctcctacccagactaactggaaaatgccgctagttccctctgagggtaaaaagtccagggcttggtgtgtattctccctgctcctgaatcttgagcactgtgggaggctgtgttcacctgcaccatttgggtgagaagcagaactgcttcccttgcacgtccccttcccagcccctccaggaaggctgctgcaccgtggtgggattcagagtgaatgggcatcatgccaggttctgcactgctggagccagccctgcctgggcctcctgcctccagcacagctcatgcctccctcctggctcgatccagtcctcccagcaccggctagctggccaaagtggtgcaggtctctaaggtgtgtatttgggcttcactgggaggtttctctcggggagaaacctggcttgagtgggattgagtctcaagagtgtgagggmaacaggaacaagtccatcctgagtccaagatggccttgggccatctggtgttcagcagatactcattgaggggttgggtgtgtgaacagagggatggcctggggatcctggtcgctgtggatgggcaggttttcactgacctcctgtgttccgcctgcaaaatcattagcaaatcaatgtcagtatccggctgaccccgaaatgaatcagacagcagtgggtgcaaggaggtcacaggcagaggtgtggggactcatggcagaggcaggacagagctgggccccaggcgggctctggactctgggcaagctgctgtcaccttgaaccgcaatttcctctcctttcttttttttccaggtggggtctcactctgtcatccaggctagagtgcagtggcacgatcttggctcactgcaacctctgccttcccaggcttaagcaatcctcgcacctcagcctcccaagtagctgggaccacagacatgtgccaccatgcccacctaatttttttgttttttgagacggagtttcgctctgtcgcccaggctggagtgcagtggcacgatctcggctcactgcagcctctgcctcccaggttcaagcaattctccctgtctcaacctcccgagtagctgagattacaggcacccaccaccacacctggctaattttttgtatttttagtagagacagggtttcgccatgttggccagtctggtcctgaactcctgacctcaggtggtccgcctgcctccgcctcccaaagtgctgggattacaggcgtgagccaccacgtacagtccctgctaacttttgtattttgggtagagatggggttttatcatgttggccaggctagtcttgaactcctgacctcaaatgatccacctgccttgtcctcccaacgtgctgggattacaagtgtgagccaccatgcccggccttggtttcctctcctttctaatgggagcagcaacccccaagcccaaccccctggaggatgcacggggcatcccgtctaaatgttggccatctccgggcggtgtggtcatcctaaggctgtgacacgtcttgcttgggggtgctctctagtctttgttagctgctggtggtggggcttttgcttgtgttgccccagtttgtgccacagggaggacaaatccagcatctcttgttaaagcaccacctcgcttagtccttatcctgccctgaactttagattttgtttatttgagttatctggttgatcttgaaatgtcagattaagactcctttcctgtttcctacacatcctgagagaatgcagcaagtccagggttggcagctttgtgttggggcaagggaggtgaacaggcaaccgggactcccaggctgttcctctgcacacgcacctatcccctcaacgagtatctgctgaacactggagggctcgaggccatcttggactcagggtggacttgttcctgtttccctctcgctctttttttttttttttttgagacagagtctcgctctgttgcccaggctggagtgcagtggcgcaatctcggctccctgcaagctctgcctcctgggttcacgtcattctcctgcctcagcctcccgagtagctgggactacaggctcccaacaccacgcctggctaattttttgtatttttagtagagatggggtttcaccgtgttagccaggatggtcttgatctcctgacctcgtgatctgctcgcctcagcctcccaaagtgctgggattacaggtgtgagctaccgcacccagcctccctgtcactcttaagttgagactcaatctcactgaagctgagtttctcccctagaaagaacagccacctccccagccttcactatgccagggtaggggcagtgagcatcaggccaggggcaccaggtgttcagttattaggctctctccaggtatggtctgtgtcctgcaggaaaagcaggtaggtcaagagacttctctttttgtttgtttgagacagagtcttactctgttgcctaggctggagtgcagtgacacaatcttggctgactgcgacctccgcctcctgggttcaagtgattctcctgcctcagcctcccgagtagctgggatgacaggcatccacagccatgcccggctaatgtttgtgtttttagtagagacggggtttcaccatgttggccaagctggtctcgagctcctgacctcaactgatgcacccgtcttggcctcccaaagtgctgggattacaggtgtgagccactgcgcctgacccaagagaccttttaataattacttatttaagtgaaaattttgaatgcaggtgtgctgtctgcccaggagcccgtgtatgactgtgcatggyggctgtcatcaggtggcatgcattgaatggggattattgactgtaaaggagagtcatcaagctgacatggctgctgcctgtgttacttatctggaattaattggggtgcttcatttattttttacaagtcagcagtgggccgggtgcagtggcttacacctgtaatcctagcactttgggaggactgcttgaggccaggaatttaaaaccaacctggccaacatagcaagaccccatctctaaaaatatttgttaaagtcaacagtagggggtgcacacagcaatgaatggaaacacagtgactgcatttgaggatgttgttcaatatcaaatttagcctcccccaattgtgctcttcttcctaacttcgctcctctgctcccactaaattccctttttttttttttttttttttgagatagtgtctcaccatgttgcccaggctggagtgcaatggtctgatttttgactcactgcaacctccgtctcctaggttcaagcgattctcctgcctcagtctcccaagtagctgggattacaggcctgtgccaccccgcccagctaatttttgtatgtttagtagagacggtgtttcactgtgttggccaggctggtctctaactcctgacctcaggtgatccacccgcctcagcctcccaaagtgctgggattataggtgtgagccactgagccctgctgctcccagtaaattctgctggaaagaccagagtgctcttttggccagtcgctcagcagtgtcctggccatctacccgaggatctccctgcttctggacctctgcttccctcccaccactgtcagggtggagccccctcgtcaccaagttgctgtactgcagtagctgcctcctggcaccaggtgtgcccacctcccaccacggctaccagagctgtcttcctcaaacccagctcagatggtgttgccctccacgttacatggctccacgctgccactagaatayagctccagtctttggtgtggcacccagggtctcgcagccagacccggcctgctgttccgaggcctcgtgcgttggggactccagccactcctggcctttgtgttggggccctggctaactttcatattttgggtagagatggggtttcaccatgttggccaggctggtcttgaactcctgcccttccctaatgtgtggtgcatgttcatgccacccatttgcttctcttcctggggcctagcattccttccgtgggctgctttccttcaactcttcttccttcaggactcagttgagatcgcacctccccaccagacattcttcattgactgtccccatcatagcactgtgcttctacctgtcatttcagagccaagcacggtggcgcacacctgttgtcctagctacttgggaggctgaggcaggaggattgcttgagcctgggaagctgagcctaatctaggcaacagagcaagctcctgtttcttaaaaaaaaaaaaaatacacacaatatatatatatatatatatatgtaattttagtttgactcacattatttttgttgaaagtttacacacggagtgtgtagggactttacaggcagagaccaattgcttggtgacagtacgtacccaacaggatttttgttttaatttgggatggggtctcactatgttgcctaggctggtctcaaactcctgggctccagtgatgctcccacatcagcctcccaaagtgcggggattacaactgcatgcagctgcaccagcaggatttaaaatgtcagggaaagtcagtactgtttgcagctccatttctgagtaactctgggatgtgagttttgatcctatatttggccatgttactggtagtcaaagataaaactgccttccatgcaagtacaggatgtcatcacacacagtagcctggtggatgatgtgactcccaccctcccaggaaaattctcatctcttgctctaagttgccatcagccttcccagggcatgaggcagaagatgttaggttataaaaacttgtcggccaggcatggtggctcacacctgtaatcccagcactttgagaggccaaggtgcgtagatcacgagatcaagactatcctggccaacatggtgaaaccccgtctctactaaaaatacaaaaattagctgggcatggtggcttgcctgtagtcccagttactctggaggctgaggcaagggaatcgcttgaacccgggaggtggaggttacaaagatcatgccattgtactccagcctgggaacagagcgagactccgtctcaaaaaagcaaaccaaaaaatcttgttagagatacatttacatgtgttctcccttcagccctggtgttttctttacaagtgtcttcctggttgtatgagtagcaagcagccttggacagcatgacctctgctccctcggggacagtgttgaccttgggcagcactaactcattgttaggtcaggaccatcatcagtcttctctaaaaggcaagcagaaattttaatttcagactgggtgtggtggctcacgcttgtaatcctagcactttgggaggttgaggcaggaggatcacttaaggccaggagtttgagaccagcctgaccaacatagcaaaaccctgtctctacttaaaatacaaaaattagctgggtgtggtggtgggcgctgtagtctcagctactcaggaggctgaggcacaagaatcgcttgaacccgagaggcagaggctccagtgagccaagattatgccactgctgagccaagatggtgccactgcactccagcctgggcgacagaatgagactctgtctcaaaaaatactactaataataatcaattaattaaaaaacaaggccaggtacagtggctcatgcctgtaatctcagcacgttgggaggccaaggcaggcagatcacctaaggtcgggagtttgagactagcctggccaacatggtgaagccccgtctctactaacaatacaaaaattagccaggtgtggtggcacatgtctgtaatcccagctacttgggagcctgaggcacaagaatcccttgaacctgggaggcagaggttgtagtgagccgagatcacgccactacactccagcctgggtgacagagcaagactctgtctcaaaaaaaaaaaattaaattttaatttcaaggatgaggatgactttagcgaagtatcaaataatgaacatgatttctacctttaatttttttttttttttgagacggagtctcgctctgtcgcccaggctggagtgcagtggcacgatctccgctcactgcaagctccacctcccagcttcacgccatcctcctgcctcagcctcctgagtagctgggactacaggcacccactgccatgcccagctaatttttttgtatttttagtagagatggggcttcaccgtgttagccaggatggtctcgatctcctgatcttgtgatccacccgcctcagcctcccaaagtgctgggattataggtgtgagccactgcgcccagcctcaattttttttttttaaatacagcttccctcttctttctacccctatacaaattaccagagcaattactgctataggattaaattaaaggaattcttaaattaaatggttggctgctgaaccaagttgtagcagttgaatatggaattttgtagtgatttattataatcctagtttttggaagaaaatttgcatcacttagcagatatttaagatgcttgtaacatttcatttcccagtacacataaatatgcattatgtcaggcattggaatgtttagcaaactaatgaaatttgtaatttaatttatcaggtcacagcatttaatgaagaactattcagtgtcagtttatgccgttaggtaacaaacaggattgtgttacgcagtaatttatacagaaaagtattttataaataaaatgtcaaataaatgccactttttgttttaaaatgatatgtttaagaaataatcctaaagggaaaatgtctgctttgtcgaataaagtaattaaagcatttttttaaaacaagagaaaaaaataaggacaaagcagggacagacaggaaaatgtcagtgtgtttgcatcagccaggctgggctgtgcttcggtagcaagccccagatatcagcgacttcacacagtgaaccgtggcccccgctccacgaagctggccctgcatctgtcctcttctagggcagtggtcctccaggtggtggcttcctgatcctgcctgctttgctctgcggctccaccatctcggttccttctgctcagagcctgttgccagtactggtcgtgggtcctgcctaactctaagggaatgtgagggagccatggagtgcttggggagggctgtggtctctgccaccgcgttcaccacatcctgaccacttcttcmatggaacaggttcacaaacctcattcatccaggcggcctgggtgacactctggggtaaaagtctgcaggaaagccctcagttcaactttgtcatctttcacctgtctcttcaattcggaataagctggtttatgcactggaagtacatcatctagtagtcttttatatgtgttctgaaaggttgttcactgtgtaatgtgaactccgtgttctgtgagcagtgttgttgctgccaactctgagatgctggcctggtgtgtttttgtcaccatgtgactctgttagcatgatcactgctgcctgtagtttctcttagaggcaggttgaagactctaatgtaaaattgtcttttaattagcatttgtttctcagctatttctagagttactgttgaaggtactttattttgactggtacagatctttgcatatgtaatgttagagttccagggaattctgtttaaactccccggtaaaacattctgtacaagatcaaggaaggagaaaatacagttaatttttggaatagagaaattgtcatctttagaaaatgcaaagaggaataatgataattttttgtgtagcagtgaatgaatagctttaagttgatgtcataactgaagacacatgagattttcacatggcagagtcatgcctctgtgttttgctacactccgtgggctgtcatctgataccagtgacaactgtgcaagggtggtacctcccgattctgcacccagtgtggggcgtcctccacctgyccctctccagcagcaccaccagctaatggagctgcacaccttttattccccggttgaaagtcaaaataacccatcaaaattaaaaacttctcatccaaaaacactattaagaaaatgaaaaagcaaaccacagactagatttacaatgcacgtatctgacaaaagactagtacctacaatgtgcagagaactcctctaactcagcagtcaggagaaagttcattttaaaatgagcaagacttgaacaggcacttcacaaaagaagatatacagatgtccataagcatattaaaagattcccagcatcattccttagcaggaaatacaaattaaagccacgacatgatacaacttcacctctcctagaatggctgccgtggaaaaggttcaggggtgcgggcagccagaacccgcagacacggctgtgggtgtggagcacaggatctccattggggaaactggcggtttctttaaaaatgaaacaggccgggcgcagtggctcacrcctgtaatcccagcactttgggaggccgagacggatcacctgaggtcaggagttcaagaccagcttggccaacatggcaaaaccctgtctctactaaaaatacaaaaattagctggacgtggtggcaggtgcctgtartcccagctactygggaggctgaggcaggagaatggcgtgaacccgggaggcggagcttgcagtgagccgagatcccgccactgcactccagcctgggcgacagagcgagactccgtctcaaaaaaaaaaaaaaaaaaaaaaagaaaaaaacaaaaaaacaggaggcagaggttgcagtgagccaagatcacgccactgcactccagcctgggcaacagaacgagattctgtctcaaaaaaaataaaaaagcagtcagttcagcagttacctcagggtagagggcattggccagaagggagttgagggaactttttggggtgactaagttgtttaaaaccaattgggacaggcgtagtggctcacacctgtaatcccagcacttcgggaggctgaggtgggtggatcacttgaggtcaggagttcgagaccagcctggccgacatgattaaactccatctctactaaaaatacaaaaattagctgggcgtggtggcacgcgcctgtaatcccagctactcaggaggctgaggcacgagaatcacttgaacccaggaggcagaggttgcagtgagccaagattgcacccctgtacaccagcctggatgacagagcaagactccatctcaaaaacaaacagaacaaaaaacaaaaacaaacaattcaacttagccctgaagatctgtgcattgtgctgtaggtaaagtctcagaggtcagaggttgctgatgcagaggacccaggctgacccaggtccaaaccttagatcctcctttgcctcctggcctggccacctcctgccgtgtggccctcagcagatctctttctggctgagtcccgacggtctcatgggtgaagtgggatgatactaatcgtgtatcattgttgtgggtttgagatgagtatatgaagacctggctgacagcctgtccacagcagctgctcaggaactgttgactgctgttcttttagccagactattatcaaatgtaatttctatttttaaaaaactcttcccatttcctttcctcttgcaatcagtctcaatagcagtaagaaataaataaaaatgaagattctttgggagacttagttttgtttttttttgtttttttgagatggggcctcgctctgttgcccaggctggagtgcagtggcaccatcacaggtcactgcaacctygacttcctgggcccaaccgatctcagcctccygagtagctgggactacaggtgtgtgccaccacacccaactaatttctgtgtattttgtagagacaggatctcactatgctgcccaaactggtcttgaacttctgggctcaaccgatccacccgccatggcctctgaaagtgctaagattacaggtgtgtgccactgtgcccagtcagtttaattctaattaagatcaagattatctgtaaatacgagttccctctctccaaatctagaatttgctggcattagtcacatgtctgaggaagctgacgatgggacccacattgagatactaatcccagggctcggtggttcagggcactgtactgacagcatcttgactgctttgcctgttgcctggaaggggtgccgtgtggcgcctggcaggtggcagagtggccagaggccattattactctcttgagttacggtgttctcaagcccagctgagtccacacagccgatgtggatggactaggacagatccgatgacttagtgtccaagttcarttgcaaatgcagcctcatttctttctttgaagtagaaaatcaaagttcatagattagrtgaaagaatagtcattgtacaaaagtaattatagtgtgtgtacttttctttatctacaggagctgtaaaattgacaagcttggcatgtggaaatcagcacatctgggcctgtgattccaggggtggagtttacttccgtgtagggactcagcctctcaatcccagtctcatgcttccagcctggataatgattgagccacctgtccaggtaagcagaagttagctggtggaactcactcttcagtaagacagaaactgtgaggatgctggtactgggaaaaaggatctgcacagcctctagaggcctcccagcaaatgcggggagccatgcccccagggtctacacacwctcgttcatcaacatcacaactggaattcgggatttgtgaagtttagagctgaacagactgttacagattatgagtcaacacgtatattttctctttcaaaataataatatttcgtttttgactttttactaagtgaatattattttttaaatctgcctatatattggaacctctattttataataataatgataataaatcagtacccagaagtataaagaaggtaaaagttactttgaatcttgtcatggagaaaatgctgagtgcctctcctggtttgttgaagaaattccgtttcctgtccagcccactgctggccagctcctgccatgtttcagctgaccgtgcatcccaacacagagtctgtgttctcctgacctccagcactcagctcacaaggagaagtctgatttgaatgtactatctagttacccttaaagatcccacaggcttggttcctgtgctgaatagatttctgttgaagtttataactgggggctgtggttttttgagacttatttgcccagactcctgccagcccccatttggtgactctgttgggaaacaggtgaagttgccaattgtggaggcagcagtggggcaggggggatggttcgttgttgggcagagaaaccttcagtggagtcaggaaagaggtaaagagtagggtaaatgcctytgtgcataactgtctacattttggtcatggtgaggcctcagggatgaggacaccagtggtgtccaccagccctggggagtgtggtggtgggagaacctttactgaaatcagcattcggctccagagctctgtggaggccaccactagcggtcatggccacagggaggcttctcgtcctccttggtgggtcttcctcctccagagggtgatggggatgatattgtctatgacaacactttgtgaatgatacggcactgtcaaacatgaggttgtacataatgaattataacacatgctctgttttccctctgcacacggtgacgtactcatagtggcacagagggagagtccaccctgcagagaggagccttcctcactgccatgtttagcactgctggggcacagtgattatgaaaagcaagccgcctgtcgttagtttcattattgtccttaaattctctggttgcccgcacccaggtggactcctttgacacaccactgtcaatacgttcctttttttccttctaacaactttatatttttccttttaagttacaacccgcataacataaaatttcagccttctacagtgtgcagctcagtggctttagcatcagttagcagcagttagyaccatccaattccagagggttcccatcactccaaaacagagagaacacccttacccattagcagtcacttcctgttctcacagaaccagcccctccgcccatggcagccactcatctgctttctgtttctatggctttgcctattctggacattttatataaattggatcatataatatgtggccttttttatctgacatctttcactttgtatcatgtttcggagttcatccacgttgtaggtgtatcagttcttaattcctttttrtgactacatcacagctctgttgtatggataggccacattggtttatcatttcaccagtggatggacatttggattgtttctgcttattggctactgtgaataatgctgctgtcaacatatgtgtgcaagtctttagggaggatgtatgttcccagttctattgggtatctgtctgtaagtggaattgcaggtcatgtggcgattctgtgttgaactttttaaggatgtcaaagtgtttttcacagtggctgcaccatttgtgttccaccagcaagatatgagagttctagtttttcccatcctcaccaattttttttttttttttttttttgagccagagtttcgctcttattgcctagtctggagtgcaatggcgccatcttggctcactacaacctccgcctaccgggttcaagcaattatcctgcctcagcctcctgagtagctgagattacaggcatgcaccaccatgcccaggtgatttttgtatttttaggagagacggggtttcaccatattggtcaggctggtctcgaactcctgacctcaggtaatccaccctcccccggcctcccaaagtgctgggattacaggcatgagccactgcgcctggcctttccaattttttgttgttattttatttttctggtctcagaaactgcctcatatgtctaattttttaatactagtcatcatagtagttggaaagtggtatctcattgtgggtttgatttgcattgacctaacaactaatgatattgaacatccctcttttcatgtgtttattggttatttgtgtatcttctttcaagaactgtgtgttccttttttcttttttttttttatgatggagtctcactctgttgcccaggctggagtgcagtggcgcaatctctgctcactgcaatctctgcctcctgggttcaagcgattctcttgcctcagcctgctgagtagctgggattacagacatgtgcctccacgcctggctatttttttttttccatatttttttagtagaggcagggtttcaccatgttggccaggctggtctcaaactcctggcctcaggtgatccgcccacctcggcctcccaaagtgcttggattacaggcgtgtgccaccacgcccagcctcaaatcttttgctcatttttaaattgtgttatcttttactgagtttgtttgtttgttttgagatggagtcttgctctgtcgcccaggctggagtgcagtggcatgatctcagctcactgcaacttctgcctcctggattcaagtgattctactgcctcagtctcctgagtagctaggattacaggcatgcaccgccatgcctggctaatttttgtatttttagtagagatgggggtttcaccatgttggccaggctggtcttgaactcctgaccttgtgatccgcctacctgggtctcccaaagtgctgagattacaggtgtgagccaccgtgcccagcctgttgagttttatatatgagttctttatgtattctgggtactagacctttatcagacacatgatttacaagtattttcttccattctgtgcattgtcttttacttttttatgatgttctttgatgcacaaatatttttattttgatgaagtccagtttattaattttttcttcatttgcttctgcttttagttgcctaatccaaggtcacaaagatttacctctatgttttcttctagcagttttgtagttttagctcttacattaagtgcttcatccattttgagttgatttttgaatatggtatgagataggtgtccaaatgcattcttttacatgtgggtatcgaattgtaccagcaccatttattgaaaagactattctgtccacattaaattatttcaacacccttgtcaaaatcaattgattgtaaatataaaggtttgctactggactcttagttatatcccagtgatctgtgtatctatccttaaactacactgtcctgattacttagctttgtcgtaaattttgaaatcaggaagtatgaatcctctaactttttctttttcaagattttttcagctacatggagcccctcctacatccatgtgaattttgggataagtatgtcaatttctgcaaaaaaaaatactaactggaattttgaaaggaattgtgtcgaatcagtagataaatttggaaaatcttccagtctgtgaacatgggatgtcttcccatttatttagatcttctttactttccttcaccaatgttttgtagttttcagagtatatgttttatactgcttttgttaggtttatttctaagttctgtattccctttgatactattgtaaatggagctgttttcttcattttcagattgcccattgctagtatagatttttgtatattgatcttgtgtctggcaaccttgctaaacttgtttattgggtctaacaggtttttgtagattcttttgcattttctatagatgagatcatggcttctgacatggtctgccaatagagataattttacttcttcctttctatctgtatgtcttttattttactgtcttgcctgattgccctggctggaacttctagtaaaatgttgagtagaagtggcgagaatgggcctcctagtcttgtttctgatcttaaggggaaggcattcagtcttttaccattaaatatgatgtgagctttgtgttttcttaggctccctttattaggttgaacttcccttctactcctagaaggaattctaggagttctttctgttcctagtttgttcagtgtttgttatgatgaaagggtgttgggttttgtcaaatgctttttctatgcctattgagatggtcatctggtttttttcctttattaatatgatatattatactgatggagttttatatgttgaaacacagtttcattcctgggttaaatcccagttggtcatgatgtgaaatcctttgtatgtatatgttgctggatttggtttgctaaagttttgttgaggatttttgtgtctatattcatgagagatattggtctttggttttcttgccatgtgtttgtctggatttggtatcaaggtaatgctgctggcctcatagaatgcactgggaagtgttttcttcttttctactttttggaagagtttttgaaagawtggttttattttttacaccccatttgttagaattcgtcatcccatccatgaattcatgtagccatgtaggcctgaactttttttgtgggaagtttttttgactactggttcaatctctttattcattataggtctattcagaattttttttttttttttctgacatggagtctcgctctgtcacccaggctagaggatgttggcgcgatctcggcccactgcaacctccgtctcctgggttcttgcaattctcctgccttggcctccctagtagctgggactacaggcatgtaccaccacacgcagctaatttttctatttttagtagagacgaggtttcaccatgttggccaggcttgtcttgaactcctgacctcaaatgatccaccctccacagcctcccaaagtgctaggattacaggcatgagccactgcacccagcctattcagaattttctatttcttcttcttcttctttttttttttttttttgagatggagttttgctcttgttgcccagactggagggcaatggcacaatctcagctcactgaaacctccacctcccaggttcaagcaattctcctgcctcagcctcccaagtaactggggttacaggcgtgcaccaccatgcccggctaattttgtttcttgtgttttttttttttttttgagacggagtctcgctctgtcgcccaggctggagtgcagtggcacgatctcagctcactgcagcctccgcctcctgggttcaagcagttctcctgcctcagcctcacgagtagctgggattacaggcatgcaccgccacacccagctaatttttgtatttttagtagagatggggtttcactatgttgaataggatggttttgatctcctgacctcgtgatccacctgcctcggcctcccaaagtgctgggattacagacgtgagtcactgtgcccagcctaattttatatttttagtagagatagggtttcactatgttggccaggctggtctcgaactcctgacctcaagtgatcttcccacctcggcctcccaaagtgctgggattacaggtgtgagccactgcaccctgcctctctttcttcttgagtcaatctaagtagtttattctttctaggaatttgttcatttcatctattttatctaatttgttggcatccaattgttcacagtattcttctgtaatactttttatttctgtgaaattggtagtaatgtctcctctttctgattttataatttgaattggctgggcacagtggctcatgtctgtaatcccactttggaaggttgaggcaggaagaccacttgagcctaggagttcaagaccagcctgggcaacatagcaagacatcatctctaccaaaaaaaaaaaaattacctggacctgatagtgcacctgtagtcccagctactcagaagactcaggtaggagaattgcttgagcccaggagttcaaggctgtagtgagctatgattgccagttttattgccaattgccactatactccagcctgggcaacagagcacaacgctaataataataataataataatttgaatcttctctcattttttcttagtctagctaaaggtttgtcaattttgttgctcttttcaaaacacctccttttggttttcttgctttttctgtgttgtttttctatcctctatttcttctatttccactctgttacttcctccacacattcttgtgcacagtgctttgcttgatagtgatattcctctggtagctccaaggaatatttgtcacaattatcacgtacatgtggaagacctgtggtaacattggactgtaaagtttgtaggatcccagtgcagaggcaggctgctgagtgcaagagcgagatttgcaggatgtgttgtagaaagaacgtccttgagtgggttgagcgcccatgtgccttgcctcctccttttcccagcaagccagaggccaggatgctggagagtagggcaagcaggaagctgccgatctcagtcctcagtggggctggagccacccttgcctctgctgtgtgcacctctctgcagccatggggccacacaggtacctggcaaaagggttacatggagaacggtgtgcaaccacaatttcctgttcctgtctccatgtagactctagaataacctctaggaagcaaagctaaaatggggaagagagctttgcttaaagtgctctattgactgtggtgatcaacagctttgccaggaaaatggccaaaatagaacaaattcacatgaaaggacctcaaagctctgctctgaataaagtagtgattgctaaatgggatgttaagcatgaactatttcaagtagttctgctgaatagagccacattttctcattgagttagcttttagcatgctatggaagacattcagtttgccatggattctgtagatacaaaatgcttttcaagttggtttctgtgggaaagaaatcaggcttcacatgtacacaggcctttctactgcactttgccaagcactgccttatccttaacccttttattgccccaggaaatagaaaagtccgtagttccccctactttacgaggaaatctgttacccagaacagttgagcaatttgcccaggatcccaactctggtgtgtgccaagcccaggcagggacccaggcccccagctcccaggtgctgcccctgccgaggctcccctgggctgaggaaggcgcttctcccgggctgctggcactgacgattgtttgctgagatcagaagtgaagacaagctctgctgccaggcgctcgccttgtgccaggctaatgcctgaagcacatctttccctcagtcctcacaacaacctgggaagtgactgcgtctttccccatttgacagaggagaaaaccctagctcagaggttcagaaagttgcctgaggcctcatagcgggcaggcggcaggggtgggacatagacccaggtgtgtgacacccgcctctgcctctcctgtggctctgaggtccaaggcctgggccaggaccaactgcaggatggcagcaagcaccaggttgtggcgacatgtcataggcttagtggcctcacacgtcgtattttaggacaaagcctacacatgcgaatctttaaatcgcagagggtcctgcaaatgagcccaggagtgaggggagatgggggttcactctgaggactggaacgtcagaagagttggttgaatctgaggattggagaacaagcggggtttatgtattttgattatgttctacatctttccactttgttttatttgttcttcgacttgagcttcttcatctgcgtagaggatgtatttgcagtggaaaaggaaatggaggcaggggatagatgctcaagggcacatgaagtgaagccacagaaatcttttaaaattagcatcagcttctctatttagttctgttgtcctattctcttctctgggaagatacccctcctgtagtagttttgcggtaaagttttaacaaagtactcaaaacaaatgactcagttttcagatttgctaacacttgcaagggtttggagaaaatatttatagttgtgtttagcatcttcatagtctggagtttgctgtttgagttagagaattttctgtctgtgttagaggtacctctaacgcaagcatagttggtgtgaagtttcacattctgtgtgccccatgtgcttgagtagaagaggtgtctgttcttactgtgcttacagtggactctgaaatggtgtctatggtgtggttccagttttgtaaaacaaaactataaaatcccactaggctgggtgcagtggctcatgcctataatcccagcactttgggaggccaaagtgggaggatcacttgaacccaggagttcaaaatcagcctaggcagcgtagtgagaccccrtctctacaggtaattttttaaattagccaggtgtgttggcgtgcacctgtggtcccagctactccagctactcaggaggctgaggtgggaggatcacttgagcccaggaggtcaaggctgcagtgagccatgtttgtaccactgcactccagactgggcaacagagcaagaccctgtcttaatcaattaataaaaataaaaaataatttctcactgaaaacctagaagaaactacaacaaaggtgactgttatggggccgggcacggtggctcatgcctgtaatgccagcactttgggaggcccatgtgggcagatcacctgaggtcgggagttcaagaccagcctgaccaatatggagaaaccccgtctctactaaaaatacaaaattagctgggtgtggtggtgcatgcctgtaatcccagctactcaggaggctgaggcaggagaattgcttaaacccgggaggcggaggttgtgatgagccgagatcgcgccattgcactctagcctggacaacaagagcgaaactccatctcaaaaaaaagactattttgatccagggattataagtgattaaaatttaccatgttttcccataatgggtaggaaaactttttcatgatcagggagaaaaataggtatattttacaagggacccatcttttgtgggtcagtgagcaacctttcttctccgaggcacgtctctgacctacccagcccatataaatctgaaccccagtaggttgtccccccttccccctgccccacacaaagattttagagctagaaggagactggaaaacacataaccttgccacttccttctgcagatgaggaaagcaaggcctggcaaaagcaaggttcctggtctcagggtagtcagtggttgtgccgggcctcctcagcccctcatcctcaaggcccacaacagagcagcggcaagaacagtcccatccagggacactcacaggctaccgtagagacacacgcaaaccactggcgcctgtgcttccagagctgtgggcagagtgccatggagccagctggagagggaagtgctgtcagggccttggagtggtcagaggatctcayaagaggtggcactggtacaagaaaggcaagtaggagtgtagcaggcaggcaggacagagggtgttctaagcagaggggacatgaagtataggcactgagcagaaggcacccttgcccagggtgcagaaaggggctgtattgggagactggcacaggccggggcagggagggctgggctaaggcattggcatcattcttgaagagtttgaagccaggcaggtggcctggtcagaccatgtttgaggaaggagcctgtgtcacaattccctgtgaccagtcagagggtcttctgctggacagatcacatgcacccataagtaggtcagatgcccaggagtgttttgcctcagatatggagcaaaattagcctgacagtaaatgcagctctggtcctacctactggagcttaaagcaagactccgaagaatcaaactgtttcagagtaacttaccagcatcttagaacaaagctcaagaatatttacagattgcaaaaatatccaacatcagcaagataaaattcacatgggcaaccaattaacatttacccaacaagcagagaagcaggaaaatacgacctgcaatgaaaggggaagaaatccgtcaataggagctgacccagaaatgatacagatggtaaaattcatagacaggacattaaaacagttgttacacctttatgtgttcaagaagctagtagagagattcagcctgttaagtagaaaatgagagatagaaaaactccaggctaggccaggcatgcaacggctcacacctgtaatcccagcacattgggaggctgaggtgggcagaccacctgaggtcaggagttgcctggccaacatggcaaaacctcatctctactaaaaatacaaaaattagccaagcgtggtggcacacacctgtaatcgtagctactcaggaggctgaggcaggagaatcacttgaacctgggaggtggaggttgcagtgagcaaagattgcaccactgcactccagcctgggcaacagagcgagactctgtctcaaaaaaaaaaaaaaaaaaaaaaacaatatcaaaaaactccaggctgggtgtggtggctcgtgcctgcaatcccagaactttgggacgctgagctgggagaattgcttaagctcgggagttcaagatgagcctgggcaagatggcaagaccctgcctctaaaaaaaaaaaaaaacaacaaaacaaaaaacaacaactcaaatcaaatttgtagggattaaaattgcaatgtctgagctgaaaaatatcactggatgagattaatggcagcatagaaattgcagaagaaaagactagtgagcttgaagacacagcagtgaaaaaccatccacactgaagcccagagggaaaacaggctggaaaatgttcagagaatcagtgagcacagaccccttcaagtggcctcacgtaaatgaaatccaagtcttaagagggaagaagggtgacaggaaaaaaagatgtgaagaagaaatacaactgaaagttgtccaaatttgatgaaataattatgctgagtcaagaagccaaagaatacatactgttatcatttcatttatataaaatttggccaggtacagtggctcatgcctgtaatcccaacactttgggaggctgaggcgagcagattgcctgagcccaggagttcaagaccagcctaagcaacatggcaaaaccccgtctgtacaaaaaatacaaaaattagctgggkgcctgtagtcccagctgctcaagaagctgaggtgggaggatcccttgagcccaggaggcagaggctgcagtgagccatgatggctgccacctcactccagcctgggtgatagagcatgaccctgtctcaaaaacaaacttatttatataaaatactagaaaatgctaacacaggccaggtgctgtggctcatgcctgtaatcccagcactttgggaggccagggcgggtggatgacctgaggtcagtagttcaagaccagcctggccaacgtggtgaaaccccgtctctattaaaactacaaaagtcagctgagtgtggtggtgcacacctgtaatcccagctacttgggaagctgaagcaggagaattgcttgaacctgagaggcagaggttgtggtgaaccgtgatgacgccattgcactccagcctgggcaacagagcgagactccgtctcaaaaaaaaaaaaaaggaaagaaaatgctaacacagatcagtgcttactcaaggcctggcagaaatttcaaaggggaggtgtggcagtggcttcaagagtgtatgcatatgtcaaagcttacccaattatgtactttaaatgtgtgcatttcattgtatgtcagcatacccctgtagagctggtttttttttttttttttgagacagaatcttgctctgtagcccagactggggtacagtggtgcgatctcggctcactgcaagctccgcctcctgggttcataccattctcctgcctcagcctcccaagtagctgggactacaggcgcccgccaccatgcccggcaaattttttttttttttttgtattttatgttgatacagggttttaccacgttagccaggacatacaaaaaattagccaggcgtggtggcgggcgcctgtagtcccagctactcaggaggccgaggcaggagaatggtgtgaacccaggaggcggaacttgcagtgagccgagatcgcaccactgcactccagcctgggtgacagagcgagactccgtctcaaaaaaaaaaaaaaaaaaaaaaagagttagccaggacggtctagatctcctggcctcgtgatctgcccacctcccaaagtgctgggattacaggcgtgagccaccgcacccggcctgtttttgttttttagagacagagtctcactccattgcccatgctggagtgcagtggagtgattgtggctcactgtaacctcaaactcctgggtcaagccatcctcccacctcagcctcccaactagctaggacactacaggcatgcaccaccgcacctagctaatttttaaaaaaatttgtagaggcatagtcttgctatgttgcccaggctggtcttggactcctggcctcaagcaagcctcccaccttagcctcccaaagtactgggattacagatgtgagccaccatgtctggcctctgtagagttgttttaaatattaaagtgtacaaaaaaaaaatttaaatgggccgggtgtggtggctcatgcctataatcccagcactttgggaggtcgaggsgggtagattgcttgagctcaggagttcaagaccagcctgggtattattgtgaaatcccatctctatgaaaaatacaaaagttagccaggtgtggtggcatgtgcctgtagttccagctactggggaggttgaggctgcagtgagctgtgatcatgtcagtgcgctccagcctgggtgacagaatgagaccctgtctcaaaaaaaaaaaaaagttttaaatgaagattatagggtaccctacattgtgtttggtttgcagagggaacagaaatgagtgaagctgcctaagcatggtggctcacacctgtaatcccagcactatgggaggccgaggcaggtggatcacctgagctcaggagttcaggaccagcctgagaaacatggtaaaaccccatctctaccaaaaatacaaaaaattagctgggcatggtggcacatgcctgtaatttcagctactcgggaggctgagatgggaggattgcttgagcccaggaggcggaggttgcagtgggctgagatcatgccactgcactccagcctgggcgaaagagtaaggccctgtctcaaaaaaaaaaaaaaaaggaaaaaaaaaaggaaatgattgaagctgtttttggagttaactgaccaaaagttaaatgactaaaagaagagcgaggcaggaggttatagaagcaatcatgaaaaaaatacagatccccagggtcccaaacctggtttccgaggatgggtagtgtttgaacttggacttgagactcaatgggcattttcagtgaccagcaggtaaagaggcttggcctagtgtttctgagtagggaagagtgctcctccctgctgccttgggaggactgtctgctgctggaccaccctgaggactgtgagacattagctctgtgggcttctaggctcctggcagtgaacctctgggagtgaaggatgcacaaaggatgttgtgggaaagagaagatctgagatgtcctttgggtcatctttggaggatcttgactctgaggctggagggtttgtggctaattccatgggcagtgggggctgttggaggctcttgagcagggccggacaggacccaaatggagaaggtctgcagtgagctgtggaaattctttggcctgattcgctggatttgtggtgcacatctgtgagatgtgagattgggatggagtggacatggggactctgacatggattgttttggggcagaagaagccaatccatgctggcgtcccagcctgggtctgtaatctcattaatctccttttggtgactggaccagttgcctgtacaagtgcctcttggtctccttgatccaacctcactgagccagcgtcgcttgtatgcatgatactgcaagacttccttcccagctggcctgcacgcaggtgccttggagaggcattgggcagatggcatgtggccatttccagcagtggggcgcagtgctcagggagactgcagcatcctggagccctgccagccaggagggactgttcccattgcgggcagaatctgttacttgcaatcagaagaacttcarctaatacttgttttttgcctgtagattcaattgaccttgggaatgttgcttaaactcgcctttcactttcattttcctatcagtaaagtgaagggtcatatccacattagagccatcagaggagcttattaaaaatgtccaggcctcggccctccctggagatatgaattcagcaggtctggggtgaggcccaggcatcttggttggtttttttttttttattttttattgatttatttgagacggagtcttgctctgtcgcccaggctggagtgcagtggcatgatctcggctcactgcaagctccacctcccgggttcacgccattctcctgcctcagcctcccgagtagctgggactacaggcgcccaccaccacacctggctaatgttttgtgtttttagtagagatgggttttcactgtgttagccaggatggtctcgatctcctgaccttgtgatccgcctgccttggcctcccaaagtgctgggattacaggcgtgagccaccatgcccggcctattttttatttttgagacagagtctcagtctgtcattcaagctgaagtgcagtggtgcgatcatagctcactataaccacaaacccctgggctcaaacaatactcctgcctcagcctccaaaatggctaggggtatgcaccatcacacctggctcattttttaatttttattttgtagagatgaggtcttgctgtgttgtccaggctggtgtcaaactactggtctcaagtgatcctcccacccctcagcctcccaaagtgctgggattgcgggcgtgtgccactgtgcctggccagttttgttttttggttttgggttttttttttttttttttttttttgagatggagtcttgctctgtcgcccactggagttcagtggggtgatcttggctcactgcaacctccgcctcttgggttcaagtgattctcctgcctcagcctcctgagtagctgggagtacaggcacccgccaccacgcctggctaattttttttttttttttttgagacagggtctcactctgtcacccaggcgcgtagtgcagtggcacaatctcagctcactacaacctctgcctcctgggttcaagtggtcctcccacctcagcctcttgagtagctggggctacaggtgagtgccactatgtatttgtatttttagtagagacggggtttctccatgttggccaggctggtctcaaactcctgatctcaggtgatctgcccgcctcggcctcccaaagtgctgggattgcatgcgtgagccactgtgcccagccacacccagctaatttttgtatttttagtagagatggggtttcactgtgttggccaggctggtctggaactcctgacctcaagtgatccacctgtcttggcctcccaaagtgttgggattacagataggagccaccacaccgagcctggtttttatttttcatgaaagtcatacatgaaatgccaagtgtggtggtatgtgcctctagtcccacctactcaggaggctgggtgggaggatcactggagaccaggatcatccaccgcactccagcctgggcaacagagtgagcctccatctgtaaaagaaagaaaacagagtcacatgtgaaaatcagtaggttgacatgtcagtgggttctataagatgtgctataagaaacatgtctctcctgccaattttgccctctctggagagttcctttcagttcttttcgctgcctgtctctgaatgctgcttcgggagctgtgtttggtcccctgacttcaggtgtttctggttgactctctgcgggaagagaagcatgcagagctcttgcatcccccgtcccccattcccccagccacccacctcccttcctacttccaccctgccagagctgcagtgcttcctgggcacgggccttgctgtgaggacagaggagctcttcacagcggaggcaggggatgaatcacacctgcagttccttgtctgtgtgactctttgttttccctggacttgataatcatcttgtttgctcatctagttttttttctttttttttttgagacagagccttgctctgttgcccaggctggcgtgcaatggtgcgatcaatctctgctcactgcaacctccaactcctgggtccaagtgattcttctgcctcagcctcccgagtagctgggcttaacaggcgtgtgccaccacacccagctaattttttgtatttttaatagagacagggtttcaccacattggccagcctggtctcaaactcctgacctcaggtgagccacctgccttggcctcccaaagtgctgggattacaggcatgagccactacacccagcctgctcatctagttttctaagtgcagttccacacattcaatcccaaactctctgccagttgtctcacacattaggaatgtgtcctctccatttcttccccctgcagagatctctcctgcaccctcttggccagctccagtctggcctcgttcctctctctacccgggacccagctgttgtcctagcgtcacctttgacctcccctcatgttagagcccctttctcccggatcccgggtcttcctctctctgtgtctgtgtttgtttgggtggagtttatcttccagtcggttcccaaggaagggttcatggttggtgactttttggaggtattgcatgtctgaaaagtctttcatctgtgttcacccttgaccttgctggatatagcagtctaggttggaaaccattttcctttaggattttgagggtctttctccattgtctctcggcttccaggattgctactgagaagccagaagcctttcttttttttttttttttttttttttgagacggagtctygctctgtcgcccaggctggagtgcagtggcatgatctcggctcactgcaagctctgcctcccaggttcacgccattctcctgcctcagcctcccgagtagctgggactacaggcgcccgccaccacgccyggctaattttttttttttttgtatttttagtagagatggggtttcaccgtgttagccaggatggtctcgatctcctgaccttatgatctgcccgtctcggcctctcaaagtgctggaattacaggcgtgagccacctcgcccggcccagaagccgttctaacacctgatccttgatacttgacctgtttttctttctgaaagtttgtaaggtctctttgttcctagtgttataagaacagatacatagtggtatgccttggtgagggctgtgttcatccttgcagccaggtggttgcagcctatgtgctggtgggtgtctgggtcctctgctggggtcctcttctgccccgcctctcttgttttcctttttttgttgttatgtttttgtgtgttgttgttgttgttgtagggtttttgttgttgtggggttttgttttgttttgttttgtttttgagacagggtctctcactctgtcacccaggctggagcacaatggcgcaatcacagctcattgtagctttaaacttgtgggctcaagcaatcctcccaccacagcctcccaagtagctgggaccacaggcatatgcaccatgttcagctaatttttttattattttttgtagagatggagtctcactatattgcccaggctgcttttgaactcctgggctccagcaatcctgccaccttggcctcccaaagtgctggattccaggcatgagcaactgcacctggcacccctcctgttttctgtytgctctggctgaaggcctccttttccttttcttttttttttttttttttgagttggtgtttttgcccttgttgcccaggctggagtgcagtggcgcaatctgggctcactacagcctccgccccccgggttcaagcgattctcctgcctcagcctcccacgtagctgggattacaggcacccrccaccacgcccggctaattttgtatttttggtagaaatggggtttcaccatgttggycaggctggtttcgaactcctgacctcaggtgatccacctgccttggcctcccaaagtgctgggattacaggcattagccactgtgcccagcctggaggcttccttttgtattgtggactttctaagctggcctccacttttcctttctctcctgtttctgtctttttatgcttttatcctgctttctagaagacattctcaaccttatttctccaaccctctgtcagattatttccatgatcacatgtttaatttctgaaagttcctgttgttgtttgatggctgtagagtcagtcttctctcatctccctaaggatgttttggaagtttcttctccctgcctggtctttgtatgtcccaagttgtgtgttttctgtctagttcgccttttacatggcagaggctttcttcagatgttggcagtcccctggttggaagagtgaggcccagcaaggctgactggaagccctgagcacatgcatggagcctgtgggccccgcrggtctctgacagcaatctggctgggctgctgggtggggagtcgttgcttttagccttccagggcccgctgagtccttgccatgcatcccccactttccagcttccagaattgtatggctgcttcctcccctcattctctctgtccttaggagatttgaaccttttttctttgagatggagtcttgctttgtcacccaggctggagtgcagtggcccgatctcagctcactgcagcctccccctcctgtgttcaagcaattctctgcctcagcctcccgagtagctgggattacaggcgcatgccaccatgcctggctaatttttgtatttttggtagagacagggtttcgccatgttagtcaggctggtctcgaactcctggcctcaggtgatccggtctgcctcggcttcccaaagtgctgggattacaggcgcgagccactgcgcccgccccgtttttctttgtttaacccattccctctcatggtagtggtgcttgagaagggagtgaaagagtaattgtgtgctcattatcatcactgcccagaagcttctggcttcttcagcgccctgcaggtgactcttgcacatacccagcgctgagcaccatggtgcagctcatccccttcacctccacggttctggtatcacagtcttcagagtatagccactattttcctctaagcctctgaacatctttgagtggtatttaggtgctggtggggctgcctgttacactgtaagttgttccgtcagcacaactatgctgcctgcaaatgaaggtatgaaacctccccaaactgctgtctaatggtgtgggatggaaccagctccctttgagagaaactaaattgttttttgccacttcctttaattttttccatgttgcctttttttcctatacctccatttaaacatctattgtttttgagctctcttcttcaaaacttgcttctaggaactattacccctcttcaccatattgaactctaagtcttttctctcattctggaaggccatgatacctagaagtagaccacagggttctaacggggtgccctgggtcctgcagcagtcccctcatcgtgctttaacaacttatgacccagtagtttaaacaacgacctagggaagcttgtcccagcctgccctgcgtgtgcccccagtaaaaccatgagcggcaggaaggggagcccctcgcgatgcttgccatgaccctagaggagcagagcccagagatcatctttagggacctctccctctgggctgcactcatccagaaggtgcttccccgagcctgtctgtagagtcagccacagagcagggcgatgagctatcagagaccagggtrtgtgccactgggtccagcttctgctcttcttgtctcacagcaatatttgagtcctggtgctagccatggcgcagtcgttgggctggtatcagtgacaaggtctggagggtagacaggaagagtggccagttggctccaccagcccctgctcaggaaggacagaatgtgacaggcacccaggaaacctgcttctgagcgttttctttagcgcaccccctacaattagcagatgcagcttcttgctggattctgaggtcacacctcagaccagatgtagaggcccagcagtaactggagtcagtgcagaaggacccaccacggagagggagaggcctctgacaggccagaagagagcagcagtggagcctgtttctgtctggagccctgctctgctgggccagaagtttccaaatgttttttagcagtgggacccattcttcaaattaaaaaaaaatttttttgagttaggctcttgttccgtcacccacgctggagtgcagtgacacaatctcagttcactgtaacctcaacctcctgggctcaagtgatcctcttacctcatcctcctgagtacctgggactacaggtgtgtgtacaaaatacaaaaaacactcccagctgtccagccttaaatamaatcttgtacataagccagatgtgttcaacaagtaacagcaaaactggtcccatgaaactgccccttccacaggggccctgaggcacctctgcaaggccagggccccacaggcrctgctggaaaactgctggtcttcgggccagtgaggacagagagagagctcagcacagcaggccccgggcagccatacccacctcgtaccacggtcagagtctcgaggagcctcagagatcatggtccccggctcctccagctaaggacacagaccacgaagaggaggtcctcctagtgtgtcagccctggctctgagaatttacctttaatttaattctagacctattaacatgggtatcgggtttttaagcccatctgaaattgggaagaatagaccagaagcaggaagagggtctgctacagggaaaaaagaactagaaagaccaaacagaagtcagaaagtacagctaccacggggccatgtgacaaatggcccaaccaacccacacgcctcagcgccccctgaggctgcacggatagacggacagacacacagcagcaccatgaatccttgagggaaagtaaagctcagcatgtgtcagtctttacggggattcaaggttaaaacagggagggagagagacttggagggaaaagaaaaggcagtgtggaaagcacaaatggccgcctggataaccgtggtttgtttgggttaggattatttccagaggcgtctttcctggggcatttgtgctgccgcttcaaaaaccctcggtccaccctggtattcctgaaacattcctgctgaatttcttccaagttctgataagtccatgccaaaatggtctgtctagatacatgtttcctttggctgtgaaatcttcagcatgtttttgtttttcagcctgggtttaccacattctgactgaggaacatgtgtgagtgtgtgtgtgcgtgcgcacacgtgtgttgataaaagctatgataaaagctcagctacaagaagtttgaagaactgtggtctgagccccagacacttgtgttttctttttcttttcttttctttttttttgagatggagtctcgctctctcccccaagctggagtgcagtggcgcaatctgggctcactgcaagctccgcctcccaggttcacaccattctcctgcctcagactcccgagtagctgggactacaggcgcccgccaccacgcctggctaattttttgtatttttagtagagacggggtttcactgtgttagccaggatggtctcaatctcctgacctcgtgatccgcccacctcggcctcccaaactgctgggattacaggcgtgagccaccacgcccggcctgtttgtttttttttttttgatacggagtttcactcttgttgccgaggctggagtgcaatggcgcgatctcggctcaccacaacctctgcctcccgggttcaagcgattctcctgcctcagcctcctgagtagctgggattacaggcatgagccaccacacctggctaattttgtatattttttagtagagatggggtttctccatattggtcaggcttgtcttgaactccggacctcaggtgatacgcctgcctcagcctcccaaagggctgggattacaggcgtgagccaccacgcccagcctcttttgcatttttatgaagtttttaatatgaataagccaaaattttagatcacctactactttttttttgtttttttagtagagattaggtctcgagctactgggctcaggcaattctcctgcctcagtgtctcatagarctgggattataggtgtaagccactgtgctcggcctttttttttttttaattgaatttttttttatttttttgatacgtagtttcactctttttgcccaggctggagtgcaatggcgcaatcttgactcaccgcaacctctgcctcctgggttcaagcaattcttctgcctcagcctcctgagtaggtgggattacaggcgccccccaccacgtccggctaattttgtactttttttttagtagagacgaggtctctccatattggtcaggctggtctcaaactcccgacctcaggtggtccgcctgcctcagcctcccgaagtgctgggattacaggcatgagccactgcacccggcctaattgaaatttttattgagataatggtcactgcacttgtatttataagaaatcctgagtaccctttacccagttcacagcaatggtaactgcaaaactatagtacactgtcacaaccaaggcttgtctacttttttttttttctaaattgtgataaaatacacatgagatttaccgttagtgacagtacatttgcaatgttgtgcaaccattgtcactatatagttccagaacattcttttttttttcttttttgagatggagttttgctcttgttgtccaggctggaatgcagtggcacaatctgggctcactgcaacctctgcctccccaggttcaagtgattctcctgcctcagcctcccgagacactaggactacaggcatgcgccaccatgcctggctaattttgtatttttagtacagatggagtttcaccatgttggccaggctggtctcaaactcctaacctcaagtgatctgcccacctcggcctcccaaagtgctgggattacaggcatgagccactgtgcccaacctagttccagaacattcttatccctcaagaaagcccctagcaatgtgaagccactccccattcctcctccctcctctctcccagcctgtagcagctgctcacctgatttctacctgggattttcctcttctggatgtttcatagaaatggaatcctggctgggcgcggtggctcacacctgtaatcccagtactttgggaggctgaggtgggtgggtcacaaggtcaggagttcaaaaccagcctggccaaaatggtgaaaccctgtctctatcccagtactttgggaggctaaggtgggtggatcacaaggtcaggagttcaagaccagcctggccaagatggtgaaaccttgtctctactaaaaatacaaaaattagctgggcatggtggcaggcccctgtagtcccagctactcgggaggctgaggcaggagaatcacttgaacatgagaggcagaggttgcagtgagccaacatcacaccattgcactccagcccgggcgacaagagcaaaactgtgtcaaaaaaaaaaaaaaaaaggaatcctacagtgtgtggccctgagtgatacgtgctctctctgacagcccctgagtgtgtctgggttttgtctgtttaaatgagggtttattcagccccagacttctggtacaaaccaggggacagctagccgctcttgcactcagcacagctaacaaaccagcagtgccaggctcagccgggagttcttttgcctccaaagaaaggcttgagaagaatctacactaactttagtggaggcacttacatcagtgcctccactaaaaataaagcaaaaacaagcaaatccaggtgacagttacaaaaaaaaaatacagtgagtttataaaataaatacagcaaaggtgtgttgagaccgccagtgaatcaggtcactgtgatgaaagccgcacagcaggtctgtgtgttaaccccacgcggcaccttccttgctcactgtgagcaaacagtggaattccctgctcccaagatcctgtgctgcttcccactggcaccactctcagaccgtaagaaatcggtttgctccagaggaagatgatgaagtcatttgctttgaggtccagtgattatcattgtttctgacctaatagaaaatcatccctcactgatgcccagccctgctggtctcgaagcccctcacaggcatcatgtcatgacacccagggtgtgcccagagccccagcaggcaggactgccaggcagggctaggaccaggcctctctgttactaacctagagagcagtcagcaaagcaacccccgagtttgccaacttttcaagcgttggttttttgtctgttgaaacctcggtgtattttagcagaggcgccttcccgagtcacccgacatctgtggctcggggtcatgattgccgcgaccacccggggtgctgagctccgccccggcctggcgtctgctctgaaaaggtccagactcaggcagagcagacaccccagggccactttgccagtccttcagcaggcgccatgggctcctcctccaaacctgttccatcggcctcttagggcctgcctgtaccaccagcccctggcttattgcaccagcgtccggaacggggttcttgttctacctgcccttccctgcagcttgtcctcactgcagccagaagggtcctcagacgacatgtgctagttcatatctctcctctttttttgtttttttgggttttttttgagacagagtctcactcttattgcccaggctggagtgcaatgtcacgatctcagctctctgcaacctctgcctcccgggttcaagtgattctcctgtctcagcctcccaagttggtggaattacaggcgcatgccaccatgcccgattaattttgtacttctagtagagatggggtttcatcatattggtcaggctggtctcaaactcctgacctcagatgatccacccgcctgggcctcccaaagtgctgggattacaggtgtgagccaccgcgctcagcccacatctctcctctttttttacttttattttgtttattattacagagggtcttgctctgttgcccaagctagagtgcaatggcacgaatatggcttactgcagcctcaaactcctgggctcaagttatcctcctgcctgagattcctaagtagctgggactataggcacatgccaccatgcccagataattttttaaattttggtagagacaaggtcttgctgttgcccaggctcgtctcaaactccttggctcaagcagtcctccctccttggtcttccaaagtgctggcattacaggtatgagacaccgtgcccagccctttcctcttttcacacccttctggcagcttcccacgtcactcagaatgaaatcatacttcttccctcagcctgaagcctgccatcagccctagcagccactctggcctcaccactgggctgcagcctcccagcctccttgctgcaaccctgagctaccctcagttctacacttgctggggctgctgggtaccttccctaggtgttggcaggatcactgcccctccactccaggcagagtcagggtgtccctctggcccttctctctgttacgcagtatggcattggtttgtccgggttgtgccccaccctccccagtaggatggcagttctgggtgggcagaaacaagtgttttgtttgcagttgaggtttccccaaaacccagcatgtgtgggtgctcatttgtcgaacaaatgatcacatgcctccaattagaggtgtccaggagacagctggtgtgaggccttgggccacatgagccctgccagtggtaggggtggtatggtgtaccatggaacccagtctgggaaatactgggtaaaggcatgaggcaagatgataaacctggaaagatgtgtccagaatgacttgctcttcctcttttaaagagcatttactggtgtccccatgtgcttttcgtcagactgtgctctcccaccctctgagacctggcctccatccctaccccttcctgaagccctcctgggctgtctgcaggctggcctctcacctagagtgagggccctgccagggagtgccagtcctcctttcggagagaagccactatgccatgagcttccgtcgtgtaaagtcagacccagacagcccaggccctggtgtcaggagtgtggcagcagccagggccggggctctccttctccttcttgggccagccactggtcacacaggtgcactcaaattgggaagctctgtcatgctgtgcacttaggatttgtgtagttttcaaatgtatattttcctccagtaatacaaaatagagtttctttttattggataaaagcgggtgaggggctggggacgcagaatgtttctgagggaagcaggtggtcagggtccatcctccacgcacctcctcagcatcgggctgggctggagctgggcagacgtggcctcctcctgcagggagctcccaggcagcacaggggcccttcccagaggcctggcaggcagcgtgagtggggttgtgaagggtgggcagcagcgtgccaggtgagcaacgcgtgagggggcgtgtgtgtccggaagggacgactggcaaggccagggtgaggctgggccccgcttgctcttcccaccatgttctgttctagcggcttctagtaaaggctgttaatgggcggaggctcacattaggaggcagagcccggaagcgagagagccaagggagacagggaagttttatgttccagagacgttgcgaggtgatggagagaagaggaaagggatgcggggtagccatcctctgcccgctcacgagcacttctccgcctgccaccgtgctgcttccagcgcccatctttctctatctggagacccctcagagactccactttggtccttgctgttcttgcccttctgctgaagcacagtcatctcctcctctctccatcattcccgttgtccttgacttactattcaaaagctagctgcttcaaaccacagcgcgtctcagctctgggccaggactacgggcagtgtgtgggggagtcctggctctgctccaccacgtcggggccctggccagtgggctgaatggcgaggcctgggccgcttttctgtcttctccacgcggccttccgagtggggaaggcgggagcctggcgggagcctctcctccacatagcctggtggcctcagcctcggcctcagctggcaggcctctcccctcccttccctggagcccctgcatcccctggaatgggggcttagcctagaacagcgcttccccaaatctgcacctctgaaccccaggtccatggaatggaaatggatgtgatgtatggaaagggggttccatagccaaacaagttaagctaagttcagagggaaggtggtgaatagaaatcccaaacatctgatcccagcacagcyagcggtggggacttgccttgagtgcgctccaggtggtccctggggactcggtcctggcacccctgccctcctggattgcatcccacagccctgctggccrccccgccccagcctccctgctgtgacaggggcaggggctgcggtgaccctgcagcacaggcgcggctccctcggatcccttggatctcaccggtgcatctgrggttctgcgtggaaagtggctcgggcttccaatgccgctctgctttaagctgggaccgctgtccagggtggtgcccagccttctggcatctgccatccaacccttccctctctcccctcagtggccctgtgtcctccgggcatcaaccctaatgccacctcctcacctgaccacccactgccagttgctcattttatttcctggtggtgcctcccatatctgaacctagcctggtgcttacgtccaattgcctgctctggtgctacctgagagccccatccagcccactcacgaaggcttccagagcctgtgcctgtaacttgggcaaatgtgtggagtgagcgaccaaagggctgagggagcagcgaagggagcccctcgctaggactctaggactctgttctctctgtgtctcttaaaatagctcactcgtggctgggcgcagtggctcacacctgtaatcccagcaccttgggaagccgaggcaggcagatcgctggaggtcaggagttctagatcagcctggccaacatggtgaaaccccgtctctactaaaaatacaaaaattagctgggcttggaggtgggcacccataatcccagctacttgggaggctgaggcaggagaatcccttgaaaccggaaggcagaggttgcagtgagccaagatcacgccactgcactccagacacagtgagactcaaaaaaaaactagctcggacgggtgcggtggctcacgcctgtaatcccagcacttttgggaggccgaggtgggcggatcacctgaggtcaggagttcgagagcagcctcaacatggagaaaccccgtctctactaaaaatacaaaattagcctggcatggtggtgcatgcctgtaatctcagctactcgggaggctgaggcaggagaattgcttgaacctgggaggcggaggttgcggtgagccaagatcacaccattgcactccagcctgggtaacaagagcgaaactccgtctcaaaaaaaaaaaaaaaaaactaaactagctcattcacctcactggcaggctgagacctgcagtcactccagcggcaccctgagtgagctcacacaagagagaactttggccaggcacggtggctcacgcctgtaatctcagcactttgggaggccaaggggaatggctcacttgaacccaggagttcaagaccagcctgggcaacatggtgaaacccagtgtctacaacaaaatacaaaaattagcctggtgtggtggtgtgcacctgtagtcccagattcttgggaagctgaggtgggaggatcacttgagccagggagatggaggttgcagtgagccgggattgcgccagggcactccagcctgggtgacagagcgagaccctgtcttaaaaaaaatttttttaaagagaactttctgacagccagaatcaggtgggggcaggagggagggggtggccctgtgcctgtcagtgttttggctgcggagctgcgaccaagtctggatgtgtttgggatttctattcaccaccttccctctgagcttagcttaacttgtttggctatggaaccccctttctatacatcacacctatttctattccatggacctgggattcagaggcgcagatttggggaagcgctgttctaggctaagcccccattccagggggatgcagggactccagggaagggaggggagaggcctgtgatcactctgcaaagcagggctgggtggggaggccgggcggctggggaagaaacctgccatgtctgggaagaccggttggtccttagaggacctagcagcagcaaaggcaaacactggctcaggcagtggtgactggtggtgatgtgccgacaagagcggccaccgccccgtcctccttgctgctctgtctctccatcctccatgtcctgatccactgggactggccctggggctgaggtgtgagacttggtgcccacgggaggcatttcatacatgcgttcatcagcccacagttaggggcccctgcccagagcagccggcgggtgaggatgcgggcagcctggagagggcacctcgatccgggaggtgcaggtggagggaggtcccactgcctgagggccctgagagtgtctggccccggcaagtgtgtgacacgggcactatgacaggagcactgtgcggccagagtgtggcacagggcatccagtgtgattgtattcacggcagccctgagcacaaagcaaggagcaggagatgtgtggcggcagcgagggatctgccagtttccactgggtggcccactcggtcccatggaggccgaccaggagggcagggacccaagaccacagatgtagcagggaagactgtgggttccagaaaagcaggcagtgccaggcagtgggggacagccagcccctcggggctcgggtcacccaccagcactgctggtgaccagaggcccagatcctccagacagtgctgtgctcgcgggcatggaggcctggtccaactgaggggtgggaagccctggggcaaactggagttgccggtggacagcaaacaggacactggagggacttcctcctgtcctgtgaagagcagacaaaggaccggagatgctgagcatggacagaggctgcccaaggaccagggcagggcggcagtcttgtgccgcggcctggtcaacgcagatgttgcctgcscggcagcacattcgggaggacagctgtgcctagaggagaggggcctcagctgagccaggatggtgagggcagcacaggcaggtggcaggggctcctgggctggcgtttttgtttctcacagtgcccaccatggtccttcacagccaggtccgccgcatctctcctctcattcctccactctctgttcacctgggccatccctgcccttcttggcctcctgctggagtccatgctggtatctgctgggctgtccctcagtctggcccacctgacatyctggagacaagtgaccatctcccccgtgagactggcactaggggcaggacgtggcctctctgcctcctgcggggcccacactggctgctgcatgctgccactaacatgtccccagttccggaagtctcctgtcckttctcttgtcacccaactcctgccttccctgaaagtcccttcccgcttccagcccgccggggtcagcttggtcagcgtccattccagccccaacgaccagatgctgtgggtgcttgacagcaggtggaacgtgcacgtgcggaccgggatcaccgaggagatgcctgtggggaccgcctgggagcatgtgccaggtaggagcctgcagacagggcctgtggtgccggccagccggggctaccatcactgggggctgctgggcgctccctccaggccgctgtctgtgaggcagcctttgtgctggggctgtgctgtcgccgctgcttcctgggccaggggacaagcctcccatcatgttccttatcaggggaacccargccgtcctgctggtgcttttgtgggagggcagtttgcacactgcccaggcccttctgtcctttgacttctggctttcggtggctttgctggccctgccaactggtcgtcctttccctcggctcctgccccaagcccagcccatcatgggcactccgtccccgcagggaccctggtggaggtgtgcagcgtcacaagagtcggcttgggaagcagcggcccatcccgtccatggcaggggctcaggagggaccctgtctgcccacagggttgcaggcctgccagctggcgctgagcaccaggaccgtgtgggcccgctgtccaaacggagacctcgcccggcggtacggcgtcacagacaagaaccccgccggggactactggaagaaaattcccggcagcgtgtcgtgtttcacaggcaggtgcccggggccagtgggcttaaggccccttggggttcccagggctcctgtggacgatgtcggggkgctctcraagaagccgaccccactgggctccaatctctcaaagcaagaactgagggcaaagccaggagtgtgtcccagggagggaaggggctggacacctgggctctgccagagtctcctgggcaaggacaaggtgctgttgacatccacttacagctgagggtacgaagttcacatggagatggtggcttgtccagtgtcccccacctagaatgtggcaagcccagacctgcgcccaagctcccagctccatctgtgcccaagctcccagctccatctgtgcccaccccacaggctgtgtgattgacaagtatgtgattgrctcttgtccctgcagtgactgcgtcagatgagctgtgggctgtgggcccgcccggctacctcctccaacggctgacaaagacgttcagccactcgcacggcacccagaagagcagccaggccgccatgccccaccctgaggacctggaggacgagtgggaggtcatctgaaggagccctggccgagtcacgcggaggggcccggcgtctgtggcgggcacaggggcttcrgagtgactccctggtggacgcrctgyctcaacacttgtccagacacctctggccaggttggacccgcacacttactttcatctatgttggtttctgtctcgttccagaacccacagcctccacccrtggctggcgtgattgctgcagcagtggcgcctcctagctcaggacagtggcgactgcccggctgcatgcactccgattacccacgtgctgccgtcctggtctcatccacagatagctccagcttttgttggtgggagtggtctccggaggcctcccagaaccaagggtagccgggcagctggtttggcccagggcctccttccacattagtagccccagggccagatggagccaaaggtcagctctctgcagcgcgggatgtgctcrgtgatggctttgtcccatcataggggggtgtccccccagagacaaagctgcagagcacattccatgccagacgctctggccaggaagctgaggccgggcttgagaggagagcgctggccatgccaggagagaacccacgcacatgcacaccacaacacacaacacacctcacctcacaccacagcacacctcaccacaccacaccgcactgcaccatacctcaccacatctcaccacaccacagcacacctcaccacacaacacaccacaccccacaccgcactgcaccgcaccgcaccgcaccgtacctcgccacatctcaccacaccacaccacaccacacctcactgcccacacacggcgcaggctgcccgcctcctggagagcrcwcttcagctgaaacagtaaagcctgatgggtgcaaatggaacctggatgtgtgcacgtgtgtcccaggtagggacggcacaggagggtgcatggggcgtgggggagctgagcaagggtcgctcacttagaaatgtctttggaatggtgtttaactaatgctgctggcggacatcctaaaaccagatgcatcctcagaggacgagtctactaattattgcctttgttgttgtattacaaatctgcataaaatacctcatttcaaatcaaatcttacaaatttagaagagagatatgttttccgaaaacagtggaagccctttgttccttcccgggtttgtcctgagcytgcactgtcctygcctgcagcctcagaggggcaggcatccccgcacagacttgactggcagggcggtcacgggacctgcgggctggctccgagtggcagcccatgccttctgcrgggtatgggttgacacttgacaggttgaaaccagtgcctctatggacggctgctgtggccccttcagacaatgggcagtgcccaccccgcccactggcrtctgcgtgtgagggctaggccgccctgccacacatcccgccccctcccggaggcagcttcaggacaggacaccaggctggctgctttttttagcctgcccctggcccaggcccagtccttggtgtcagggagcccccaggccgcaggtggagggtgataaaatatgttctctgacaggacccagccagccacataggtggaggttttccatgtccaaatgaggtcaagatgccgaaatcccagatctgacttcacacttcccttttctagaaccttttgtaaaagttggtggcagcagaggcagccccaggccgggctgcatctctctgtgtctgttgtgccttgcccggcgcctcacggatggcaaagctctcctcacccatgggactgtagtgcaattaaacccgcgtctaggtgatgcttttaaagttgtagcttcgtgctttgtacagttttctttctggttttaatttttagttgtgctttgagtcagtgcaataaactagactttttccaaacctggccgagtgtggtgcctgagctgtgagaagtgtcctcagccgacactcacgagggcagtgcaagggagaacctgccagcccagccccaccacagggagagtgcgtcagcagacctgtcctggcctggctggtgttgaaatacacaccggtttgcccaagtggctgttatgggggaatggccgctccagagctggctgtaccccatggtagcctctgaggaggacgctgtggggtgaggtccagggctgcctcctcatggagctgtgtgtgagcaggcgttggaggggttcgagcccctggttctgtatcttcagccagcaaacgaaaccatatcgcaaaccagagctgctggaaaccagcacacgcaaaagatgacgcccagcacagcagcaggacacaccatgtgccaggaaatgacctcagcaagaaacctcaggccgtgtgaagagcagcaaagctttccagaaggcataaaaggaaacttgaataaaggaagatatgttccacattcctggatggaggactacacacattatggaaagacctcattctttccaaaggaatttataggtgtagcttgatttcagttcaaatccccactgggattgttttgttggggcaggcagggaggaataatgttagtacccacaaatgcccatgactgtgcccaatgtgcttctcaccagagccctgcaaggggaagtctcattagccccttgagactcagagaggttaggtaacttgctcaaggtcacacagcactgggactggaagccagctctgtagaactgcagacctgtgctgtttgatgcctcctcactgtcccgtcactcctgggaagaagaaacgggtgagaactgctaagtgatgacaggtggagccccagcaggggccactctattgaatggcatggcccagaccctcggagggccaggcaacaggctagcaaggcccacagggagggagcagaatggagagggcatctcagatgcgcttaaggagcggcgggggcggggcatggggggtgtcacaactaatgtggccactgcttcattctctgggcaaaataatattaaatggattaaagaatctaaaaccagtgggaaaactgtctgatttctggatggcaaaggctttctaaactcaaaagtgataggacaagctacagaggaaaataagtacatagatttgatttctccaaaatacagaaatgctgctgggcacagtgatgtgcagttatagtcccagctacttgggaggccaaggcaggaggattacttgagcccaggagtttgaggctgcaatgaactatgatcacaccactgcactccagcctcggcgacagagcaagaccttgtttctcaaaaataaataaatagaaggaaataaatgtaaaaatgctgcaaattaaaaacctcaaagaagggaaataattgcaacaaatgggaattgatgttgaatatttaccttaaaaacctatacaacaataagaggagtgcgcccttcagcagcatgtatacaaaaattgcaacgatacagagattagcatggcccctgcacaaggatgactcgcaaattcataaagctttccataaatatatttattaaaaaccaataggaggagcacttcgagtcgagtgtaagggcccttcacaaaagcagaaggaacactggcccaaacccccagcaccccggaagcagaggtgagatgggagcagcttgggagccccccattggcgccgccctactggggaagccggtccgtacgtaggccttgcatctcgccacctccacttctgtcctcaagaacaagtcctaggtcaagggaaacagcacagcctgtttataattaggaaacacttaaaacagcctggcatttgggaacagccatgttaacgtgagcaaattcctctcatgaaatagcctgcagctattaagaagcacgtgtgtgcaggaagcggaggcgcaggacctcaccgcgccagcgtgaagttcccgggcatggtcatgaaagcgtggttctgtaagaaatcagagggagaaagggagagaagggggagggagrcaacccaaacgttggagggtatttgttgtaaacttcaaacttttggcaggtttgaaatttttcataactccggggaggagcaagaggggtgaaaagaaacaagttctctacttgtgatcagcagctggtcatagtggttgcctggagtatatgcctttttgtatcctttgaatttccagccatgtaaatgtattatttattccaaaaataaagcagatttacattttaaaaattcagttgtctctaactactctttgttatcaaggctggttgagtcaaatatcacaaagtagacaccaatgacttcttaaaaatcatatttacaaagtacaatgggggaaatgcttatactacattaaggttaaaaaaatactaaattgtgtaactgatctggtttcatatatatataaatatacacagaaaaaaatgtaatatatatctgcacagaaaaaagctgaaagaaacatatgccagaatgctagcagtgcttgtatgcgtgcagatgacgcactcagtcagcgcctttacttgtacgtgagcgcttaggggccctgtctctggggaccatgtggggcggtggggcgcttgagacagtgtttccctgcatcgtggccggacctctctactcaatccccagtgttctacagtgaacatgaattttataagcagaaagaaattacttttaagagccaggcgcagtggctcacacttgtaaccccagcactttgggaggctgaggcgggcggatcacaaggtcaggagttcgagacctgcctggccaacatgctgaaacccagtctctactacaaatacaaaaattagccgggcgtggtggccagcgcctgtaatcccagctactccagaggctgaggcaggagaatcgcttgaacccaggaggcggaagttacagtgagctgagaccacaccattgcactccagtctggatgacagagcaagactacatctcaaataaataaataaatacataaataaataaattacttttaagaatcaccaatagaaatctgtctttccatcttttttttttttttttttgagatggagtcttgctctgtcgcccaggctggagtgcaatggcgcaatcttggctcactgcaacctccgcctcctgggttcaagcaattctcctgcctcagcctcctgagtagctgggagtacaggtgcctgccaccacgcctggctaatttttttatttttagtagagacggggtttcatcatgttggtcaggctggtctcgaactcctgacctcatgatccacccaccttggcctcccaaagtgctgggattacaggtgtgagccaccgcgcccagcctttccttccatcttgattgcagtggtgattacacacatgtagacattcatcagaactcatcaaagtatacacttaagtctgtgcattttattacatgtaagtaacacctcaatctgaaaagtatcagggcaacaccacacactgcagaggggcagggctcctccggcagttactcacttcccttgaaacagaagctcaaacatggagtagtcttctgtgactaaacttgttttccgccctcccaacttccaggaagaaccttcttctgaataggatttgaggtaacttaggaaactgctctcaatacggaattttaaagttggtgaggaagtcgacagaaggggaagtcacagtaggaaaatcaaggtactatcaggatgaagtcagcacgcagagcaaggccagcgaggcccaggcgccaggccttggtccctgcccacctcacccaggccagccagacagcacggactgccctacaaggtcacctcagagagatgggggtgttctctcactgctggcttttgatgagcccaggagggctcagccttcactatcctccctaacaggcatttggggtgcagagatgctgacgcctgaataaggttgggattcggggcccttgggaacactgggcacctggtgggtgggtggaggggcaggacgggctgcagccatgtttcccttagaaacagactgctggaattaacgaactaaacaaatgaaccaaggtgcttcaccccccaaaaaagtgagttttgttctgcgtggagcgattgcctttgggaagccaccaaggccacctgccaacaggcaaatgctgtgctgccgtctgcctggctgactccggccctcccagtcctgcaagctcatggccaggacgataacgatgacaggggcaacaccatggtcctcgctgcccttcctggggcaggagggcccagaagactgataagctaaacccagggcctccctcggctgcttatctgcccagcacctttcctctaggtcctctcctcccaccagtacaggggtctgggagggggttgcagggggtcctgaaccacagatccctggagactcagtgggagcagctgtaccaggaatcaggcaccactccgctgctgtaagtctgcgtgagagccactggccagcttcctctgacttccctgtcccctcacccaaatcgatgacatcaggagctaatggcccaggctgccctcctgctgcagtgcccataattcttccggcaggccccgccctgcactccacgaccagcctgggttcttcatcctggtaacctgacaatggatttcgtggggcccactctcagtgcccgccagcctgtgtcctgcctggccaggcaatgagtaccggcggcaggcagctgcctcacccctgcatgacccccccagcccaggggactcaatggcgctgtcatcaaaggggcagctgtagatctaggagggacgtggagggggctagccctgggcctctggcattgtggaggctgacctatagagaacagagctggagctggggagacatgaagtctgcacatctagaccccagtgaggagcccaggctttctaggcacaagccccatgggctccccgggcccagcccctaagaaccacggcagctgcgccaggccactcctgtctccacttccataccctccaaaggagaggcacctcccccccccatggcatctccaatctgaggacctgccacctcccagaggaccggaggccctgatgccccaagaattgggcttggaaagatgttaatatccactgccccaagtgccaaggttcagaggcactggtccaggacacacagcagcggggaagtggaaccctcactccagcctgcagtctgggctctgtcactgtgctgtctctccatccttccctccccacaaccagggctgtaggcccacctaacacaccacacacttcccagaaacaggagtcacatccttttcagggctggtagggtggctgaagatggcccaaaacctcctgaatggaaaaaccttgatggggagactgagggccaaggcagaggtttgtccaaggtcacccccagagtggcggatccaggaccctgggcaagatcttcctactgtccaggcctctcccccacctctcttgtgtggcccagcaccctggactcctccatgcccaggtgtgctccccccaggcacgctgggggcagggtgggcagcaggtgccccccaccaggatagtggctcttcctcctgcagaccttcagccctctgctcctggcaggacactgtggccctcctgcccacgttggtgcgggttgaatttgacggcccagcagaattcccaggcagggcagcctggctatcctccctggtgtctcggctctgagagcggagacccagcctcccagcctggagttgtggtgaattcgcaaacaagtctccatctccagaaccttcctgaagaaaacagctctccaggctggggcaagaagcctgtccctacagtgatacaaccacccctcaataaccccgggcaccacctggcacccactgggggccaccagggagcccaccaagcccactc

SEQ ID NO: 8770 - DNA, 84156 bp, Homo sapiens
  misc_feature (1)...(84156): n = A,T,C or G, or insertion/deletion polymorphism (see Tables 1-2)
aaaaggaaaattaaagaaaaggaaaagaaaagagagagagggaaggaagaaagaaagagagaggaaagcaagaaagcaagaggccaggtgctgtggctcacgcctgtaatcccagcactttgggaggccgaggtgggtggatcacgaggccaggagatcgagaccatcctggctaacatggcgaaaccccgtctctactaaaaatacaaaaaattagccaggcgtggcagagggcacctgtagtcccagctacttgggaggctgaagcaggagaatggcatgaacctgggaggcggagcttgcagtgagccgaggtggcgccactacactccagcctgggtgacagagccagactccgtctccaaaaaaaaaaaaaaaaaaaaaaaaagaaagagagaaagaaagagggtcttgctatgttgcccaggctgatctcaaactcctgtcctcaagtaatcctctgcctcggcctcccaaagtgttgggattacaggcatgagccacctggcctgcatctgatttatctttgaaacatccagggactagtaaaattggtgcacccagaccaattttttttttttttttgagacagaattttgcacttgttgcccaggctggagtgcaatggcgcgatcttggctcactgcaacctcagccaaggaattcgggcagcctctagaagctgaaaagggaaggaaatagattctcccctagggcgtccagaaggaacccatcttcaccaacaccttgtagtcctgtaaggcccgtttcagattctgacctctagaactataagataataaaactggccgggcacggtggcttacgcctgtaatcccagcactttggaggccgaggcgggtggatcacgaggtcaagagatcgaggccatcctggacaacatggtgaaacccgtctgtacttaaaaaatacaaaaaattagccgggtgtggtggtgtgcacctgtaatcccagctacttgggaggctgaggcaggagaatcacttgaacccgggaggcggaggttgcagtgagctgagatcacgccattgcactccagcctgggcaaaaagagcaaaactctgtctcaaaaaaataaaactaaaataaataataataataataaaactgagtttgtggtaatttgttacagcaccgagaggaaacaaatacaactgcctgccacctgcatccttcccatgcgcccccatacatgcatgcatgcatgcattcattcattcagtgttatgtgttgctccaaacactgaggacacaggagaacaagagacaggtttctgccttcaaggggcttacattctagagagtgcagacagccaatgaacaactcaggaaataacttcagtagtaagtggcatgaagaaaacgaaacaaggtactgggaaagtgaccactgctgctcacctggaggagttaatttagacagagtggtcaagaaggggggtctctgaggcagtgtcatttgcactaagctttaaataagaaggagccagttttgtgttgacctgaaagaagagcattgctggcagagcaactagtgaggggataaggtctgaaggaagaatgagcttggagggtctgaggaacagaaaggaggccagtgtggtggaacagaaagaatcatggggaggccatggcagaggaggtggttagagaggaagggaggggccagaccatgcaggggcatatataccacagtaaggagtgtacattttaattacagagagaagcttaagaatttcagtgggggagtgatgagattgtattttttttttttttttgagacagagtcttgctctgtcgcccaggctggagtacagtggcttgatcttggctcactgcaatctccgcctcctgggttcaagcaattctcttgtctcagcatcctaagtagctggaattacagacaagtgccaccacacctggctaatttttgtatttttagtagagacggggtttcaccatgttgtccaggatggtctcgatctcttgacctcataatccaccgcactagtcttggcctcccaaagtgtttggattacaggcataagccactgcacctggccgtttttttttttttgtttttttttgttgttgttttgttttttttttgagatggagtctagctctgttgcccaggctggagggcggtggtgtgatctcggctcaccacaacctccgcctcccaggttcaagcgattttcctgcctcagcctcctgagtagctgggactacaggcatgtgccaccacacctgactaattttgtatttttagtagagatggggtttcactatgttggccaggctggtctcaaactcctgacctcatgatctactgccttggcctcccaaagttctgggattacaggcgtgaggccccactcccagccctttttttttttcttttttaagagtcaggatcttgctctgttgcccagactggagtgcagtggcactatcttggctcactgcagcctcgacctcccaggctcaagggatcctcccacctcagcctccccaatagctgagactacagtcatacaccaccacacctggctaatttaaaaaattttttttgtagagacgaggtttcaccatgttgatcagactggtctgggactcctgggcttaagggatcctcctgcagcactggcattacaggtgtgagccactgcacctggcagtggtttgctttttaaaataatcagccttcgctgggtgtggtggctcatgcctgtaatcccagcactttgggaggcagaggcggatggatcacttgaggycaggagttcaagaccagcctggccaacatggtgagacacccatctctgctaaaaaaaaaaaaaaaaaaaaaaaaaaaatcagctgggtgtggtggcacatgcctataatcccagctacttggagactaaggcaggggaatcgctgaacctgggaggtggaggttgctgtgagccaagattgcaccactgcattccagcctgggtgatagagtgagactctgtctcagaaactaaactaaactaaaacaatcagtcttgttgctgtgtggtaaaagaactgtggtggacaagaatagaggcaagaaggccaggtaggaggccccaatataatctaggtgagagataatggtggcctgaacaagtaccacagcactgaaaaagaaatctctcttccatttgccctccagtcacccatttcttttccctggaggcaacaactgttaatagtttcttgagaatcattctggaaatattccatgcacaaacatagcaaatgcatgtgtaatttttttttttttttttagacggagtctcgctctgtcgcccaggctggaatgcagtggcatgatcttggctcattgcaacctccgcctccaggttcaagcgattctcctgcctcagcctcctgagtagctgggactacaggcgtatgccaccatgtccggctaattgtttgtatgtttagtagagacggtttcaccatgttagccaggatggtctcaacctcctgacctcctgatccgcttgcctcggcctcccaaagtgctgggattacatgctgtaattgttttttaagaggagaatttagaaagattactagaaaacggtcgggcatggtggctgacgcctgtaatcctagcactttgggaggctgaggcgggcggatcacaaggtcaggagatcgagaccatcctggccaacatggtgaaaccctgtctctattaaaaatataaaaattaggccaggcacggtgtttcacgcctgtaatctcagcactttgggaggccgaggcaggtggatcacaaggtcaggagttcaagaccagcctggccaacatggtgaaaccccttctctactaaaaatacaaaaattagtcgagtgtggtggcggatgcctgtaatcccagctacttgagaggctgaggcagaggattgcttgaacccgggaggcggaggttgcagtgagccgagatcacgcaactgcattccaacctgggcgacagagtgagactctgtctccaaaaaaaaaaaaaaaaaaaaaaaaaattagctgggcgtggtggtgggtgcctgtaatcccagctactcaggaggctgaggcaggagaatggcgtgaacccgggaggcggaggttgcagtgagccaagatcgcgccactgcactcaggcctggtgacagagcaagactctgtctcaaaaaaaaaaaaaaaagaaaagaaagattactagaaaattagctgggcatggtggcacatgcctgcaatcccaactactcgggaggctaaggcaagaagaatcgcttgaacccaggaggcagaggttgcagtgagctgagatggtgccactgctcttcaatctggcaagagtgagactccatctcaataaaaaacccccaagaaacaaaaacaaaaaagaatgattactagaagtgtatcttgtttatagagtcatagagagcttgttgtgtttatacagaaatgattatctttcctagataaaactgtccctagagtagaggagcaatttactactccagccctaatcctgtgctgatgaaacaagccttagttttatagtttggtctcctgagttaacttcccggataggagggactatcccaagaaagtgactgatgttagttgtttattttttttgaaatggagtctcgatctgtcgcccaggctggagtgcagtggtgagatctcggctgactgcaacctctgcctcctggattcaagcagttttctacctcagcctcccgagtagctgggattacaggtgcctgccaccatgcccggctaatttttcgtatttttagtagagacggggtttcacttcttggctaggctggtcttgaactcctgacctcgtgatccacctgcctcagcttcccaaagtactgggattacaggtgtgagccaccacgcccagcctggtttacctatttattttgatcgttattttagagtgtactctttctgcttaaaagaaacaagttggtcaggcacagtgactcatacctgtaaccccagcaccttaggaggccgaggtgggtggatcacctgaggtcaggagttcaagaccagcctggccaacatggtgaaatccccatctctactaaaaatacaaaaaattagccgggcatggtggcgcacacctgtagtcccagctacttggaaggccaaggcaggagaatcgcttgaagccaggagacagaggttgcagcgagttgagattgtgccattgcactccagcctggacaacaagaacaaaactccgtctcaaaaaaaaaaaaaaagaaaaaaaaaaaagaaaccagttaactgtgaaacagcctccggcaggtctttaggaggtattccagaaaaaggcatgttatcacaaaaggtgagtgttattgcccctgaagatcttccagtgggacaagatgtggaggtgggaggcccaggcgggtggattgatgatcccgtccctgggtaggcctaggctaatgtatgtgttcatgtcttagttgtcttttccttttttttttttttgagatggagtctcgctctgtcacccaggcgagagtgcagtggcacaatctcggctcactgcaagctctgcctcccgggttcatgccattctcctgcctcagcctcccgagtagctgggactacaggcgcctgccaccacgcctggctaatttttttgtatttttagtagagacgggggtttcactgtgttagccaggatggtctcgatctcctgacctcgtgatctgcccacctcggcctcccaaagtgctgggattacaggcgtgagccaccgtgcctggcctcttttcttttcttttgagaaaaggtcttcctctgttgcccaagctggagtgcactggtgtgatctcagctcactgtaatgtctgcctctgggctcaagcgatcctgtcaccttacccttccgagtagctgggacgagagaggcacacgctaccatacctggctatttttttttttttttttttttttttgtagagacaggggtttcaccatgttgcccaggctggtcttgaactcctggactcaagcagtcctcccatcctggccttcccaaagtgctgggattataggcatgagctaccgtgcccggacatgtcttagtttttatttttattttttattttttgagacagagttttgctttgtcacccaggctggagtgcagttgcgccatttcggctcactggaacctctgcctcctgggttcaagcgattattgtgcttcagcctcccragtagctgagatgacaggtgcgtgccaccatgcctggctatttttttgtactttagtagacacagggtttcaccatgttgcccaggctgctctcgaattcctggcctcaagcaatccacccaccttggtctcccaaagtgctgggattacaggtgtgaggcactgcgcccggcccatgtcttagtctttaataattttttttttttttgagacagagtcttgctctgttgccaggctggagtgcagtggcaggatctcggctcactgcaacctctgcctcccaggttcaagtgattcttctacctcagcctccygagtagctgggactatagacgcacaccaccacgcccagctaatttttgtatttttagtagagatggggtttcaccatgttggccaggatggtctcaatctcttgaccttgtgatctgcctgcctcggcctcccaaagtgctggaattacaggcgtgagccactgcacccggccaaaaaaaattttaagtaaaaagatcaagaatttttaaaatagaaaaaagcttatagaataaagatataaagaaagaaatatttttgtacagctgtacaaagtgtttgtgttttaaactgttattacaaaagagttaaaaaggtaaaacagttgataagtctataaagtaaaataattatagtaacctggtgccagaggcagtggctcgtgcctgtaatcccagcactttcagaggccaaggtgggaggattgcttgagctcagaagttcaagacaagcctcccctgctagttgagtgagatctcgtgtctacaaaaacaaacaaacaaacaaaaaacaacaacaacaaacaaacaagaaaagaaaaggaaaattagccaagcatgatggagcatgcctgtagtcccagtactcaggaggctaaggcaggaagatccattaagcctgggaggtagaggctgtaatgacccatgattgtgccacagcactcaagtgtgggtgacaagagtaagaccctgtctccaaaaaaaaaaaaaaagaaagaaaaaaaaagttacagtaaactaaggttaatttattattgaagaaaaaatatttaaaacaaatttgctgagcacggtggctcacgcctgtaatcccagcactttgggaagccgaggcaggcggatcacgaggtcaggagtttgagagcagcctgacaaacatggtgaaaccccgtctctactaaaaatacaaaaattagctgggcatggtggcacactcctgtaattccagctactccaggagactgatgcaggagaatcgcttgaacccaggagatggaggttgcagtgagccgagatcgcgccactgcactccagcctgggcgacagagcgagactgcatctcaaaaataaaaaataaaataaataaataaataaataaataaatttaatgtagcctaagtgtacagtctttataaagtcaatggtagtatacagttatatcctaggccttcacattcactcactactcactgactcacccagagcagcatctagtctggcaaactccatttatggtaagcaccccatgcaggtgtaccatttttaatcttttttttttttttttgagacacagtctcactctgtcgcccgggctggagtgcagtggtgtaatcttggctcactgcaacctccgcctcctgggttcaagcgattctcctgcctcagcctccggagtagctggggttacagccgcctgccactatgcctagctaattttttgtatttttagtagagatggggtttcaccatgttggtcaggctggtctcaaactcctgacctcgtgattcacctgtctcagcctcccaaagtgctgggattacaggcgtaagccactgcgccctgcccatttatttatttatttatttatttatttatttatttatttatttattgagacagagtctcactctgtcgcccaggctggagtgcaatagtgcgatttcggctgactgcaaactctgcctcccgggttcaagtgattctcctgcctcagcctcccgagtagctgggattacaggtgcccaccaccacacccagctaatttttgtattttttgtagagacagggtttcgccagcttggccaggctggtgttgaactcctgacctcaggtgatccacccgcctcagcctcccaaagtgctgggattacaggcatgagccatcgtgcccggcccatttatttgtattttttgagatagagtctcgctctgttgcccaggctggagtgctgtagcgtgatctcggctcagtgcaacctctgcctcccgrgttcaagcaattctctgcctcagcctcccaagtagctggrattacaggcgctaaccaccacaaccagctaattttttgtatttttagtagagatgggatttcaccatgttggccaggctggtcttgaactcctgacctcgtgatccacccgcctcggcctcccaaagtgctaggattactggcgtgagccactgagcccggcccatttttaatcttttatgccatagttttactgttcgtttccttccttccttccttccttctttcctccctccctccctccctccctctttctttcttttttttctcaagatggagtcttgctttgttgcctaggctggagtgcaatggcgcgatcttggctcactgtaaccttcgcctccagggttaaagcaattctcctgcctcagccgcacaagtagctgggactacagatacctgccaccacgcctggctaatttctgtatttttagtagagacggggtttcaccatgttggtcaggctggtcttaaactcctggtctcaagaaatcagcccgcctcagcctcccaaagtgttgggattaccagcatgagccacagtgcctggcctactgtatcttttctatgtttagatacacaaatatcattatgttacaattgcctacagcgttsagtacagtagcatgctgcataggttggtagcctgggagtaatagactctaccatatggccttggtgtgtagtagactataccatctaggtttgtgtaagtacactctaagatgttcatatgacaaaactgcctaaggatgaatttctcagaacatatccctgttcttgaggacacatgactctatttacatatgagaaaagaaagcatatgtccacacagactttgtacacaaatgtttgtagcaagttttttttctttttcttttttttttttttttgagtctcactctgtcacgcaggctggagtgcagtggcacgatctgggctcactgcaacctccacctcccgggttccggcagttctcctgcctcagcctcccaagtagctgggattatgggcgcctgccaccatgcctggctaatttatatgtttttagtatacacacatatatactgtgggattccatttatgtacgattctacaattctagaaatgcaaactaatctatagttgcagaaagcaggtcagtggttgcctggggacagtgctgggagtgacaggatggtgagattacaaaggagcaagaggcaacttctggggtgatctatatgttaattatcttgagtatggtgatggtttcatgggtatacacttgggtatatgtcaaaacttcggccagtcgcagtggctcatgcctgtaatcccagcactttgggaggcggaggcaggctgatcatggggtcaggagttcaagaccagcctggacaacatggcgaagaaaccatctaaactaaaaatccaaaaattagtgggcctcgtggcacatgactgtaatcccagctactcgggaggctgaggcagtataactgtttgaacttgggaagcggaggttgtagtgagccgagatggcgccactgtacttcagcctgggtgacagagtgagaccctgtctcaaaaagaaaaaagaaaattacagtccctaaagtggagtacagcagaattcaggggacctagaagttgaacagacctatatttaaacttgtccttgatatgtgaccttgggcaagttacttgttttgggttcccattcctttttttttcttttcttttctttccggatgaactactgtaccnnnnnnnnnnnnnnnnnnnnnnnnnnnnnnnnnnnnnnnctgcctcagcctcccgagaagctgggactacaggcacccgccaccacgcccggctaattttttttttgtattttttagtagagatggggtttcgccatgttagccaggatggtctcgatctcctgacctcgtgatccacccgcctcggactcccaaagtgctgggattacaggcgtgagccaccgcgcccggcctatctggcaggttctttgcaaagtcctttgcaaagattatttcatttagttctcaaaatgttcttgtgaagtgtttttaaattaatttttggaggkttagatagagtaacttgcccaaagctacacacaaagctaccaaagagcgaaggaaggactcaaacttaggtctgtcagactccgaagctgggctcttaactcctgcacgacactgccctctatggtcatcccgaggtactaacatcaatgaggcctggttaactactcatgacatcatctttaactgtagcctgagaaagtcacccaattttctttttctttttttttttttccagaaagaatttcgcactttcgccaggctggagtgcagtggcatgatcttggctcactgcaacctccacttccaggttcaaactattctcctgcctcagcttcccaagtagctgggattataggcgcgtgccatcacgcccggctaattttgtattttttagtagagatggggtttccccgtgttggttaggttggtctcaaactcctgaccttaggtgacccacccgcctcagcctcccaaagtgttgggattacagcygtgagccagggcgcctgatccggaagtcacctttcattcagagtgcctgaatcagggtaaatagtgcattatactagaaaaaaggatgtgtcttcaggacttctttctggggtccagggatgtgggagggagactgtattcctcttccccaccccaatcgatctcctcctctcctagtgctccccacacccctcccaatgtttctgggcctatctcaccttgctgccttcccacacattctcatatttcagaaatgatgagtccaacactgatctaagagagtagagagaaaaggttaggaaaatagccttgggaggcagctgtgaagtcagggtccctgggcctgtagatagtgagttgggactccaagtcacactgcacacttggcttgtgagcatgatgttcaccatggctcagttgcacctattcgtgcagtcaccaccagaagcccargcctccagctcattccacgtctctcagattctggttctcatgcagtcctttctgaccccatttgcactcttccccatctcctgaaaccctttcacagctttctggaacccaggattcatcatcaataaaatcctccaaatgcaacattcccttcaccatctgctctgcagtatagtccrcagaccagttgcatcacaatcacttgggacactattaaaatgcagattcctggccaggygcggtggctcacgcctataatcccagcactttgggaggctgaggtgggctgatcccttgagatcaggagttcaagaccagcctggccaacatggtgaaaccctatctctactaaaaatacaaaaattagccgggcatggtggcgggcacctgtaatcccagctactggtaggctgaggcaggataatcacttgaacccgggaggcggaggttgcagtgagccgagatcgggctaccgcactccagcctgggtaagagagagagactccatctcaaaaacaacaaagtttgggattattaagacgaaaaactaagtcaattcttaccagctaggttcttgaaagtagaatctatggagacaatcaaacaacatactctgcgcttagaatgcagagtatgttgtgagtttgtaaacccacagaagaggtagtagttaggacccacgtgacaggctgtgactctagacacttcaagaggaatcttggatcagctctgtaagtacacccacaatcacgatttactatttgaatctggttctgttgagcaagctggactttgggatcactcagattcagtacccatttttgccttggacctcttaattttcttctatcacttcctgtttacccttggtgtgrtcaggttgcaaggggcactgatgtcttgagactccctgaaggatatagattatcgcctacattcagtgctcttacacactccgggtttgccacagatrttccagtacaaacactggtgtactgacagtcaagtcaggtcagcagttcttgtctcagatttctgytggggagtgcattccaattaacagaacctccacattctaaaatctctacccgttccttaggctgggtgcagtggctcacacctataatcccagcactttgggaggccgaggcaggtggatcatttgaggtcaggagtttgagaccagcctggccaacatggtgaaaccccatctctaccaaaaaaataaactagctggtgcatgcttgtaatcccagctatttgggaggttgaggcagaactgcttgaaagggggcaggggtgcaggtgactcccaagtgtctaaaatctccaagctatacaggtgttacctttcactggcgaagtcagtaacaatttactcccaaatagattttttttttcctgaattctaggacaaattaaactattgtcatacagacaaaaataaggtagagcctttctctaccttatatttccgggatgtctcgtttctagaaatgcctttagtgtcttttccaaggtaggaagatgagcatctgaacattaatccttttatgctctgaagctatccaagtcatacatccactattcaagttccccctccaggggtataaacacctcagtttaggtcacttcccaatgtgctcctcactcaactaatagcttttcctcattctcctaatgtttacccatttttaggatgccaacttaaacttgatgtggttaaatccaaaattcagatgcctaatctccatttcacacagctatgcgaattgtgaggccaaccatacgaccacaattaaagtttaatttacataaatagctaggcgaggtggctcaagcctgtaatcccagcactttgggaggccaaggctggtggattaactgaggtcagaagttcaagaccagcctggacaacatagtgaaaccccatctctaccaaaaatacaaaaattaaccaggcatggtggcagacacctgtaatcccagctactcaagaagytgaggcaggagaatcacttgaacccgggagacggaggttgcagtgagctgagatcacgccactgcaattcagcttgggcgacaaagactccrtctccaaaaaaaaaaaaaaaaaaaagaaaaaaattaaattacatgaataagctttcttccccatgaaaataatrtgtgtcacttcacacttggtctaacacacaaaatccccaccytatctggcacagatacacttaacatgcaatattaagtacaatttccattttatttttctccagagaatagcctgtcttcagtctttaagaactcagctccttacatgggctttggtgggggwcgtggggcagcaccctgaaagacaaagaaacaaaagagtaaattaaaacccatggatccaagactcccttcccccaaagaacttgaccaccatcctctcacaaactgatgtattcaggctacaaatgcatgggaagctgatagaggtggagggagaacactactctgcatcctaaaaaccaattctgattctaacactgctttgcagtgtctctaagcatgttcaggtgtgggtctcacctgccttacagcttaacctgaggcacagaccttaatttgataccccctgcaccacaggaggaagcaacttttttttttttttaagagacaaggtctcacttttgccctggctggagcgcaagtggtataatcatagctcactgmaacctcaaactcctgggctcaagtgatcctcctgcctcagcctctcgagcagccagactataggttcacactatcatgcttggcttccttctcaatattttttgaagagatggggtcttgaactgctggtttctagcaatcttcttgtcccagcctcccaaagtgttgaggttacaggtataggacaccctgaccctccaggatgaaattttaaccatcactcccctgrmttccattctccttttaaaatactcaccgcaggtctaaatcggggtgggggtgttcggtccttgcgggcttcacgagatcgattcctgactactttgctgtgaattgcacaactcacacagtaatgtagcttcacatacagcttgggaagcacataggctaaggaatagaaaatagagttatactggtattatatacctaccttgcttttttgttacatgaatgaagagcaccttacatgtttacgtcaattaaaactaaacctatttaaatgcctgtcgggcacataaaagcacccccaaagcacctgttcagcccaatacctgagcacatatgtataaccctcagttttacaagtgaattaacatcccacgtgagttcatcttgacaccgcaaggaccagactgacattctaaatgcaataaaccaataatccagttccttctacacctacacccgccctaatgcctaccctgaaccttgctctttctataaaaggaaaaaaacaaagcgacgttcttattgctccaaacatcatccttgcacaccaaactagacggcctccattctcgaaacgttgaagacattcttcctcacctgtatattttcacaaatattcaaataatcaatagcacaagaattgtcaaatttaccaagtttctagtttttgcaatctcataaccgaaacaggcaaasctttacctcagagtaaaggctgtgcactctatcacaaagtcaccctctgcccagaaaagaatcaaaacggcaaacaagagaattctcttctaccagtaacaaccttaaatacgtggaaattgcctgagaggctccaamgaacagagcctccaaaagggcgaagttgggcgaaggctttaagatactgggatcctcacacagttcgcgccggtgacccacttaccatcgaagacgctcgcttcagaaatgtccctgactgctgcggcctccactatgtttcgaatgacgaatttcttaatggccttgtccttgggcacgcatcgggcacagttagtgcagcgaataggctgcacgtggccgcggccctttttggcacgaccattgttccttcttttctttgtctgcgacaggatgggaaaactgttaggaaaacggcgcaactcacccagcctcagtccctttccggccacaagccgcaccggcagcctccaggaaggcsccgctcggatctcctgtttctccgcaaatcccgccgacccccagagcaaatgaaatgtacactcggtccacccctcagccgtgctccaggctctcacttccccacaatcccagagtctgcacccgaacccccaccctcaccacgcaagaagactcaccatcttggaggcacggaccggagasaggagacggtgcctggcagggccctcctatatagcatgagatccctacgcggacaccgggagaatccttaggagacgggcttcaagaacggcaactcactttactcaaatattcctttacattcagcatttctgctgaaatctagggtggaaatgcgttcctagtgtttatttatccatggaacaaagtgcacatgggactatttagccggatggcggaagaaaatcgaggttatgtgtctcccagcaagccttgcgccgcgccgactcggaagcaattctggacgatgcagttttccggtatacgcgacgctaggmgtgaaagttgccagacgctggaccacaaggcgcactcgttattagaggccagagagggacagatgcttggtgggaattgtagtgcgaagccaagaggctcccccctcscccccttcccccctgccccaagtgcttagaccgaaggcggcgctgcgccaccgggggacgccctgggctcatttctctgacagtccttctaytaggtaggtgtaggattacgaagaggaaggcctgagaggaaacaagcattttgtgaatccctccttccaatatggagaaaatcccacaatgaagtgcattgaggctggggctatttctcattcatctttttatctctggcacagtgcctggccctgtggtaagcgtctttataaatattaactcatttaactttgagcaagcctataggtagctactattattatcctcactttaaagattgaagaatttagcccggcctggtggtgggcgcctgtaatcccaggtactcaggaggctaagacaggagaatcttgaacctgggaggcggagtttccagtgagccgagatcgcgccactgcactctagcctgggtaaaaagatcgaaactctgtctcaaaaataaataaatcaattaaaaaaaaagattgaagaactgacgtgcagtaggtattctggctccgctgtactatgctgtatgtcacctaacaaatggatggaggaatagcctggactaatgacttaaacgtttttcacccagattcatagcacgaatacattttacattggtacccagtacacacacaaacacgattacatgcacatgcaaaactgaaacacaagctttatgaaacgatacttacccttgtcataggtgtgctggtatgttctattctttatttttacttaatctttctgttctctattttaataaatgctgatcaaaaaccacgaaaattatttcaccactcattagtgaatctgacccctaattgaaagattatgtgtaagctccatttacctctgaagagccatcggaaagacttaagccttaggctgggtgcagtggctcacgcctgtaatcccaacactttgggaggccaaggcaggcggatcacctgaggtcaggagttcaagaccagcctagtcaacatagtgacaccccacctctactaaaaatataaaaattaggcctggtggcgcacacctgtaatcccagctactcgggagactgagacaggagaattgcttgcacccgggaggcagaagttgcagtgagctgagattgggctactgtgctacagtctgggcaatagagcgaaactctgtctcaaaaaaaaaaaaaaaaaaagcaagcaagcttcagcctggcaggaatggctgtccacagccaaccacccagttgtctccaaagttgaagacactagggtggcaaggggacctcctagcattcagacccaggatggtacagatggaaaccattgttcatttatgactcactctagagtttgaacacaccagattcaccttccctccagcaacccatcatggtttcttttaacctttaacccacttcttggggctaaaatctgttttcttactttcttttttcttttcctttctttttttatttttatttttgagacagactcttgctctgtcacccaggctggagtgcagtggtgccatctcagctcacagcaacctctgcctcccgggttcaagcgattcttctgcctcagcctcccgagtaggtgggactacaggtgggcgccaccatgcccagctaatttttgtatttttagtagagacagggtttcaccatgttggctgggacagtcccgatctcytgacctcgtgatccatccacctcagcctcccaaagtgctgggattataggtgtgagccactgcacccggccccagctaatttttgtatttttagtagagatagggtttcgccatgttgcccaggctggtctcgaactcctgagctcaggatatccacccgactcggcctcccaaagtgctaggattacaggcgtgagccactgtgcccagacttttttttttttttttcagatggagtcttgctctgttgcctaggctggagtgcagtggtgcgatcttggctcactgcaacctccgcctcctgggttcaagcgattcttctgcctcagcctcccaagtagctggcactacaggcacgtaccaccatgcccggctaattttttgtattttagtagagacggagtttcaccatgttggccacatggtcttgatctcctgacctcgtgatccgcctgcctcagcctcccagagtgccaggattacaggcatgagccactgtgcccagcgcttttttttcttttttaagatgggtctggaggctgcagtggcatgatcacagttcagtgcaggcttgacctcctgggctcaagtgatcctgccgtctcagctttccgagtagctgggactacaggcatgcaccaccatgcctagctaattttaaaatttcttgtagagatggtgttgccctgtgttgctgaggctgttctcaaactcctaggctcaagtgatcctcccaagtagctgggaggacaggtgtcctccaccacttccagctttcctgtctgttttgactttgaatttgccagtttcagtgggacatggaaaataatagactctagataggagtgtctctaattttcacttcactgtaatcttgtggaaaacagaaggcagacattactatatggaatagcaatgaggtagatggaagagaacataaaaaagttcagagtgaagagaacagaaaatagttactatttaagacagaaacaaatttatgttcctactttggatttttctagcttaggggtttcactggctgcattccctggcataaagcgatgagcacatgctttggatcacacacccctgggttcaaattctggttctgtcacttactggctgatgagccttggataaggtatttattctctcttgggcttttatttttttaccaataattgtgatcatccttttgtaggtgtttctacaattcaatgagtacttagcatttatgagatgctcaagcagtggtagaccctatgattgtcatcattcgcattatttcaccctgggcatagaatgtgttttgtgcacagtaggtactcaacaaatgtttgattaatttctactttgggtagacaggcaagtcagactttctctcctatcctgaaggcactccttcctggtaggaaaatctcctccatttcccagtctaggctgaaaattcttcgttttygtttacctcctaaactgttcagtagttggtataacatactgcaaggaggacccctccctcttagtagaaaagcaaggcaaaggaagtctgcaaaaacaaccagaggtgttaaattactcatgtttatttataacagactttcagccagtacagtacaaaacttacagtagtatatctccgttacacaaatatttacttacaatatattacatatacaaaatgctttgcaataagtctcaaaagctagtttaactccccttgagaaaggagaaaaactctttaaaaaagggggggaggggaatcagaagaagagaggaggaggtgaaggggtaaaggtcaaaagagacaccaaacataggctacaaaggaaaccctaggagagagggagaagagaggtggtattgcacttgcttctgtgtttattttttctttttgttcttcataacttctgattaaaaatatatatatatatgtatatatatatwttatgtacacaaggaaagaagctgccagaagtattacaaaatcctatctgcagcttggacactgacacaaaaaaacaaaggtctggaaaagtgtctacttagaaatattttgttggtggtattgattttgaatagcaatataaaaggaaacacctcttttctccatgtgggtttcagtgtgtgtgtatttttttttctttttctttacttttttttttatgcaaaaggagctgggagagagcatgaggatgtttgaggttccagagctggaaggctctgaaaagtaggattttgtacctaagaccctggttaaagtgcagtgatggtctggagagagacaggatgccccctctcccctccttagcacctggtcttgcccttccagtctctgctctcatgggcacagagtatagcctmagagcatagtccttcatgttccgggaggttacaggtgccacagttgactggggaaggggatgggggcaccctaaggctctgataccccagaagggactagtccttatgaagtgtcaccaaatacacagcagacacagaagaggtgggaggcggtaggtctaacaggaagggctcaataaccagaatagttcaggaaaagcccagatattaatctcagctctgctgacattctaaaaaggagctagcaccccagggtgccgttgaggattcttcctttctctagagactactctgctctgagctaacctccccattttctgcccttggcagcatctatttattgctacattgtcaaggaggaacaattgccccacaatgcttctccctgccaatctggttctcttggggaaacctcagagtgggggagaaaaaggaggacaaagaggagaaagttttttagggtctcccttcccataagaaggcaaggtagactcctctcagagcccttaaggccctaatcccagggtctgttccttagcccaccctttaccatccccccccaaaatatccctgatagggagtgagaaaagtaggaggtaaaagagccaataaggaaaggacatgtggaaagaaagatggaaggggaaggaagggaagagaaaaggagagagagaaggaccaagagttacaacttgtgaggtgttgtgtttggtttttacttttttttttctttaaacatagaaaaacagcctttggtttgaatctcaaggaagcagagagtgggatggctgtggccttgggcagaaaactcttgtagaaagaaacctccacttgcagtggagttgtatctccttctgccccttctcactaatcctaggttactcaaatagccaagggtctctgcagtagccagcagtcccccctcctaccctgtgtctgggagctgagtgtagaagggggtagtaaaggaagaccccagttcagttgtacccatcccagtcttgctggaacaagggtggaatggggtgaagggcacgtgcccgtgctcatgctgggataatttttggttatactgaaaattagaagagagaaaagagatacccgtttctccctgccactgatcctaagaacagggcccaggagcccgggaatgagagggtgaatcctgctgggagggagcagcagaaggcagcatgactgaggggctgaaacaaccccttgtcatcaggcagcaacccactagtttctcataggatggggactgaaggagcccctgagagcctaggaaggtcactatagtgaagaagtttgagaggtggaggagaaagagaagaattttgacccactcctttcccatgccctggttcccaattaggcacctgtggctcccaatctgtcagagacagagggttgcagacctagccttggcccctgagaatataaaattggggcactccaaggagagaaaagccaccacttaatagaccggtaggttgaagggactagagcgtgtggaggggtagttcaaggagagggaccagatctatcacatcctagagggagatcctgaatgtaggctttgagaactcatattactaggggaatatgacctattactaggggaataggactctcagtcccacagtgcctggggagaatttcttcagtccctcctacttccaaatgaggaaataattcttcattcattcaagaatagtgcaagctgcctaaagtgagagggcacaagaggtatggagtaccaggttgaagagtcccagagaggagatataatgccacagagctaaggtagggccgggggcaggtatcagcatcaaaactgaagaatyagataatgtaaagggtgaggacttaaagcaagaagcttgaagtctcttagtactaagaggagcttcctacccctggggctgctggaagatctaagagagaaaaattggcctaaagtggaaaggagttgtggacaggagggtgggggagtggcaagtgactgatataagttaaaatttaaaaaggcaaaaataaatcaactaattaataaataactcagtatgctgggatgagagaagataaaaaggaaaaacataagcaaaagatctgtttcatcacaatgcttacatcggtcaggatagaggaagagaataggtgaggaggggtcagggtcaggtgtgaggtcaggtggccagtagtgagggctacaaagcaaaactccttgggaaatggtggggacagggatcaatgcctgtagtcagggcagtggagtggtggactgaggagagagggagaggttgctagcccaccttatgctccccccggacaatgtgggaagagaattcgtaccggtcctggctgtgataaccacagatgttgcactcaaaagggtctctgaagccatggcagcccatgtggatagtgaacatgacgtggtccaggaagaggatacggcagtgctcacacttgaaggccttcacaggctcaccactctcgcccaccacccgaagcacttccttggaggggcctggggtgccccgcaataacccctcctgtggcttggggtcctctttggcgtaggcaggactgtgccggcccaccacaatggtgggaggtggctggggtgggggaccctgagggagggataccacccccgcaacccgatcttcgtggttgctttctgtgtctgtggagtcctggcagccattgctgggggatgccccagggtcagtcagggggcctcggggccggtagaggaggggacctccatcagccaggtcctcaggtccctcacctgcttctcgggatcctggaagctccagtcgaccagggaggggctgcatctgggtgtagacagagctgatgacaggcgtgagttctgagatgcaattggtgggtggaaggcggaggggacgcagatgctctgcacccacaaaggccagggaacttccaaagccaggctctaggctgtggtgtgccaccaactccacatccttttcatagccacccgagttcacatcataggggaggtctgagaggctgaagcgcatctgcttttcgcctgtggagaasaggaactcagcagggctgggtttggagaattcctacactctcctcaggattacttctttgtttttttacctgtggggctgggtgtaacattatttactacgtggcatttactttcgcagggtcaggtcctttgtgggactgctccctgactctaggctataatcttagagaaggactcaatcccagcccattgatttttaatacttcattttattactctccataaagctccaggtccttagagagctcatgactagtgctggggatagggggaaccacatacttatttcctctctctgactctctaagggcccacacagactgaagttcttgttattcttaaaaactgagatagcccgggccgggcgcggtggctcacgcctgtaatcccagcactttgggaggctgaggcgggcagatcatgaggtcaggagattaagaccatcctggctaacacggtgaaaccccgtctctactaaaaatacaaaaaaaattagccgggcatggtggcaggcgtctgtagtcccagctactcgggaggctgaggcaggagaatggcgtgaacctgggagacagaggttgcagtgagccgagatcgtgccactgcattctagcctgggcgacagagcaagactccgtctcaaaaacaaacaaacaaacaaaaaactgagacagcccgatgcctcgaccctgtcccttacaaccaccacgagagtcttcagtgccaacccttctccactctctttgagtacatcctccctctttactttcctcctgtcctgaggatagattttcagtatcagaggccaccagcctgctttctttctttccttttttcttttttcttttgagacggagtcttgctctgttgcccaggatggatggagtgcagtggcgcgatctccgctcactgcaagctccgcctcccgggttcacaccattctcctgcttcagcctcccgagtagctgggactacaggtgcccgccaccacgcccggctaattttttgtatttttagtagagagggggtttcactgtgttaaccgggatggtcttgatcttctgacctcttgatctgcccaccttggcctcccaaagtgctgggattacagacgtgagccactgcacccagcccaccagactgctttctttccccaaaccgaatctccagaccacacagctcagatttatttgagctgtggcttaaagctgatacgtctttccaactggattcttacctacaaacttctggggtgtggaacgcttgcgtttggtgaggctattggccagacgatcgatgaaagttggccgctcagaggatgagtgcagcatggagtctggcaccatctccaggtcacgtatttcgtcacctagtgggaagaaggtggagacagtagtagcagttgagtaggggtagcattggccccacagcctttgcctggagaaaaccagcaggtcagtagccaaggaaggacataccagttgcctgggaaactgggctctgtttaccctacctaaagctcactccaataaaatttcagatcatttggggacaatcatacacatctggcccttggttttatacttcttgtgttctctctctcccattaggccaaggatatagacccaaacttcccctacctgtcgatctccctaaagcacccaccacagacaaggctctccaccaactgggttacctagaatggggtgtttggcagatttactggggtaatcatcccctgttccacagacttcatccctcagtgngggagatactggagtcacccttgtctagcactccctctcaccatccccttttaactccccagtagtacatcaatagccctacctggttggccagccaaagcttgggcttcagtgctgagactctgtaggtagttatggcaccgctccttgtgctcctccagggtactctgctgtttgtagctccggccacagtagttacacttgtagggcttgcccactgtgggagaggagactgtggaggagagtggaaagatggcatcagagctatttctcgctgtgccctggctctgcagattcagccaagagcaagtatacactggcatgggaaggaaaggatgttgctaaattgagttcttctacttgtctttcatttcccaacttcaactgcaaccgcggacagatgaacaatatttgatgatgaaggataatgtgcagttatgggggcaagggaatcctagggcatgtggcttcagactggtggtgggtttgttcaagatggccaaattgttgcttaaaggaagtgaggacccagggactttgtagaggatcatccctagcagacaggcaggccccactgcaggatctcagagtctggggcccagactgtggtttaacctttccatttggcaggcggatgtaagtgctgtttatcagacaaggggattttttgctttttatgaactatctgctttggtttgggggaaactggtgggctggcatgacagaaatgagagcccttagatctgccaatgtggggagggggcagttttcattgacctttacttgtattttgacctccagccctagcctggtttactgattattttgtctctctgtctctctacgctgagataccaagagaggtctagaaagcccatcactgatagagtaattctgaaaagagaaaaagaataaaagaacagagaagaaaataaagaagagtaaaaaaaagagaacaccaaatttgggtttgtttgtttatgtgcttgtaataaggaacaggttataaaggtcttgtttctacmgaagaaagaaaattggaaaacagagtggtacttcatttaaagataactcttaagagatatttgtgagaggagagaaaaaagtggagagaaacaacgtattgtatatttgatgtatcttgctgctattgagcagggagacaggagaaggtatctctaggaagctggtaattactattcacccctaaccttgccatgccaaagctgggccttgactaaatcaatctactggattttactcaggctctgtaaactcttgtattttagggatgaaatgaacaccatggtccctatccacccaaagacccttggggaaacagtttaacatctgggagaggaatgatcctccaaccgctttcttttttttcaaattttaattgataattgatacataataattatacatgtttatgagatacatatgatattttcatacatgtatacgacatgtaatgatcaagttggggtaactggcatatctgtcacctcaaacatttatctttttttcttcttttttttggagacagagtcttactctgttgcctaggctggagtgcagtggcacgatctcggctcactgcaacctctacctcctgggttcaagcgattctcctgcctcagcctcccagtagctgggactacaggcgcccaccaccatgcccagctaattttttgtatttttagtagagacgggtttcaccrtgttagccaggatggtctcaatctcctgacctcatgatctgtctgcctcagcctcccaaaggctaggatgacaggcgtgagccaccatgcccagcaaacatttatcatttctttgtattgggaacattcaaaataatctcttctagcgattttgaaatatacaataaattattgttaactacagtcattctactatgctgtggaacactacaacttatgcctcccatctaactgtaatcttgtacccattaaccagcctctcgctatccacctactcccaacccttctcagtcagcctctggtaaccactgttctactctctactttttttttttttttgagacggagtttcacccttgttgcccaggctggagtgcaatggcgcgatcttggcttactgcaacctctgcctcctgggctcaaggaattctcctgtctcagcctcccgagtagcagggattacaggcatgcgccaccacgcctggctaattttgtatttttagtagaaacagggtttctccatgttggtcaggctggtcttgaactcctgacctcaggtgatctgcccgccttggcctcccaaagtgctgggattacaggcgtgagccaccgtgcctggcttttttttttttttccccaagatggggtctcactctgtcacccagactggagtgcaatgacatgatcacaggacactgaagtcttgacctcccaggttcaagtgatcctccctgtctcagcctcctgagtagctgggactacaggtgtgtgccaccacacctagtttttgtttttgtttttgtttttktttttgtagtagagacgaagtctcactatgttgctctggctggtctcaaactcctgggctcaagcgatccacccgccttggcttcccaaactgctgggatgatagacgtgagccactgcacccaacctactccgtgcttctatgagatcaacttttttagctcccacatgagtgagaacatgcatccagtctcttttttcttataataggggttgcaacagaaagcacttcacagagatgggacctgacagtatatctgtgtctgcttctgttgttaataatctacagatcaacatccaaaatctacccagttcacctcactgtgtagttggtaagaattctaggggccaagccatccttgttccaaaccagcagggggagcagccccttttctgaggaaaaggagtatgtatttctggcactggaccttgatggggttccagctaggctgaagaatagctatgtgacccgcaactcatttttccccccaacagcttcattttccttgtcaacaaaatggggataatcacatctaccttggaattgttatgaggatcacatggagaaacacaagtgaaatgctctgtagatataaagcatgtatcaacgatgatctttctccctgtttctccacatacatagagataaagaggtcccaattacaaggtgggagaacctggaacaaggtaagtggatggagaaagtagagggtgatgaaatgattgctctgtccctttaaatcctggctcaggagagtttaagaagagaaaaatagccaggaaagtttccaaggacagaccctactaattctttcccccttcctttcttcctgccttttcccaatcttgagctccctccttcctgccagctcagctcctggcctcttcccaagtccaagccaaaagcctaaagcttagtaaaatgcctaaaaagtgctatctgtccagctgattcagacagatactgattcaaacagtcttgactgggctagaaaaccttgttaatccagtttcccagcactgttccaaacattgatctctaggtaccctctggactttctcttgcctctgggaaggtgacaacctcttgggatagggaacagaaataggatactcttttcctatttggaagtcctaggctcccttttttgcaatttgagagggctatggatatttccaggagccagaaggaagtaaaggagaggacagactggttgctcaagacctctggtggtgtgggaggaaggagggtgaagatgatgacaggtgtggggcctgaggcagatgggagtgagaggagggatttcccaggggcttagatgttgggggtaatagggcatggattgtggcatcaacaatctaaaatataaaagtcaggaaagcccaggcacagtggctgacaccacgcctgtaatcccagtacttcaggaggctgaggtgggccgattgcttgagatcaagagttcaagacaagcctgggcagcatagggagatcctgtctctacaaaaaaatagaaaaattagctgggtgtggcagtatccttccagctactcaggaagctgaggtgggaggatggcttgagctcaggagatcaagactgcagggagccaaaattgcaccactacactccagcctgggcaacagtgtgagacaccgtcttgaaaaaacaaaaaacaaacaaaagtcagggaagggtgactttttttttttttwtttttwtttttgagactgagtgtygctcagtcgcccaggctagagtgcaatggcgcgatctcagctcactgcaagctccgcctcccgggttcacgccattctccagcctcagcctcccaagtagctgggactacaggtgcctgccaccatgcccggctaatttttkttttttttgtatttttagtagagacagggtttcaccattttggccaggatggtctcgatctcctgacctcgtgatccgcccatcttggcctcccaaagtgctgggattacaggcgtgagccaccgcgccaggccaagggtgaccgttaacagccaagaacattgctcctattccttttgctccaagtagatggattttacatccatatggtggatgtaaaataccccatcaaggtgtctcccaaatttcccatgaagccttgctgcccagaggatgggtgagagaggcagggggccctatctgctctgtaaatgctcccccctcctcaatgacagacactggaactccccaaatacaagagaagtcactgagctctacatactgggtgtgttggagcctcattccctcctcccactggacagacactgacctgagtgtgtgcggaggtgaccagtgagtgcatcacgccggcggcaggcatagttgcagaagggacatttaaagggcttctccccagagtgcagcttgatgtggcgcagcaggttccccttctgggtgaaggaggcaccacactggttgcaatggaagggcctttcacctgcaagtgaaagaacaaatcccagaggactgcatgtgaggaactttgaaggttgaacctatcacccaccctctgccctaccttgcccaagggaaggtgctctgaacacattgctgacgggcagaagtgcaatgcacacaaaccctgatttatgaagatcccttggggatccctggggtcttaccctggggaaggtgtggattagaggtgtgtggcagggagaggggcctggaacacgaggccaaaagactgttaccaaaaactgagccccacagggcccactctgccctaggagcccaaggcccaaggaagctgagaagagaaggcttttgttttctgttttgttgttgttgttgttgttgttgttttttaattattagatgggagggcccaaagaatacccaggagtcttacccctattggaccattggctcattcttgagtctacactttcccctccctcatatactgagaaaaatatcaccttttctttataacagcggttgagragagtgccaggaaactaaaggtattgaggggaattcaaattctgtacccacccccaccctgcctygttttgtcagctggaaaatgtgctgggtgagacccttccctttctgaggctacccactccctgcatgacctcctccagccccatacctgctgttgtcccagcactgcccctgcctctcaaccccaccctgggagctcctcccagagcccctctggcttacttaccagtgtgactgcgcttgtgcaccatgagcacgttgggtccaatacagaccatgccgcagacgtcacacttgagcttgccattgggcagccggatgcccccaggggagtgaggctctggcccactcccatcacagtagcccaggggctcagacaatgaatcttccacaatcacgctgtcgtccttttccaggagccgctcatctggccccagcagtctgcttgactcctcatcgctgtacatctccaccttgatggagttggctgaggggtgggatggtgtttagaatagagagaggcaaagggggaagctgctcccaggccagaatggcactctttttttttttttttttttgagatggaatttcgctcttgttgcccaggctggagtgcagtggcacgaatttggctcgacgcaacctccacctcccagattcaagtgattctcctgcctcagcctcctgagtagctgggattacaggcatgtaccatcacacccagctaatttggtatttttagaacagacagggtttctccatgttggtcaggatggtctcgaacttccaacctcaggtgatctgcctgccttggcctcccaaagtgctgggattacaggtgtgagccactgcgcctggcccagaatggcactcttaaagtttaagagggtgtctttaggccctgagacattcaagccttaaatggaactaacaccctagtatccctgctgctgatatcagaatcctactggaacctgagacaaccttttctcccacccaccaggcaaataggcttcaagagaaaaaagttgggccgggtgtggtggctcacgcctgtaatcccagcaatttgggaggccaaggcgggtggattcttttgaggtcaggagtttgagaccagcctggccaacatggtgaaaccctgtctttactaaaaatacaaaaattagctgggcatggtggtgtacgcctgtaatcccagctacttcggaggctgaggcaggagaatcgcttgaacttgggaggcggaggttgcagtgagctgagatcacgccactgcagtccagcctgggcgacagagcaagactccatctcaaaaagaaaaaagttgggggtacataggatgtcttctgtcgctgaggagaggaggcgactaaggggagcttttttctctactctcttgtcatgaagaaagatgtctggcttggccctgggcaggaagccagcaagttaacagtggcgggaaaacagatctaggaagactgaagggggacaacaggccaaagagagcaaacctggaagacagacatgcttacagttccctcccacctcattagattgaatccctctaccccctccacctccataaaactctgaggcagggcaggaggggtaaaggaaggaggaaccattgaggagaaggctttggctctagctccgacctacattcctggctactccaaccatttagagaatgtcacagatctagggccagctggggagaggcagtcatggggaccctgtctgggtaggagaatgagctgtggggagatggggaggtccttctactctctatttcctatctaactccatctgatgaccatttctatctacctgcttctctaattccataatttctctttgaaacttttaccttaatcccacccatacctcttttaattccaccctagtctgccagtgactgactattcactctcctttcagaagccagaaaaaccctagacactgggctcctcattgctcttagagactaagcaggagaccagcaggaggtgacgatggggaaatggttgccagtggaaggtgaattgaaggccaaatgcaacagggggtgcctactgccaggaggtggtaggaggttacacttaccactsagtgagcggctaggagaagagtgctggctgttgggggtgctcaccgagggccccactggggccccgaggaactccttctccagagatgagtccccgctaccttggaggagagaacaagagggcaggtaaagctggagctggagatatctactgtccattgcctaatcttttaaaaaaattcagttaaatttcacaaacatttccttcatagccatgtacaaagcagtgttgtatgctgggcaccataccttgtgcccccrccagtctggatgcctggtkytgccttctgtgagctcagtggctgggccttgcctaccctacctttatctaggcctgagggcaagagcatcactgcctgacgtccacaggaagcagggctgaggctgggtgcgccagggcggagaggaaaatgggggctgcagaagggacagatgttcaggacagacattcttccctactgttcctctctggagcccccagccggttcaggatctgcaggaaaggtaactggaattgtccttgaatctaatgataatattagtaatcatcatagcagctaataatattaattgagtacttactatgtgccaggctttattctgtgcacttgaaatgaataatttcatttaatcctcacaacaactatatgaagtaggtgctaatatcatgattttttcagatgaggcaactgaggtacaaaagaggttatgttagttgtctaaggttacatagctgctagtgtggaactgggatcatagacagtaagcgtccatgtccttaaccagcacctacacagccaattggtggtcacaatcttagtagggaagaattgggcctcttagactttctaaattcagcaaaaatttgattactctagaaagtctcctactgatctgattccaatcacgtgtttactatttgatattcattgacagttaagtgatcaacttattctcagtatatttgttttaattttctgataaattgctttgtaaaaatgctttttgaggctttcataatgtttttcaaaatcagataacatacctaaaggaagatatgaatgtcttttttaaaaaaatccctcctccccacaatcttctacacaaatatataggtgaaataaaaatacatgtagataaacacacacagagacacaacacatatgtagatacatataaagagaacatacctattgggataaacatactggtagccttctacattatctgctaacatgaacatgcatggatgtgtgcacacaggcctaaatatggaagagagaaagagaaagcaagggagagtgcaagaaagagagaggaagcctaaaattcatccctgaagtccacctattagtactttacccaattgcccagctatgcacatacttactttcacaaaataaagattccattataaaatggttggagtcttgggcctgaggcaagaaatccggaacacaccctcctgagggatccctctccagctttggtcagtgggaagaaaacaaccactcaggactttgggaccatttcccrttcatatcctctcctaaagtcccattttccccattctatcccgtcaaagcctgaggaaaaatgttcactatctatagaaaaagccttatggcttgaatctgagttttcccagctggggctttttaggtgagccatggttacctaaaaatgttgcccgaaatcagaaccacacacatatcatgaagtgagcatmtcaggattgtgggttgagacttgtagactcagagccagttttaaatatatcctttcaactaagtgtagggtttactagggttaaaagggctgaaaatgttatcttcttattccctttattagtgctgaattgccctaaatcacttgatgttactatcagggaagaacagggcacttggctttgaggccttgaccctaaaaggatgagtgaacttgttggaaatccatcactggtcccagcttattcggctgaggctgcctcttgaggccagcgacttgctakgtggaggaaaatatatttaaaagtacacttagaaacactgagggcggccgggcgcggtggctcacgcctgtaatcccagcactttgggaggccgaggcgggcggatcacgaggtcaggagatcgagaccatcctggctaacacggtgaaaccccgtctctactaaaaatacaaaaaattatcygggcatggtagcgggcgcctgtagtcccagctactcgggaggctgaggcaggagaatggcgtgaacctgggaggcggagcttgcagtgagccgagatcgcgccactgcactccagcctgggcgacagagcgagactccgtctcaaaaaaaaaaaaaaaaaaaagaaacactgagggaaaagcatcctttgtggctttcccaattaaggcccagaaacaggaagagaagcaggagtcacaccagtaattcaagaggctctttgatgctgttgccctccctaagattaaggtaaggggaaaaacaggatcaagtctactttcatggggctaaaatatatgtataatgaatctgtttcaggagtcagaaaggctttcttgggcaccaaggattttgaattcyagctcaggggtgaggggactagagtaagatttaggaagtttaacagttcctctctcagccccagaaaccccagtgagggaatctcaaaagtctgggactcccaagaaatcccagactgtcaaagccaagaattaaggctgctcttaggtctctgagaaattttcttgctcaaagtcatcatagattggctgaacccccagagggcaaagccaaatcatgaggttcacattagaggaactgggaggtaggtaaaggctgaaaagcaggagggagagaaaggaactgggaaacaggccacaagctaaaggtgtttcatatgttaaaggaggctagcctccactcctgctgcctttccttgagacctttaaatagtggctacatctagggaatagccatgagcttggagaacatggagaacctccacacttctctgcaaggcacctcatcataactgctttccctttcttgaccacgggctccagggtggcaggatcctagcctgctagcagggaatagtgggtacaagagcaaagaaagacgcccatcctcagctcttttgtggggaggaagctgaggcccctcagatctctgttccaggctgaggcatctgcttgccaaggctcctcttccttaccttgattttctccactaccccttcccacccaggcctgtctcggcatttcaccccaggcagctctacctctatccccaaggcctaatcaagatgtcaccataggctcccactgtccaagtcgccgtctttgcttagcaacaccaaacaccctttcccatcctccgcaagtataaggaggaacgccccctcccccgctacacacacacacacacacacacacacacacacacacacacacacmgcccccatcctctccatctcctcaggcttgggagtagttactgaattggctccctagccccagcaccccccttcctccctccactagccgccttctgcctgaacttacattatccttcccttgccggtgagaccctggggtgcgaacgcggccgccgccttggaaacggcgagggagtgcgggtggtgtatgcatgtctgcgtctcagtggcaggcaggggtgagcccagccactcaccttccaggaagcgtggattcctggaagtgaggggaaccgccgtcatttcgcaggcagcagcagcggcacggtgagcagaggcccacggctgcagccagcaagagcagctcagcccagggtgtatgtgtgttgagtgtgtgtgtgtgtgtgtgtgtgtgwgagagagagagagagagagagggagagaaggagaggggagagcacgcttggatgtgcttggggagggggctggagagaatgtatatgtgtatatagtgggggagatgctaggctacagcatcccttttccaagacagtgaagggggtgggtggtgggtgtgtgcacagggagggaaaggcagatgctgttgcccctcgtgcccagcagacaaagaggaactgcacaacaaatgcctgagagaggcaagagtgtgtgcaagagagagagagagagatggatgggcctgcgggtgggagggagaaagggggggccctagggaaggcccaatcctctgccagctggggaagccaaggccccagaggtcatggggcccaggacacggacagcttcaaggctctcagagaggcagaaagcccctcccccaccgaactctttccctcctcctccaggaggaaggttgctctctagatgtggggactgacagcctcctcctttccagcagtgagagggcccagcagagtctggtgtcaggctagtgttgctccgtggccctgagacctttcagatcccgggcaaaaaggctggtacggtctccccatttcccccccttcctgtgcccctggggccccagcagccgaaagccctggatgaatccgccctctatcaggacaaggcctctgctcccttccctttcagaggagctgctcactgacaaactgacctactttggaagactacattttctgattccaagaatttgggggtgggaggggctgtgaaacttcgggctgcctacccctgaatccctttctactaaagttctctaaaacatttcacagtctcagaaaacttggggcaagccctgctcagtcaattaatggcaggagctgggtttcagcaactctgtttcccttgaaagataggaaaatggagggggtggttatctgtgccataaattaatagactcctgcttatctcccccttttccctgccccagaagggaatgatctgtacctttaaaaagagaaaaggggagaaaagatggattttctgaatcacattctgtgaggaattcaaatctcttggaagaacaggagagatacccttttcatcaagtggcctgatgagggaaggtcacctggcgtggagcagaagaactatgatggcctgtggaggcccgcagtgtgcttcgggagggctgcatgctgcagcctttccctctgcttccatatgactcttccaggagagatgggtcagtgatgagcgcagctatgcccagtcctaagaggggtacttttcagggctaatggtagccttactttgactttctcttttccctttctaaggtagctgctgacatctaaaattctcaaagtacagaggaggagttcctggcctccacttccattcaaaaaccatcctgtgcagaggccacttcttatctaggacatgccaatctgctgaaagcagggaaaacttggtttcatagcacggtgaagcaaatcacctccatgagtatccaatattctccataaacaggtttgaaaagagctccacaggatttgtagtttctcatttgcctgctttatggtagggactggattttatccatctgagtgttccccagcactaaagcagggtcccaagtgtacttgttgctcagtagtggttttctgaataggcttaactgagcaggaggtaggaggactggctcgctcctcacaaggccatgacttttgttctaataaagtctcttccaattaaatgagtctacctgatccctgtcattctgtcaagcatgtggcagatattgaatgcctttacccattccaactccttccctccttaaacaagaaaggggtcagagtcaacatcttaccttacattacccgggtgttgccaatgactctcatatgtgtgtctgacccatcttgctatctcctttagtgcatgccaataattccttcattggtcctactttagagtaaaaaataagctataggtcatttccaaaatggtgcttgggtttctgatagggatactcatcacatcaaaacccagttttggtttctattatttctttttttttgagacggagtctcactctgtcgccaggctggagtgcagtggcgtgatctcagctcactgcaacctccgcctcctgggttctcctgcctcagcctcctgagaagttgggactacaggcgtgagccaccacgcccagataatttttgtatttttagtagatatgaggcttcaccatgttggccaggatggtcctgatctcttgacttcgtgatctgcccacctcggcctcccaaagtgctgggattacaggcgtgagccacgtgcctggcctaatttttgtatttttagtagagagggggtttcaccatgttgcccaggctggtctcgaactcctgacctcaggtgatctgcctgtctcccaaagtgctgggattacaggcgtgagccaccatgcccagccttgagtcattattttaaaatggagacatttcatataaaaatttggatttctggtatctcttaaaaatttagaagttttggccacactagatacacattcctgcmtgacaagttctagtggacactgaaagctgctgtccctttaagtgggacatatgttctccacttcatgacagcccccaccattcttttctgcttattatcctaaccttacttcactcattcacatgactacctggcccttgcaggcctttgagctttgaaaccttgtgccgctctatctggatagaacaggatttcatgtttggctggtgacttcagagcaaaggagaaggaaccacatcttgtttccatctatttgcttcaaattattcttctaatgatgtctgctcatattcccctcctattcccttcctctataccccaagaagtctggaaaagaaaattactatttagggaatgtaagatcaccaaaataattgcacactaccaagggccaccaagcatgagtgttagctgtgtgactaggacatttagaggctgtgtgcctaggctgaaggctctctgctctgctctacaggagagtgtctgcttccagcccctaacaaatagaacacacagaaggcataccagacacataggagcggccattgcagtcttctatgtccattttaaagagattctgctgaaaaagaaaatagctgctattagaagatagctctgggaagggaggagscttttctttaatattcttgagttagcaagaaacctaaaggagcacttaagcatggtctgatactatcctaaagaagaaaaaccttagccaggcactgtggctcaacacctgtaatcctagtgctttggaaagaaggtgggaggatcactcgagcccaggagtttgagaccagcctgggcaatatagggagatcccatctctacaaaatataaaaataaattaggcatcgtggcatgtgcctgtagtcccagctattcaggaggctgaggtgggaggatcacttgagcctggaggtcgaggctgcagtgagctgtgatcttaccactgcactccagcctgggtaaccgagcgagaccctgtctccaagaaaaaccttacactttgtcctggtgaaagacaacataccctgatttacaaaccccaatatttcctccaatttacaacttctgcaggcctccccagcctctgaggtggaaacactatcttaatccagagtggtccttgattttgagattagaccgtgtatgtaggtggagattacacctcagccctgaggaggcaaagaaacagccccttagaggctctatacctcagttaaagatgggggtagtattaagaagctgggttcagtcattcaagggattctgtcttggagtatgtggtgtgagggagggtgacaggaaaagkagaagatggaggagagcagcccactcagggttcagtgataagtcctctactgaaggtgtaataaacaagttaaacctgtaaatggttatccccaccctctcatcaattactctaccacgcttattttaaaaaagaaaaaaggacggggggggcggggggggagtctgaatttaaaatgaaggttaatgtctatttgagggaaggcaagcagtaattggcagtagagtattaaacaatcgggaactgagaacacttaaaagtgataatttgttgcaatgarttatctctttaggagcctgtgggaggagagaaaaaaaaaatctatctggtggaaatttacatacctccaaaattgcggctggcatggtggctcacacctgtaattccagcactttgggaggctgaggtgggtggatcatttgaaatcaggagttcaagaccagcctggccaacatggtgaaaccccgtctccactaaaaatacaaaattatgactgggcacactggttcacacctgtaatcccagtactctgggaggccgaggcgggcggatcacctcaggtcaggagttcagcctgaccaacatggagaaaccccatctctactaaaaatacaaaaaaaattagccaggcatggtggcgcatgcctgtaatcccagctactagggaggctgaggcaggagaatcacctgaacccaggaggcggaggttgcggtgacccaagatcacgccgttgcactccagcctgggcaacaagagcgaaactccgtctcttaaaaaaacaaaacaaaacaaaattagctgggcggtagtggcatgagcctgtaatcccaggtacttgggaggctgaggcaggagaatcgcttgagcctgggaggtggaggttgcggtgcaccgagatcctgccactgcactccagcctgggcgacagagtgagacccggtcacaaaaaaaaaaaaaaagaaaagaaaaaaaaagaaaattgcattccccactcatctgatgaaaactaaacgccctgaggcagaggcagaagcaagaatggggcaagggaacagtctgagctgctgtggggattcttggtctttttgaaggatctcactgaggcagatggataaagatttggtttgcttgtaatggtatattgagagaggtaggggtgggggtgagggggtgcaggaaggcacacagagtaaagtatctgttttcctgcccccccacccccacccaattcttgtctggagttgagactccttttgaaggctcatgagaaaacctgaaacatgsgcttaccttcacttcacaaagcaattctctcttacattttgtcagagagattcctagtatcaaccctatttccctaggaagccagggcatggagaaaaaaattctctaagtttattaaccctcttttcttgacatccttcctgggatggactgaactttgggactggaccactagaacaagccacacaataagtggttccttgaagggtcccttaggaacaatcattagaagagcccaagtccacagttgttagagaactcagactctctggaactagccacaaaacttgagatagagatcaaaagataaaggagggcagtctggtattgaggggccctttcatttccaaatcattagattcayaattgccctttggtgtttttcaaaatgaatggaaagctcaggctgggtttggtggctcaggcctgtaatctcagctctttgagagggcgaggtgggtggatcacctgaggtcaggagttcgagaccagcctagccaacgtggtgaaacccsatctctactaaaaatacaaaaaaattagctgggtgtggtggtacacacctataatcccatctactcgggaggctgaggcagaattgcttgaaccggggaggtgtaggttgcagtgagcggagatcacgccactgcactccagccaggtcaacaaagggaaactccatttcaaagaaaaaaaaagaatgcaaagttcaaagtgccacttgaagccgggcgtggtagctcacgcctgtaattccagcactttgggaggcggaggcgggcggatcacgaggtcaggagtttgagaccagcctggccaacatggcaaaaccccatctctactaaaaatacaaaaattagccgggcgtggtggggtgcgcccgtaatcccagctactcaggaggctgaggcaggataattgcttgaacccgggagacagaggttgcagtgagccgagatcgtgccattgcactccagcctgggcgacaagagcaagactctgtctcaaacaaaacaaaacaagcccacaaagtgccacttgaaacttccctcacacacctccccatgcaggagaggcaagagtgagcaggattttcctgttttctgcttggagaaactgagagaaactgaggctgagagcagtgaagttacttgtcccaaggttcatggtgagaatagaacaagaacaagaacacaagttgcctgcctctctgaggtgtcctctttctattaaacctttcaaaagccaggctactcaaggccttcatgggttttcttgcttttccctgttttttttgtttttgtttttgtttttktttttgagacggagtctcgctgtgttgcccaggctggagtgcagtggcatgagtttggctcccgggttcaagcagttctcctggctcagccttctgagtagccaggactactggcatggaccaccacactcggctttttccctggttctaacatcaggtaagtcatcttttcctttggtgtgatccctgtgggagtggggtctgttacttaaaaaggaagaacaagtcgagctggctctacaggaagaaatatgctcatattattttgtgtgtgtgtgtgtgtttgtgtgcatgcagcatgcctaatgcctgtgtgaatgaagggctagacaagcactaggtgggtagaacaggtgaagcataccattcagctagcactggctcaggaagtgtatctcattcttggacttttgcccagatggccccaaaacaatttccagaaaggtctgaaggagttgttttctgagctggactttctttctaacagtaaactgagctttcctgcttaattgctcttaacgtgctctgtgacacatcttgggcaaaatcagtacttagctgtacttagctgcctccagctgggggtttttgtttgtttgtttcttttcttttcttttttttttttttttgagacggagtctcgatctgtcactcaggctggagtgcagtggcacgatctcatctcagctcactgcaacctctgcatcccgggttcaagtgattctcctgcctaagcctcctgaatagctaggattacaggcgtgcgccaccacacccagctaatttttgtatttttagtagagacagggttttgccatgttggccaggctgttctcgaactcctgacctcaggtaatctgcccgcctcggcctcccaaagtgttgggattacaggcgtgagccactgctcccggctctccagctggttttaataccaagttggtaaccctggaagtgagagggcattggattgaaactgctgttctcagtcctggttttctgtgcaaaccaggagcaaatcagcagatgtactttactctttgctcaagtctccctgcagcacatcccgcccagccttcccactctctaccccttaaagcacctcctcccctgcctaaccagccaggcagatcttagcgtctccttagaggaactgggtcaaattaggcactgccaattggagacacattgcaggaggaggaggtataaggagagggaagttagttacatgagacagttttgtatcaaagatcttggaaggagattagctttaaagcaacataactgtcggctgggggcggyggctcacacctgtaatcccagcactctgggaggctgaggcaagcagatcacttgaagtcaggagttcaagatcagcttggccaacgtggcgaaaccccatctctactaaaaatacaaaaattagctgggcttggtggtacatgcctgtagtcctagctgcttgggaggctgaggcataagaatcgtttgaaccchggaggcagaggttggagtgagccgagatcacgccattgcactccagcctgggtgacagagtgagactctgtcactaaataaataaataaagcaacataaccgtcactcagtgatggcgggtaggcacatatgtactgtaaattcagctgtgagctgaatacaaagcaactagaaacaatcagtgttccaattcaaaaggaatatctctgtgaggagggaggaaacgctggtcattgtaatctctggagacacaaattttcttccctgttcttatttatttattatatttactagagatgagatctcactatgttgtctgggctggagwgcagtggctgttcatgggcacaatcacagcacactacagcctcaaactcttggcctcaagcaatcctccttcctcagcctaatgagtagttgggactacaggtgcatgtgccactgtgcctagctcttccccatttgtttgaatccacttggcataaacaagagtcctccatggccctggctttctcctatcaacattacaacacatttgaacaggaatgggcatcctttctagacagaagatttcccaccaggctccctgacaggcagcagtgagggccaatcccagcagtttgggaggccaaggcaagaggactgcttgaggccaggagttctaggccagcctgggcaacacactgagacmctaaaaaaaaaaaaaagtaatttaggccaggtgtggtggctcacgcctgtaatcccagcactttgggaggccaaggtgggtggatcacctgaggtcaggagttcgagaccagcctgaccaaatggagaaaccccatctctackaagaatacaaaattagccaggggtggtggttcatgcctgtaatcccagctactcaggaggctgaggcaggagaatcgcttgaacccaggaggcggaggttgcagtgagccgagatcgggccattgcactccagactgggcaacaagaacaaaactccgtctcaaaaaaaaaaaaaaaaaaagtcatttaacacatgcttaatgtggcctagggggtaaaaggtcatgagaagaatattgttgggaaagatggtgaaggtagagagaatggcaaggatccataccatgtttttgttattattcccaaactataacaggcagaagtagaaaaattttctccactttcccttagtacctgggttctgcggtggagagcagtagttattaacaagacagaacttcccatgtgccttgggtatgagccattcaggtgctacaagtagagcaaacccacagcatcatcctctactgtctatgccttcctgaactgagtgaaatstgagcaaaaatatgttgaaatcacatagctggctctgctctctatcaaagctttgcataattgaggagggagaagacgcaaaggggccagggaaaggtatggaattagccactgtctgcaagcccctttccaggaaaaagacctagacatcaagcaatttgcagctctgaaattatctttagggtcaacctagtgctctctgaaggaaacccaccaaccttagctcagctcatgtgtttgtctttacagtggaaaggtctgactcatttttcaccaggctgtagatggtgaccttctgtctacatataatacagttgaagacagctcagcttcattatccaagtgcttggggagcagtgcagaggggataaattcccaggtcatcctaggaatggccagtctctaaaataaaaaggggtaagagctgaaaacacaacacctgggcagggggaaaatatcacctcattgtctccttttagatctcagatggatgcatcttttctcttgttctttgcgcttctctgtcctccccatgtagactgcagaagagagagaaggctaaggtttatgagtgggagaagaaacratcctatccctcccatgtctcatttcaggacataaggaactaaggaaaagggccaaactaaacactttaaatcactagatatgatacataggagatgatactttttggggtttttgggtgtacccccaagtatagctctctgtttatagaaaggcctcacaaaatcactgctgttcagtggtatgtttgggcaggggtggagaaagtagagcagggaaattcaatttgagttttataataatcagttttaaagccaaagatgcccaaaacagggttagcactctcaagtgaagtttgaaattacagggaagtctcagtgaactattctgactagggtacagtagcaaaaaaaatgtagaagagacaggaacaattgcctttgattgcaattgtgcccaaaagtccctaatacatgctgatcaaaaaagttcactgttgtttgggccagaaagatgttttcaggcttctctgctaatagtcttgctctgataatccaatttggtaagactctcttcttcatgtggagggtctagggcaggggtactccaggaactgagaaatcctggagctgaaatggagttgagagatkatctacaatttcctagtttttaacagaagaaactaagcccagagtcatcaatctcattaacaacagaattaggacatgtagagtccaagttaccattagaagattctttccactggaacactatattaaatcttgccccagttggaagatttgggccaccctgcttgccttctttcttgggttattaaatgaatggtttttgggtctgcgtcttgctgacctaaatccttgaactggaaacacaggcttatggatgggaggataaataatcctcttcctcctatgtctcttttcagagataatggacctgaggaaaacaccaaactagatggtcattaagtctctaaagtagaaacggcctcttagcttgaggactaccccakcataggtattgcatcagagcctacaatgtggatcctccccgcagctggaccaggtcattcatatcagcactaccctttcttagatgcctttgtctgataaactttgaacctatctctctgtttccagaacagagtccataactcttctaagaagaggaagcaaatcaaagcctggaattcaaagctttcttcagcagagtcaacagaccaataaagaaagggagtccctytgcctgtggcattgtccacactcacagggtcccacactcttatttgttcctacagagtaaaacgaggctagaaatacctatctttctttttctttggtgtgtgtgtgtgtggcgagagagagagagagacagagagagagatggccagttggggaaaaaaaataattcctttgtggatactactgtgtgtgggggggcagggggtacggtgaaaggtgggataagtttctcccatgctgggaagttcaagctgcagatttcaaactaagaggacataaagagactttcagttgcattttcactggaaaaaagtcaggacttatttctgagccaagtcctgaaatatgccttacccttaacctactcagaggaaggrgattgcccagaagctacaattcaactaactaactgcactcagtgggcaacaaagacattatattttgtgtttgagacatcaacttctattgactagggcaaggtataattctgaagctgccaaaatgagggcagctctcaccattctgaagcccaccccagaagctccagtgaaacttctcttgcttcccaatggtaaagctattttcttcttttaagattttatttttatctcaggagctactcatctgactgttctcatgacccaagggtctgtctrgattctctggctttaggctgttagtagggaaagctgaagtcctcctgcaaaccataaagcaagattcacggacctactggcaggtccatggggaggtgagggattaccatacaccccaaccaaacgaaacactatgctttcaaagattgtctgatttggccttttatctggccttgtcctcagaatctgagttatcgttaagtggaaatattctaggtagtcagataacattttcatgcttccttaaggatatgaacatgtatcttcacccaggcaaagtgagcaagtatcagtaaggggagacaggcttcaatggtcatctggttgaccatgacgttggaacatctaaagctgacatgtgagcatgtcaggaacataccatgcccaccattgatgcttcgagggcacaggctggggagacaggcacagtaggaactattagacatataagcgagggttgacaagagtaacaacaatagacagttttgttcatgagagaagggaatggggygaaataaggtatgcaaaaaattttctggccaggcacggtggctcatgcctgtaatcccagcactttgggaggctgaggcgggtggatcacctgaggtcaggagttcaagaccagcctggccaacatggtgagacccccatctctactaaaaatacaaaaaattagccaggggtggtggcgggtgcctgtaatcccagctacttgggaggctgaggcaggagaatctcttgaacctgggagatggaggttgcagtgagctgaggtcgcgccattgcaccccagcctgggcaacaagagtgaaactccgtctcaaaaaaaaaaaaaaaaaaaaatttcctggaagcagagttcgtaacttcttgaccttggatggggattggggtacaatatttcataagcatatcgaaaggtccacgttccattaaacactccactgttcccagaaaggactagtcataattttttttaaaggcacagaaataatatagaaaatttaaaaagtgagaacctacaactctagcagccatgaggtaagaaaataacgggatggggtttgtgtgaggaggtacagggagggctgtttyggtacacaggagcaggcagcctgcttcccaagtttgcagctcccgtctggatgtctgccctggggattcctctgttgcatttctttcttagggctctcaagcagtgaatctcttctttcccagccttgcttcccaagttccctacacctctcaccctacactgtgcacttctcactccatcctaagtttcttctctacatgtttctcccaatatgctcattgcctcccagatctcacctaggcctacgtctttatccccagattcctgtcttcagcattcctcgacccaacacccgggtccctcgctttttttgttcagataccctctttgctgctcctttctcctcgctgtccttctgctgtatacccaagccacatccccacggaggagccccgcgcctggcagctcctgcctgtcctcggccccttgccttgatctgtctcccgcctttttaggacccccgagtccctgctacctcgctcttaatactggggcctcgggccaaactcccccggccatcttccaaccctccggccccagcccaacccgcgaccctctctcagcctggccccttcccccgcccacgtctcccccctccttcacgccagagcccctcaggccccgcccccggctaccgaggccccgcccccgctttacccccaccaagccccgcccctcactcacctgaggtgtctccgcgcgcgcgcaggctgtgaggggttggggagaggggacagtgttgggggagagggaggcgagggggcgggggtcccccactctggcccgggcggcccagtgcggggggagtggggtcactgaggcggcggcagtcgccgggccggagccaggacccgggcgctcagaggcggcggtggcggcggctccatctccatcagcagcttcacctgagaagggacttgcccccccaaatatccccccccatcacagccgtccccctccccctaacaacttccggtcccactaccaggcgacaggcggcgtggccgaacaccgagcgtccccaagcccgggagactgctgggggaaaatgggagaggagctaggggagagtagccgagcgccgaaagattcaaatccgaaaggcaccatcgtctgcygaaggtaacccaaaaactagcctttaatctgcacccagtttgcaatctaagcacacgctggacgcccgatgtggcctggcacgtcaggccctagagccaagttttccctctgtaccttgtgaatcccaaaaatctgagacaggtctcagtttaggaagtttttggcaaaacttaattttgccaaagttagggacgcacgcccgtaacgcagcctcaggaggtcctgacgacatgtgccctaggtgactggagcacagcttggtgttatacattttagggagacaagagacatcaatcaatatatgtaaaggcgggacaactcaagctgggaggaggcttccaggtcataggtagataagaggtaaatggagcggggcgcagtggctcacgcctgtaatcccagcactttgggaggccgaggcgggcggatcacctgaggtcaggagttcaagaccagcctggccaacatggtgaaaccccatctctactaaaaataaaaaattagccgggtgtggtggcccgcgcctgtagtcccagctacttgggaggctgaggcaggagaatcgcttgaacccgggaggcggaggttgcagtgagccgagatcgcaccactgcactccagcctgagcaatagagtgagacttcatctcaaaaaaaaaaaaaaaaaaaaaaaaaagccgggcttggtggctcacgcctgtaatcctagcactttgggaggccgaggcagacgtactgcctgagctcaggagttcgagaccagcctgggcaacatggtgaaacccatctctactaaaatacaaaagaaattagccgggcgtggcggtgtgcgcctgtcgtcccagctacctgggaggctgagacagaattgcttgaactccggagacggaggttgcagtgagcggagatcgtgccaccgcactcctgcactccagtctgggtgacagagcaagactctgtctctacaaaaaaaaaaaaaaaaaagaggcaaatggttgtattccmctcaaagaaggcaatcaggtatgcatttatctcagtgagcagagggatgactttgaatgggaggcaggtttaccctaatcagttcccagcttgacttttccctttagcttagtgattctggggcctcaagatttattttgctttcacgacctcctaagacaatattgattttaaactcctagcaccctttgcctttcctgccaagtgcattggaactgttggggaaaggagttggagggtacatgtttttgtcacctctcctctcttcatggtatcctgaggtcaatcacctaggtgtccctgcagatactgccaaacctcagagaaggaagcccccctttttttgagacagaatctcgctttgtcgcacaggctggggtgtagtgggtgtgatctcggctcactgcaacctctgcctccttggttcaagcgattctcctgcctcagcctcccaagtagctgggattacaggcacccaccaccacacccagctaatttttgtatttttggtagagactgggttttgccatgttggccaggctggtctcgaactcctgacctcaagtgatccacctgccttggcctcccaagtgctgggattacaggcgtgagccactgtgctcagccggaagccctacttcttaacctacaagcctacttcctctctgtcttcctccccagttttgtttgttttggtctaatctcattatacatcccagtacaaatgcatccttcctcctgcaataggctcactccccaggcccaagagttatgatcttaaacagactatttattagaaaagtagaactataaagggagacggttgtgccccttgctctcctcgcaactctctggcaacctggagaggtagtataagatagtatatacacttttcttacacatgccacacacatttctctgaacaatccaaaaagaaaagcaaaacaaggccttgatggcagtaggcattagaaatggaggtggggtaggaagagaaaatagtgcttgtctccagaattacttttttcacttctagccccttgctgtaacagctcacacttcctggcacaggttcaaaggccaagaggggtatgtaacatagtgtccaaagagggaaggtccttgggtgaaatgtgctatatgtgtacttgggtatggcttaggaaggccagagttgtgatccaagaagttgaaaggtgggaaagatttttctgaagcagtgaggctaatgggtggggaaaggggtggaggtggctcctttccatgctcatggggagacatagacatggacacgatgccaggcattgctgagaacayctcgcaggttccagattggggccacggtgtctggctgcacattgtaaccatcatccacagccttacaaacaatgttcagttccttttgtccagctggcacaggggctttcaactgccacagacgccatgcccaggccttcctggggcgctgttcctctccatccagcttagccacctgccaggttaggcccccatccagagacacatccacccggatcacagccctgccaccaccactccrtgcatagcccttgatggtcacctcccctgattctacagtctctccatcccrgggctctgtgatggcbkactggacaggaagttcctraatggatggagcagagtcaaaatctacagtctcccagtccacagatggagagaagcctttstaatcccgccgtygccagtggctgtaactttcctctggctgcacactcactctgcccagccatytgacatggcrggcacccaccactccaggaaccaccacaygcacagggaagcygtggtcacgtggcaraggctgcccattcatctcatatgccagcaggacctcagcttcagggtccatggcccgagccagagggatggatgctccataggcagtcccagtagggtctgagtccagtccctcaaagcagacgtgggcctcagtttcacagagttggtggccagcctgggctaacacatcacagagccgtgccccagcccagcgtgcagtgctgatggctcctgttctccactccagaccttttacttctttgacctgagtcatctcagagcgtyggttgccgkcacactgcagagtgactgtgakctcgtacctgggaaagttgtgcaagtcatccagggaaagagacagtgactgacccccaggtgctcctactacgtgtaagcgataggtgtctggatccaggttaggtacaggcagatggttcygggtgaagaagatagggttgggtgtgatgtagttttctgtcagcagctcagggggaggctctgcattaaagggccgctggctgttgaccttcagggctgggtgacgtacaggatcatcagcataagggtcagaggtctccacggtgggggctaccttgtcttcaggattcagctccccaatcttgtactgagccagtaactcacgcacatgggactggttgtgaacagcatagagggcccagaagggctctaggggacccccagctgctagcatcagctttgaaggcccccctggatgtaggtccacaaattctgtgacatcaaagacctcagagcccagagtcacccagatcccagtctcagggctggtgtgggaactcacttcctccttagtgtatatgtgtgttgactcctgagcagcctattggcagggaaggagtaagataaaagggaagagactattaagaagaaatcacttggtcgggcgtggtgactcacaactgtaatcccagcactttgggaggccgaggtgggcggatcacataaggtcgggagttcaagaccagcttgaccaacatggagaagccctgtctctactaaaaatacaaaattagctgggcatggtggtgcatgcctgtaatcccagctacttgggaggctgaggcaggagaatcacttgaacccgggaggtggaggttgtggtgagctgagatcatgccattgcactccagcctgggcaacaagagtgaaactccatctcaaaaaaaaaaaaaagaaaaaatgaagaagaataagaagaaatcacttgagctcaccctgacccaacccacggtgttggccactgggaagcgaaggtagcagattagcagatttcatctccactgtgcatgaagactgcgtcactgtgaactctgtggtaactacaagaacatgggtcacagcctgggttgcctgtggagtttactaggactgattcctttattctgacaattttttttttttttttgagatggagtctcactctgtcacccaggctggagagcagtggccygatsttgatcttggctcactgcagacttagcctcctgggtttaagtgattcttgtgtctcagcctctcaagtagctgagattacaggtatgtaccaccacacctggctaatttttactagagatggggttttgccatgttgcccaggctggtctcaaactcctaacctcaagtgacccacccaccttggcctcctatagtgctgggataacaggcgtgagccactgcacccagtctgttctgacaatgaagcactttccctacttacmctacaccgatggtcctgataggccaacactgcaccgagacctaatagggtccccatgactctccatccctgggtgctggagttatcaccagagaaggtgaggctggggcgctggggctgaaatgaatcatttgtggagcaggcctgaatgcagatccttgaggggattgacttgagtctggaagagaggtcggtcttagtagcacgtatggtcatgtgaaagggctagtgaaggcttggggtctacttctttctccctggttggccattggttccttaagttggaacttagtttctccagggataggtgggaaaagtgggatctggctttctctgtcctccctggacacactctctcaactgtcttatttgcaaggtatgacattgtaaaagacactaagggtggcagataggggctaggaggcaagtcctgggatgggctggcctacctgcaggcctgttggagcctgaggaccacagctctgtgcagcagcagcattgtagcagacctgtagaaggaagattctgggatcaagatagggagaccctgggaggggatattagggaggcctaagggaatgggtgagaggaagacacagagaaggtcagcaaggagctttctgggcaagtgaggagtcttgagagtgggagtccaaatgggcccttagagaaaacttggagcacttcagagacagactgtgctgacaggatggcaggtaatgcgggtggggaatggggtaggagggatgggtgcttctagaatcagaatcacctttctcccatcttccattctgaactttgtccaccatagagaaygatgcctggggcgaagggcctaaaggaccgaaaccaaatgtctactggccagattattatttctgaagtcagcagaggacaactgtgggtcagactgacttaaacagggataaaaaagtgaaaaaaaagtagtgacagcctaaatgggtgaagaagcccagattctgggggcaaaatgccttgggtttgtgaaactggatctcttgttattcattaaccagcccgatttcctgagcaagattccaagccgttctgaacttgcttcctcwtctctgaaatgacatctgcctagcagagctaacatgaagagycaacaagtacagtagtacccccttatccactggggatatgttctacgacccccagtagatgtttgaaaccacagattgcaccaaaccctatattactgttttttcccccatacatacatacctcttatagtttaattactaaattacccacagtaagagattaacaacaatgcccggcgcagtggctcacgtctgtaatcccagcactttgggaggctgaggcgggcaaatcacctgaggtcaggagtttgagaccagcctggccaaaatggggaaaacctgtctctacaaaaattcaaaaataagccaggcatggtgacacgtgcctgtaaccccagctactcgggaggctgaggcaggagaatcacctgaacctgggaggtggaggttgcagtgagctgagatcacgccactgctctccagyctgggcaacagagagagactccatctcaaaaaaaaaaaaaaaaaaaaaaargagagattaacaacaataacaaaatagaaaaattagcccggcgcagtggcttacgcctgtaatcccagcactttgggaggctgagacgggcagatcacgatgtcaggagatcgaaaccatcctggctaacgcggcgaaacctcatctctactaaaaatagaaaaaaaaaaattagccgggcttggcggcgggcgcctgtagtccctgctactccggagacaggagaatggcgtgaacccaggaggcggaggttgcagtgagccgagatcgcgccactgcactccagcctgggcgacagagtgagactccgtctcaaacgtctcaaaaaaaaaacaaagaaaaagaaaaaaattataacattatactgtaataaaagagctgggtgtggtggctcacccttataatcctagtgagaagtgacattgtgctggcagtcctcacagcccttgctcactctcggtgcctcctctgcctgggctcccactttggcggcacttgaggagcccttcagctcgccgctgcactgtgggagcccctttctgggctggccaaggccagagtcggctccctcagcttgcagggaggtgtggagggagaggtgcgagcgggaaccggggctgagcgcggagcttgcgggccagctggagttccgggtgggcgtgggcttggcaggccccgcacacggagcagccggctggccctgccggccccgggcaatgaggggcttaccacctgggccagcagctgcggagggtgtactgggtcccccagcagtgccggcccaccagcgctgcgctcgatttctcgccgggccttagctgcctccccgcggggcagggctcgggacctgcagcccgccatgcctgagccccccttcgccgtgggctcctgtggggcctaagcctccccgaggagcaccgacccctgctccacggcacccagtcccatcaaccacccaagggctgaggagtgcgggcgcatggcaccgagactggcaggcagctccacctgcagcaccagtgcgggatccactgggtgaagccagctgggctcctgagtctggtggggaggtggagaaccttcatgtctagctcagggattgtaaatacacctatcagcaccctgtgtctagctcagggtttgtgaatgcaccaatcaacactctgtatctagctactctggtggggccttggagaacctttatgtctagctcagggattgtgaatacaccaatcaacactctgtatctagctaatctggtggggatgtggagaacctttgtgtctagctcagggattgtaaacgcaccaatcagcaccctgtcaaaacagaccactcggctctaccaatcagcaggatgtgggtggcaccagataagagaacaaaagcaggctgcccaagccagcagtggcaacccgcttgggtccctttccacacggtggaagctttgttctttccctctttacaatgaatcttgctgctgctcactcttcgggtccacactgcctttatgagctgtaacaytcactgtgaaggtctgcagcttcactcctgagccagcaagascacgaacccaccagaaggaagaaactccaaacacatctgaacatcagaaggaacaaactccggacacgctgcctttaagaactgtaacactcactgcgagggtccgcggcttcattcttgaagtcagtgagaccaagaacccaccaattccggacacactagcactttgggagacctacacaggaggactgctagaggccaggagttggagactccgtccctacaaaataaaaagttagttgggcatggtggagcgcacctgtggtcccatctactctggaggctgagaagatctaagcccaggagtttgaggttacagagtgagctgactgtgccactgcacttcagcttgggcaacagagagcgagaccctgtctcaaaacaaaaacaaaaaaaagttatatgaatgtggtctctctctcaaaatatacttttttttggccagtcatggtggctcatgcctataatcccaaaattttgggaggccaaggaaggaggatcacttgactccaggagttcaagaccagcttgggcaacatagtgagactgtgtctctagaaaaaaaaaaacaaattaactgggcatggtggtgcctgtctgtagtctcagctaccggggtggtggggagaggagtgctgagatgagaggatggcttgagtccaggaggtcgagactgcaatgaattatgatggcgccaccgtactccagcctgggcaacagggcaagaccttgtctcaaaaaaaaaaaaagcctgggcgatggagcaagtgtcgatcatggctcactgaagcttcaacctcttgggctcaagccatcctcctgccttagcctccccagcagctgggactacaagtgtgtgtcaccaagcctggctaatttttctgtagacatgggagtctatgttgtcagggctggtcttgaactcctggcctcttgctgccttagcccccaaagtgctgggattacaggcatgagccactgtccggcttcccctcccctccccctgcccctgacagggtcttgctctgcccaggctggagtgcagtggcgtgatctcagctcactatagcatcaaacttctgggctcaagccatcctcctgcctcaacctcctgagtagcggggaccacaggcgtgtgccaccatgcatggtctttttttttttttttttgtagagatgaggtcttactatgttgcccaggctggtctcaaactcctgggttcaagtgatccttcaaacttggtctcacaaagtcctgggattattacaggcatgagccaccactcccagcctcaaaatatcttattgtactgtgttcaactattttccaagcggttgaccatagctaactgaaactcaggaaaaggaaactttggataaggggagactgctgtaataacattgtctttgaaggcttttcagtccccaactctccctccattcaccctaaaaaaaattgaacccagctgggaactggaccccaacctagggtcccggaccacctcaatcttctctgtgccactgtagtgagctcagcaaattgaggagttaatggccagagtgtcaggggcaggctggagaaggaaggtaatttttctgctctctgccctgcaagtttcttcctcaaattgctgaacagagagcactgacccagcagggccaaagtgaggaggggtgacaaatgtctaaactgctgatgagatgctggagaccaatgtgctggggtgggtgggtcgtgggtagggaggaaaggaaacctagagatgggaataggagcagtcttcaccttgcccctgggccatgggaccattactctctctgccacctacctcaatgccagcagcctgtttrtactagaccagagcagtgcaggtagggctgactcgcaggtgaactcagtgagcccagaatcccaggtttgggagggacagccttttgctgtaatacagaaatgccacccgttggtgcaggtgatgacccctcactccccatgggcacgttaggtaggaacatacgtccggcatccaggcacaaaagggtcttgcggcaacaccccgcgatctcaagagcacccagacagaaggagtggaggcaggtactgatagttttgttgcccttgaggttcggagcacagctggacaccaaggccccctccgctgcccagctcagcagcccttcctccccagcttctttaccacccccagtctccttaccgggtccagtgtcttcagcactgcaattttaccagcccagctctgcgagttctcgagaaggggcggggccagcgccgttatgtccggctgcagtaagtgacctctcactcccctcagcttatccctcagccattggctggaagcgggtggctcaaccattggctggaacccgcctcctggagccgagacaggcaggttgctaagaagcctgggagaagaggctggctctttttgctgtcactctcgccaacagtccggagtccattatacccctggtgtgcaaagaatgggacccttgtgcaccagggctgtatgtccggagctcgggcagtgtggaaggtgacaaggaatccaaaagttgggctgacaggtgggagattttgagacacccctgccgcccctccctggaggaggcctcgggatccagtccggttttccccggctgtgatctccactttaaacccagggtagacctacctctatctacyctgttgcaactacaactaccctgtttatcttttagggaaagcaaagtcaatcgcttagttctcgtattccaggaatgataacagaaatgcctaaaatagtggttccaagaatttgagattccttgggctagtcgaatttctccccaaacaaaaatgaaacaacaacactgaatagccgtcttttattttgcgtagaaaaaaaaaataataatcgccccttggtggcacacgcctgtagtcccagtactcgggaggctgaggcgggaggatcscttaagcccaggagttcgaggttgcactgagccaagatcgcggcactgcactccagcctggacaacagagcaagaccccatctcttaaaaaacaaactgccccttaacaagagcaatggcagcttaacaccccgaagtatgaaggttgtagtctcttatctcaaagtaaggggcataaatataatacatttcctattacccttttgtcatttgatgcaggacaaaatttatcaaacctagtcccccaatctggacaaatgtatccatacactgccctctagaggccggacggtggagctgcaattttaatcagtttaagtgaaggtgttcacctttaattttgaaagatcatttcctttcctttcggctctccaactagagcttttaccaggaatcagggaacgggggtggggggtattaccaagagatataaggtaagggaaccgacagtgaaaagttggcaagttggctttggctcttaagtgtttggaaatggaaaggatttcaatctgtatacaatcaaatcactgaagaaggctaatgcccaacctatcctaccagttgttaaaaaaaaaatatatatatatatatatatrtatatatatatggagagagagagagtgagagagagagagagagggagaaagagggagagagagagaaagcgagcttcaacctaaaaaaaaaaaagtctcagccaaaggaagatacagagaagtcagttagggactatctaaaagcctccttcctaatagtgtcatctacttttgtgtgacacacatactttacataattgaccttaatcttcagcttttactttacagatgaagaaacgaggcggaaggcactaactaacttgatcaaggccacagctggttaagttgacagagacaggcctagaatgtcagatttgtctggcaccagtcctctttcctatccaccttcagattctttggaatttaaagcctactgcaaccacacataatcctatttcatttcccttccctcgacctttagactgtggtggactgaagggtttgaagtacactaggagtcaagagcagatccagrggaaattttcccgttgaggtggaagctacaagaaaactaactcagtgatgtttttcaacctttgggtcatggacccctttgagaaacatatagaaatggatcctagaaatatgcacatacggccgggcgcartggctcacgcccgtaatcccagcactttgggaggccaaggtgggtggatcacgaggtcaggagttcaagaccagcctgaccaacatggtgaaaccccgtctctactaaaaatacaaaaattagctgggtgtgttggtgcgtgcctgtaatcctagctactcaggaggctgaggcaggagaatcacttgaactcaggaggcggagattgctgtgagccaagatcgtgccactgtactccaggctagcgacagagactccgtctcaattaaaaraaaaaaaagaaatatgcacatacatttttgtatactacttcaaatagcacccctctctctaatctgatcagtgggcccaaagatccacagaccataccctacacatatacattctgttaagagggcctaaaaagatataatagggtttgatttgatgaacaatctagtggccttagaagaggggtgattaaatagcaatagaagggctattttctaaactagatgtttaagaaaagattaaagggaataaagatgtatcaagatgcagggaaaggtgtgtttctgattcagtagaacattactgggtatcctttcttccaaattcctagtacctgacaaatagcaaaaataataataataataacaataaaataaaaaaaagcaacactccaatgcccttttctttttttcctttttttacttacattaaatacatcggtaaatcagcagtcgcattctgttaccacgattgttatgttgggagaggaagaaaggcaaatgctttctcagaagcaaaacaaaaacaaaaaaccacaacacccccccttaaaaaaackgaccagaagaaaaaaatgagctgggaaataaacaaaagaaaactaagatccccaagcccaacagagctcaaaggaaggcagaagaggtggtaggaagtagagggaaggcagccgatasgcccaraagctaaggccaaatcctgttcctatgggggtggggggagggagaagcctggggaagtggtttcccaggcccaagataatgaaacatcttcactcctgctccaagggggaaagctgcacagagaaagaacttcatttctagaagactttggaaagccatcctagttcttccacttgtaaaaaggatgcactgggtgctatggggggccagtggcttctgggaaaggaagggggaaatgtgtgtgtttcagggccatgggaactaaggctgcccctggaaaaggaagggaattgaggcctaagtggaagaacctaagctgggtccttcagaatctcagcttcatagatttctcagctgttctgggatagaaggcagtctgcaagccaaaagggcaggaaggttccaatcctaggtcactgtgacctttcctttctttctttcccaaaactccgggctggaacaaggaacttaaagttctcttttgccttgatggcttctcagagacatcttaaaacacctgatgaaggatatgaagagagactagagatttagaaaggaccaaggtcctctgataatatgagccagttgtaaggtacyttcagtgccggtcattccctctccacaggaacaggtggtatgatacgagggcaccacaggaggcctctgtggtactagcccctattggtacatggattaaaccactggttgcatgatggggagggatggggggattaaggatggagggactaaattcaagatattaacaaaggaacaaagaaacagggcctgatgggaggcagaggatagaacagactgtacagtgggaataaagatcatacctatttacaaggaagtagaaaagacatggtaatggatatcaaattgagtgtgaaacctgggaaaggacagaaaactcctcccttttgcctgacctcctttttactcccctaccttggcctgtgctatcctgagacactcctcaattgctcaattaattctccaggaaaggcaaacctatagtcaatagttagcttggcaagaatataggttaataattagagttggaggaagctaacagtggagataggacttgagtagctgccactggtagttttatctataacctctcctcgaacctcgcattaacctcagatttcattgaattaaaaagaaggtgggagggcaagtaaatcaatcaaaacttccataaaacaagtaccccaactgaactaccatcaattaaagtgcaaactgcaggggtatatggtggctggggctgaggccatctaaaggccagaggggaaaaaaygcatatgtataaatcagaggatgggtaccagaaactgtccctcctccaatcagatcacagcagagccaaagaygyaggcaaccagtgaaaattctttggaagactctggggtccaacccccacgattaggggaaacgctacctaagaggctgcgtgaggggaaactgggcctttgaagagttacagagccacagttgacactgcacctccacctccgcccagttagcttacmmggcacctcctgcytggtgcctgagatcttgcctccccattctcacctctacctaggaacaccctccacaaggccaaatcatggataccgcaatgttttcaaatatgagaaactccaaccaaataaaaacaaaaaggaaatgtttccttactccctcctgctctgagctttattctcccccagggcccttaatgtaaatgaactggaaacctccttcctcagttcctgggttcaccactttcwgcatcctggggagaggagaaaagaggctcaagaacagggactgaccaaaagcagaaggggaagggacaggagtcagaagygttttctgaaaaaatggggaggaacactagggaggaggagaaaagatacrtaagtcgctgtcttgtacctataatacaaagtgaagaaagtttgttttggaaggtaagtcctggggggagttgacccccaagccccagagtagggggtaggaggccagtggcaacagctgcctggtgtttgttgctgaagcgttaaaaagtgccatgacggagctgtcaggaggcagcccttgggagccagggctcagtgtgctgttaccgtaggggytgtgtgctgaggggtagggatggmggttatttcttagctcttgtgctagctccatacttgtttgctgctagccaccccctcagttgctacaacactggctcttgttctgctgggactgttcatggagatccacaccccggcttcggcctgctgcacctcccagattctggggttcactctttggcaacttcttagctagagataaaaagagaagagaacaaagtatggtagactttacttccctacccctctgcctccacccgccaaaaacggctactgaattggggaaaagggagaatttgagagattaaaagaatgttctgaagatgggagggttcactatttgcaaactttttttttttttttgagatggagtctcgctctgttgccaggatggagtgcagtggcacaatctcggctcactgcaacctccacctcccgggttcaagtgattatcctggctcagcctcccaagtagctgggactacaggtgtgcrccaccacgcccagctaatttttgtatttttagtagagacggggtttcaccacattggccaggatggtcttgatctcttgacctcgtgatccgcccgcctcggcctcccaaaatgctgggattacaggtgttagccaccacacctggccggcaaacttacacattgaagacaagggagctaaagctgcagccaaggatggaggtcataacagaaagttaaggtatttccatacctaaagtttttgcaaaaggagatactcgcacctatccttgatttgggttagctataattttgcctataaacgagggaaaaaggaggacctcaggatgttctgaccttacctattgccaggaagagatcattcacgttcatagctgtcttggckgaagtctccatgaacaataagctgttgtcatctgcatatgcctgggcctcctgcaaggagtgggatgtattagtgctcagaatgtagggtgggaacgagtattgcctttccactcccatgcagcacaacagctaggcaaaatcctaggttccctccccttaattaatacccctttgagccagctagcctagatgcataatttaatgacaactccctcaagatgaccccatgtccactcagtccaacacacaaatgtcagaaagcttaattataggggagagggtaagttagttgggggcttttgggttgtgacacttgaatagtcccttaccacaaatttaattgctccctccttcctgttttcacactggtacccccacagctggtacytccctaaccctctgctctggagttttctcctgactcctttgaaaatctcctggctgtcattagggtcacagtgttgctgtatttaacttggtgtagaactggggaatgagacaatgratgtcctctgttgacgttttcagagagggctggtttggaaaaaaagaggtcccaggaacagaggaagtgttagagaggaactccacgggccaccttacttcatactccaccatacgtttgttggccaggtcagctttgttccctgccagggcaataacgatgctaggactggcctgtcgctgtagttccttcacccatgtctttgctcgggcaaaggtttcctaggaaaacatgaagagaatgagtaggctggaatgactgccaatccatatccatcaccttttaaaatgagtctcaaaattcacctcttctaggtggtcttccctcagtgaaaccacaggtctctgataattcattatctgtcttcttagcacttggaagcataatttgtactcttatttgctatttcaagaacccgttttctgcccccttaccccctgccccaaactaactcctctaaatataagcaaggacagtcttttttcttttttttttgaggcggagttttgctctgtcgccgaggctagagtgcagtggctcgatctcggctcactgcaacctccgcctcctgggttcaagcgattctcctgcctcagcctcccgagtagctgggactacaggcgcscrccaccacgcccaactaatttttgtaattttagtagagacggggtttcaccatgttggccaggatggtctcaatctcttgacctcatgatcctcccgccttggcatcctaaagtgttgggattataggcgtaagccaccatgtccagccaacaaggacagtcttcttagctcacttacctgattagtaatgtcgtaaaccacgattgcagcttgggcacccctgtagtacatgggggctaagctgtgatatcgctcctgcccagctgtgtcccagatctcaaacttcactgttgtgtcatctagacaaacggactgggtgaggaaggccgctatggatgagagaatggaggggaagatgctgtaagtgggaggatgaatgggaacatccctcccccccttcaaaatgtaactgccctacactaagaccagtcaccacccaggatagtcagctacaggaaaaggttttgagttctccttacatgtaagtcttgaaaccaggattaagactgcccttggctaagtccttcctgccagaaatgtcactagctaaggaatgggggtacatcataaactaagagggacagaagaactggcacttatacgagtcatccttcttctaaccaaaataggagaataacaaatgacagagaaaatagcttcagataaaagtcacatcaagaattaattagaagattgggctgggcacggtagctcacgcctgtaatcccagcactttgggaggtgggggctgaggcaggtggatcacctgaggtcaggagttcgagaccagtctggccaacacggcaaaacccgtctctactaaaaatacaaaaattagccaggcgtggtggtggacacctgtaatcacagctactcgggaggctgaggctggagaatcccttgaacttgggaggtggaggttgcagtgagccaagatggcgccactgcacttcagcctgggcaacaagagcggaactccgtctcaaaaaacaaacaaacaaacgcaaacaaacaaaagaattaattagaggattggctgggcgcagtggctcatgcctgtaatcccagcactttgggaggccaaggcaggtggatggcttgaggtcaggagttcgagaccagcctggccaacatagtgaaaccccgcctctactaaaaacacaaaagttaaccaggcatggtgatggacgcctgtaattccagctacttgggaggctgaggcagcagaagtgcttgaactggggaagcggaagttgcaatgggcaaccactgcaccactgcactccagcctgggcaacagggtgagactcagtatccaaaaaaaaaaaaaaaaaaaaaaaagaattaattagaagattttaaagcttgatggcaagtcccatcattatcaatattatttggctgttactttttcatataatctgctgcaggtccaggaatacatttccaagatgactaataaaaaggggaaagaggccaggcacggtggctcatgcttgtaatcccagcactttgggaggccgaggcgggtggatcacttgaagtcaggagtttgagaccagcctggccaacacggtgaaaccctgtctctatacaaatacaaaaattagccgggcatggtggtatgtgcctgtaatctccgctgctcaggaggctgaggcacgagaatcacttgaacctgggaggcagaagttgcaatgagccaagattgcaccactgcactccagtctgggcgacagagactccgtctcaaaaataaataaataaataaataaaaataacaaggggaaggaataatttggaagttctcataaaagatcctttattgaattagcaccctattttggggtagtagtggggaaaaggtagcaaagatgagaaagacagacaccctttgtattttgcattagttccagcctctattttaccagatttttttttgtttttgaaacagtctcgctccttcgcctaggataaaatgcactggcgtgattttggctcactgcaacctccgcctcatgagttcaagcgagtctcctgcctcagcttcccaagtagctgggattacaggcatgtgccaccatgcccggctaatctttgttgttgttgttgttgttttgtttttttgagacggattttcactctagtcacccaggctggagtgcaatggcgcaatcttggctcactgcaacctccatctcctgggttcaagtagttctcctacctcagcctcctgagtagctggaattataggcatgtgccaccacgcccagctaattttttgtatttttagtagagacggggatttcaccttgttggccaggctggtcttgaactcctggcctcaagtgatccgcctgccttggcctcccaaatgctgggattacaggtgtgacccaccatgcccagcctattttaccagattttgatttttttttttttttggagatggagttttgctcttgtcgcccagggtggagtgcagtggcgcaatctcggctcactacaacctctgccccctgggttcaagtgattctcctgccttagcctcccgagtagctgggattacaggcgcctgccaccacgcctggctaattttttgtatttttagtagagacaggatttcgccatgttgggcaggctggtctcgaactcctgacctcaggtgatccgcccatcttggcctcccaaagtggtgggccactgggaccggcctctgtttttataaagggtttccatttctggggaaaagaatgggaytaagagggccagctccataatcaggtcttatatctcttttcaaaagccttaccggcccggcgtggtgactcacgcctgtaatcccagcactttgggaggccgaggcaggcagatcacctgaggtcaggagtttgagaccaacctggccaacatgatggtgaaaccccctctccactaaaaatacaaaaattagacaggtgccacggtgtgcacctgtaatcccagttactcgggaggctgaggcatgagaatcgctcgaacctgggagacagaggttgcagtaagccaagattgcgccactgcactccagcctgggtaacagagcaagactccatctaaaaaaaaaaaaacccttaccaaacattcaatctcctattaccccaaggcactcacctccaatggtgctctcctggtactcatggaactgccctttgacaaaacgtaataccaggcttgactttcccactgcagattctcccagcaggaccaatttgaactggcaaattttgctggcctggggttgcccattgggcctagctgtgcttctgctagtcatggccagattatcagaatgggaaagggtggagggagggggatactgtaaaggggggagggggaaggggaggggatttccaggcttcaacactcctgcaagaaaaaaaagtgaataaaattaaacatacgtccattgaagctgcaatcscttttcagagaaggatagaacctcttcatctccttgcttctatgaggacttagctctgagaaggtcccaggcagctgatcctcagtggtaagagttgggaagagcaaaataagaactgcttctggagtctgccctaccacataatctctaactgccaagggagccgaaatagagagactgaaaactgagagtttttaattccccagtaattccccaccaggtcttcaaagttttttgtttgagtcacacaaagtgatcaacctttagctggcctgaagaatatccagatccacccaccggtaccctagatccccagtatctccttggcatcctggtgctgtgctcttcttttccttttcttctttttttttgagacgtcactcttgttgcccaggctggagtgcaatggcacaatcttggctcaccacaacctctgcctcccgggttcaagcaattctcccacctcagtctcccgagtwgctgggattacaggcatgcaccaccacgcctggctaattttgtatttttagtagagacggagtttctccatgttggtcagactagtctaagaagtcctgacctcaggtgatctgcccgccttggccttccaaagtgctgatattacaggcatgagccacygtgcctggccttcttttcatttttccttagctctttgtcaaaatgagagattcactctaggggtgtgggataagagtcaccactcctaagggcagaagggtagttgctgctgtatcctttatatatgaccggtctccctgataagacatttctaaagatctaaccagggtcccattgccacaaaatctatcctttctcatttttggttgaaggtaaagagagaaatacaaccaacagatcacattcattatcaactctttgtttcattaacaactcttttttcactttgtttctgccatctttccaaatctgaaagtctatcaagaatcagtaagcttgacctactctcaacttgcagctgtcttgctggtgcctagggattagattaccctccacaccaaaggggcctaacagctgtagccctccaaattagaggcagagaaaggtataccttctaaagacatgcagaagtctccagaggatggtatagggcgttaagtctgcaagcaatcagtatttgatgaaagaatasactgaatcagctcctctatcttctaagagggctaagaaagctgctggtggggcagggaacagagagaagagttgggactttgagattctaatcgtctaaatctgaatacatttcatcatcctgactctragcggaaaggaactatgaaattcaaagggaagttagcataggcagagcatgcaaaaacctctctcccaaacctaagcattgcttgagagttgtactttgcttgttcaaattactctttcgcttttccaaagcagatcctagtgacttcacagacatcatactctatggcatatgtggggaaacatcattattttgtcaccacaattagtgggactggagttaaactggggttaaaaawtttcagtaaccccacttactagatcgtaaagacagaaaatcatacaggaggcaattcagaggaataaaggctctggagtccaattctccacrtttgtttttcagctctacttactagctatgaaccttgagcaagtcactaaatatatgtgtgcattcatttcctcatctgtaaaatgagataatagccttataagcacctacttcataagggtgttgtaaggattaaatgagataatgcatataaataactaaagtattttaagtatttgatagatactaagtgctaaataaatattaagctactaatcattactaatatgatataaagagaatttctctacctctctaagccttaccttctacctttgtaaaatggaaaaaataccatcctcatagctacaaataataagtgaaagatgtgtttagcatagtgctaatagctattaaaatatatctcaatattagttgttatcaatatattcctaaaaagcagccacagcctgggtgcagtagctcatacctataatcccagcactttgggaggctgaggtggatcacctgaggtcagaagttcgagccctgcctggccaacatggtgaaaccccgtctccactaaaaatacaaaaaaaattagctgggtgtggtggtgcatacctgtaatcccagctactccagaggctgaggcaggagaatcgcttaaacccagaaggtagagggtgcactgagctgatgcgccactgtgctccagcctgggtgacagagcgagactccgtctcaaaaaataaaaggcgggcacagtggctcacgcctgtaatcccagcactttgggaggcaaaggcaggcagatcaggaggtcaggagtttgagacaagcctggcaaacatggtgaaaccccgtctctactaaaaatacaaaaattagctgggcgtggtggcgcgtgcctgtagtcccagctacttgggaggttgaggcaggtgaactgcttgaacttgtgaggtggaggttgcagtgagctgagattgcaccactgtactccagcctggcgacagagcaacagcgagactcagtctaaaaaaaaaaaaaaaaaattagccgggtgtggttggtggccggcatttgtaatcctactcgggaggctgaggcagaactgcttaaacccgggaggcggaggttgcagtgagccgagatcgtgccaccacactccagcctgggtaacagagcaagactccacctggggtgggtaggggggagatcgggggcagggaagaagccacaatatgaaagtggtacagagaaagaaaaagagaaaaaacaggcctggcagagcggcccatgcctgtaatcccaggggtttgggagataaaaggggaagccttgcttgaggtgaggagtttgagaccagcctaggcaacatagcgagactgagtctctagaaaacatttaaaaaaattagctgggcatggtggtatgtgcctgtaatcccagctactccagaggctgtggtgggagaatcactggagcccaggagttgaaggttgtagtgagctgattacaccactgcactccagcctgggcgacagaacaagacgctatctctggaaaaaaaaaaaaaaaaaaaaggagacataactaaagggtaaagaggaagttagcaaaagaatgagaggtgagaactcaaggtcccaaagtagactagattaatacagaggaacatgacaattactttgattctactgggtattctgtagtccccttggtcagtcagtcttaaaaattcagatatacatgtaccattttatgattaagttttcaatggcctatgacgaaaggatcaaaataaagatgatacagcaaatttttcataaagctaaatttattcaatttaaatgagtatctttaattataacattttaaaatttattttccatttttagagagagtctcactctggtgtttgagaggtcaggagtttgagaccagcctggccaacatatagtgaaaccccgtctctactaaaaaatacaaaaattagctgggtgtagcgccacatgcctgtagtcccagctacttgggaagctgaggcaggagaatcgcttgaacccagagggcggaggttgcagtgagctgagattatgccactgtactccagcctgggcaacagagcaagactccrtctctcaaaataaaaaataaataaaagagaagacaggtgacaccataataaaaaaaaaaggacagatgataagctgatcaagtttccttcaggtgacatatatatgctatactctcaagaaacaatagaaaaagttactggttttttcaacttactcccttacatttttatgtatttcaaagcatgtgatccaaggggtagaatattaagcctcaatgttactactctacaatamaggaaaatgtgggagttagaatggactgaattctcatggctaaacatatcacttgagctctgggggagtgtaaagacaggaaacaattgcagacacgcttgagttgcaaagtctctgtcactaactctcagagatgggaagtcaagccagagcccagatgtggtcagcaagctttcttgctactaagcaaccttggattctcagagatcagtaactactgacttagaaaagactacctcgtaccctaatatgtagccttaagagtatgttctggctgcacatcatggttcacgcctgtaataccagcattttgggaggccaaggcaggaggatcacttgagcccaggagtttgagaccagcctgggcaacatagtgagatcccacctctgaaaaagaaagaatatgtcctgccttcctccctgttcacagcaattgttgagccacctctaagctttgatctttaatcttatcatgtttataagggtatcatttaaaaaatataatagctagactctcaaaaattctgtggtacagaaatgaaataatacatataagattcaattatttattttctattctcattttttcccacaaaaatactaatttttttttttttttttggtaaaccagtcaagtggtatgatgattattaccttcaaacccgagacaaaaaaaagggagatggggcaggtttctcttcctttcaacctttttagctcagaagagaagaaatcagatttaacttcccttagaagtgcagctctgccrggtgcagtgactcatgcctgaaatcccagcactttgggaggctgaggtgggcggatcacctaaggtcaggaattcaacaccagtctggcgaacatggtgaaaccccgtctctattaaaaacacaaaaattagccaggtgtkgtggctgacacctgtaatctcagctacttgggaggctgaagcaggagaattgcttgaacctgggaggcagaggctgcagtgggtcgagactttgccactgcactccagcctgggtgacagagcaagactccatcaaaaaaaaaaaaaaagaagtacggctctacaagaatgacttataaaatgacccattaactagggaggattgaggcctgaccatgggttagcccactagatgcaggagacccatggaggatgttctttaatgtgggcaactctcccaagcagtgcagcaaagtaggcataacagtaaaagtgtcttagcagtcccagctagagtaagactccattcctcaagcccccttccacttgttagctttgagtccctaaaccaaatacatatgaagtctccagaagtctatcacctatcaacagagacagagttctcggtatatatagccactggagtccaacccagtaccagttgtcagccttaaggtcagtcaggcagatcagagccagtctagaggtcatttagtccagtctctatattttataggtgaggaaaccgagacacatacaattagtcaatttgggctaggcgtsgtggcttacacctgtaatcctagcactttgggagggcgagatgggcagatcacctgaggtcaggagtttgagaccagcctggccaacgtggtgaaaacctgtctctactaaaaatacaaaaattagctgggtgtggtggtgcgtgcctgtaatcccagctactcaggaggctgaggcacgagaattgcttgaacctgggaggcagaggtagcagtgagccgagatcacacgactgcactccagcctggacaacagagcgattccgtctcaaaaataaataaatagccccatcccttccccggctcccccggtgtccgccatggccaaagcctaygaccacctcttcaagttgctgctgatcggggactcgggggtgggcaagacttgtctgatcattcgctttgcagaggacaacttcaacaacacttacatctccaccatyggaattgatttcaagatccgcactgtggatatagaggggaagaagatcaaactacaagtctgggacacagctggccaagagcggttcaagacaataactactgcctactaccgtggagccatgggcattatcctagcatacgacatcacggatgagaaatctttcgagaatattcagaactggatgaaaagcatcatggagaatgcctcagctggggtggagcacctcttgctagggaacaaatgtgacatggaggccaagaggaaggtgcagaaggagcaggccgataagttggctcgagagcatggaatccgatttttcgaaactagtgctaaatccagtatgaatgtggatgaggcttttagttccctggcccgggacatcttgctcaagtcaggaggccggagatcaggaaacrgcaacaagcctcccagtactgacctgaaaacttgtgacataaagaacaccaacaagtgctccctgagctgaggaccctttcttgcctccccaccccggaagctgaacctgagggagacaacagcagagggagtgagcaggggagaaatagcagaggggcttggagggacacataggtagatggtaaagagaatgaggagaaaaaggagaaaagggaaaagcagaaaggaaaagaaggaaaagagaggaagggagaagggagaggaatgaattgaggaagtgaacgaaggcaaggaggtaggaagagagggaggaggaaaggaaggagagatgcctcaggcttcagaccttacctgggttttcagggcaaacataaatgtaaatacactgatttattctgttactagatcaggttttagggtcctgcaaagggctagctcggcactacactagggaatttgctcctgttctgtcacttgtcatggtctttcttggtattaaaggccaccatttgcacaaaaaataaataaataaataaaaaataaaataaaattagtcaacttgtcaagtgttaccatacagccaactgctaagcagtaaatgtaggactcctagtcaggtactcctgcctcttataccactatacttcttaaggaagcaggaaatgctgaactctaaagagaacaccaggacaggatcgagagcttagactggatagagttcctgcctctattcagtttaggtaagtacttgctttgggactaaaaacaaattaagaagacccaggccttccttggcaactgggatgcagtcccatatctttctgacagaagaattaattcatcactactcttttctagaaggtctatgaccaaaccctgccaggacagttgaaatagaagcaattcaatgagaggcaataggaaaacaagcggtaacttttgcagaatttggtgggccctgcgattaatgtgagagttttactaagtagggaagatagagcagaaaccagtaaataccttcatctccctctccaactctgtttaaacccaagtcaccaaaatcttgaaatgagagttctaccacttggctcagctcttcattttgttgatccagtgttacctaatgagtcattggattaaatgagattccttccacatctcgcaccctttcccttatatttctccaagaggcaaaaagcatacttacctcttatcagtatggtagtacaaactccctattattgacctaggtaagattggaatgcccgtccctacttgtctgcctagcaaaattctatatatctcataagaccaagctcaaatgttacttcagtgaaattacataatcaccctctcccccacagaattaatcattctctagaggcccgtagggtcccacagtattaagactgtatttctggccaggtgtggtggcgcacacctgtaatcccagcactttgagaggccaaggcagatggatcactggaggttaggagttcgagaccagcctggccaatatggtgaaaccccgtctctactaaaaatacaaaaattagctgggcatgttggcacaggcttgtaatcccagttacccaggaggctgagacatgagaattgcttgagcccgggaggcggaggttgcagtgagcacagattgcaccactgtactccagcctggacagcaaagcaagaatccgtctcaaaaaaaaaaaaaaagactgtatttctataatagtatgtatcacattatcacagtatataaattgtgtctgtctgctctgctaaactatgaacttctttaaaagtgggagtttatcttaaaatcttcagagcacagcatgctgcctgatccctagtaggtgctcattaaatgctccctaaattaaggctaagtaattctacttctctcccccaatcaactcctccctttctgtaccatctggacagatcttactcaattccatttgggttcttttttttttttcctgagacggagtcttgctcagtcgcccaggctggagtgcagtgacgcgatctcggctcactgcaagctctgcctcccaggttcacgccattctcctgcttcagcctcccgagaagctgggggactacaggcgcccaccaccacgcccagctaattttttgtattttgtttagtagagacggggtttcaccgtgttagccaggatggtctcaatctcctgacctcgtgatccacccgcctcagcctcccaaagtgctgggattacaggcgcatgccaccgcacacggccccatttgggaatatttttaataggcctcagaatcaattctctccctggctcctctgtgatctcccttggatggagggcccccttgggatcttgcccacaaggtactattgcaactcgcatgggctaactgcttttcctgtcacccgttactatgcctcagatggcctaatcacacccaatatgtggccctcccacccaaacactgaggcaactatagctaaaaacaaagttcgctgaattttcagttgatgttgaacggtcaaaagctttgggccactatctattaattcctgacttgagaaacacaagtttaaaaaaaggagccataacaccacagaaccaggagacactctgaaaaggtacccactgtccctgaacagaagctacaaccttgcccagaaatgtacacatactttgttcacctgggtagctccttattcagttcagttactgttgagtcaatggctaaatctttcccaaaacggaagtgggagtataccatgtagggttttatggtatccttcctccaagagggctgctgcatttccttattataagttcattgtctcacactttggttaccttccaatctgaaatgctttaggattagggagcaaactatacgcttgcttcttctaccctatgcctccttctcagaagtaaaattcataccaataagcaatatttgctcccaggtaaagtaagagttagaagatatgaggtatgttatgcagtagggattgtccaggaaaaaaattttaaaagatatgaggtatgacttgaagggcaatgggaaagctctcttctccaaatatatttttgcaactccaggtctatgtatgaaattccttattgataattctactcctaaactctcttaggatgcaaaaaactgttggaaaaattagataggattaaaacacacacacacacacgcacacacggccaggcgcggtggctcactcctgtaatcccagtgctttgggaggctgaggcacgtggatcacctgaggtcaggagttagagtccagcctggccaacatggtcaaatcccgtctctactaataatacaaaaattagctggtcgtggtggtgcacgcctgtaatcccagctactctggaggctgaggcaggagaatcgcgtgaacctaggaggcagacgttgcagtgagccgagatcatgccactgcactccagcctgggtgacaaaagtgaaactccgtctaaaaacacacacacatactcctacacaactgtctctaggactggcttgcaggtgagaaaagttccttgggggaaaaaaccgaggtttccaatgggcgctgtacaaaggctgggtacaacagagggcttttaaagctagtaaggacaaattcaattaataaggtggtagtatgaaatgccccagctgtactctgactctgagatttagaggaaaaccgatttcaaatccagataagcttggagcttctcagatccctacagaaagacacacactgtactccagcctaagtgacaaagcaagaccctgtctctaaaaatagaagaaaagaaaagaaagacaaatacaggggcctcttaggagaaccatcatcatcatggataagaaagggatagtcaagtaatgtgaacatgcagagaccatgaacatccagagaccatgaatttgagataagggtctgaaattcctttctttagcagagatgccaacaattatcccaaccaaaatgatcctttctccccataaagttttgttccatctctttgggcacttcctaggacacccagcacacaacttggggtgtgtgtgtttgtgtgtactcaaggtgaataacacacagtacagccctctgcttgtcggacttggtagaagacaaaatgaactgtgaaaggaacacaataaataacagagtatcatcccagaagggaaaactgtagaaagaataagactagagtttgatgagaacatgaaaacacaattgccttttgtgacacatcccccaaagcaaagcaagattagtctgatttgctgtctctgatccttgaccttcctaaatgaaatatgaataaggtatgtgtgggaggatttayacttcttaaactgctgtacaccttccatattttaaaatatgtacatattaacttttgtaattaagaaatgtagtgatggccgggtgtggtggctcacgcctgtaatcccagcactttgggaggccgaggtgggcggatcatgaggtcaagagattgagaccatcctggccaacatggtaaaaccctgtctctactaaaaatacaaaaattagctgggcgtggtggcgcacgcctgtagtcccagctacttgggaggctgaggcaggagaatctcttgaacctgggaggtggaggttgcagtgagactccgtctcaaaaaaaaaaaaaaaaaaaaaagaaatgtagtgataaaatatattggtagagacgcagaaaaggaggaagtacagtaagggaaaatccaataggctccaatctatgagggactaagaaggctagcagaccattaaaaatatgtggggaggagggtactccactcctctgctttggcaatctttgtcttttttttttttggagacagggtctcattctgttgcccaggctggagtgcagtgggaagatcatggctcactgcaccctcgaactcccgggctcaagtgatcctcctgtctcagcctcccaaagtgctgggattacaggcgtgggctactgcacctctgtatctttttctctactcaccatcttccccagatacttcatagtttgacccaactttctaacagcacagaaatctgggcttttgaagtagacaaagaacaaggggtgatgccaagcttttgaaatggaatttctcactcttccccaaatctcttcctcagtgatatcaccgcatagtttcggacctgttaactccattacctgcctgggaaatacccaagtcaagtctaagtcccacaaaagtttcaccaactatgatcagaagatctcctgatggctgaggatctctaagcccctttcccatgtagataatgaaatagatatgaaatagattctcagttctaggagacatggtatttgctatagaccacattattaagtgggaaagaagtggacaaaacatgcccccaatccaacttcttagctctttcataggacatgaaacagtaagttaagaaacagactgcagtatagaccagctatgaggccaacagaaagtgtaggggctgagtttggagcagccaacagtcatggaaaaaaaaaaattactttgatcttcatccctaccctgggagttttaaaaagcttcaaattaccacatctaaacactaaagggaacaaaagagtgtgtactcccaagacccagagcccccagcccacccttcagcattcccagaagttcccataactgataccaggccctgcttccattacttcaactaccttagtcttctagattaatacagccttcttcattttccccagttctccctcactgaacccaaatctctctcagctcaacaccatagcaccctcagttctttttacaataggcactttccctgaaaagaacgcttcttacccaactaagaacccttctcaggcccttccaatgaacctctctgcagggacccagccccagtcacccccggggctcgggcgacaggtctgaccctcctcacctcccggcaaatgggcttacctcacccgctgccctgttcctttccccagctcctccctcttcagcgctgcttaatgaggcctgcccctgccctcactcaagctccaggcctccagcccccggccctcggcctggccgccgccacagcccagccgccttcccgactcaccaacttcggggtcccaggccgcccagtcccctcctcagcgacccccattaggcctgccggggcccggcccccttctcccctctccggtgggccactctaacccctcgcttaggaccagacccgcctccgctctcaggccaggctgctctcatctcccgggcgcttccgcccctgccctttgggctccatcagctcggtacctggggctccgtctcccccgtcggccccaagcctgtgtcgaacagacaaacagctgcagctcaaccaaaccctcctgcccctccttctcctcctcgccctggggcggggctccagccaatagctcgattacccgcctaccttcgagggtgggctatatgtgcactcatccacc

SEQ ID NO: 8771 - DNA, 32644 bp, Homo sapiens
taggctgctggatgtcattcacacagaaaataaactctacctggtttttgaatttctgcaccaagatctcaagaaattcatggatgcctctgctctcactggcattcctcttcccctcatcaaggtaatgcttctcatcagctcctctcatcatgggcatgtcttgggggactggtggcaggcaattcagggtgatattttatgattttggcctccttctgagccctcatctcctatacacacacactccccttctttttgtgtctccttccctgctcattatattcattaaccctagggttggactgaacaatcaaagttgaaactctagtgagtcaacctagcaactcaggtgggaggtcagatgaaactcagataaacgggatttgagagcacttggtaaattcctccaaaaagcccttccatttggtggaagacctagctagtgagtccctattgtctattttagggctggattcttcactcccagagctactttcaatctattaacaaacattttttcaatgcacaggatgtagaaaagggatggaaaattgagtaagacttggtccttatcctctctgggctgacagtccattgggagaaatagcttgtaaatatgtaactataatccaacataataaaggctttagtagagttttaggggcacagagcaaacccagtctgctcactgtaatggagaaacacagtcctctctttctcctttgtcagagctatctgttccagctgctccagggcctagctttctgccattctcatcgggtcctccaccgagaccttaaacctcagaatctgcttattaacacagagggggccatcaagctagcagactttggactagccagagcttttggagtccctgttcgtacttacacccatgaggtgagtccctttatgtcttttttctctgagcttcccaagaggtgttaactagggtattcacaaagttactaaaaatatctggctaacagtttcttactaggtagaaataatctcttgacatcctaaagagtcttagggtatgcatggaattcatactgtgttgctaactgggcccacacctgtaataccaatactttgggaggctgaggtgggaggatcacttgagcccaggagttcgagaccatcatgggcaacatagcgagaccccatctctacaaatctacaaaaagaaaaaatttagaaataaaattatgaccaatttgtctcaagtttttccaggaagatctcaaattaggggttcagtccagaactatggactggaaatcagtgggaggggaaagatgatggagggaaggaaactgcttgttaagaggccaagagtaagcagagtagtgttgaggaactgagatgcgggaatttccataccctataaaccaccccgcccctccctattcccgtccctcaggtggtgaccctgtggtaccgagctcctgaaatcctcctgggctgcaaatattattccacagctgtggacatctggagcctgggctgcatctttgctgagatggtatggaggcttgcccaagttccacccagccccctccctctcctccccacatccaagaacaacagaactgcttcttggcccagacctatggcccttctatcacagggttctctctctaaagtagcaccaaggggaatggtgggaaaggatgcaactgttgccctgatatcaaccacagtgttaggatatcctcaaacagccttagtacctggtatacatctcttatccctgaaataagttaaagcatttctgcagctgttttagctgtagtctgcatatatttgggagaatgattccatttagtgcctcttttatttcaggccttcatttcaaggcttgtagaccttgttgtatggtgccagcaatgtagtgaagacaactgtggtcactttacccacacctttcatttaaactgcagatttaggcagggtgcagtggctcacacctataataccagcactttgggaggctgaggtaggtggatcacctgaggtcaggagtttgagaccagcctggccaacatgttaaaaccctgtctctactaaaaatacaaaaattagccaggtgtggctacttgggattacacacctgtaatcccagctacttgggaggccaaggcaggagaatcggttgaacccgggagatggaggttgcagtgaccaagattgcaccactgcactccagcctgggcgacagaatgagattccatctcaaaaaaaaaaaaaaaaaaaaaaaaaaaaagatttagatcatgttccccttcaacctctggcttttcagactgaaggatccttgaagcctggctttatgtagaagctcccatctcctttaatataacagtacagtggtgcagtaggctgtcttcaaatcagcaatatgttttattgtcttttatcttggttgtaaccaagagcttaaagaccattagcctatacatatgtaatgtgcatttatccccccagtgcattaccttacaattgtccgtattcctctctcaattcatcaaaaaatatttgttaagcacctagtgggtacccagcaccatgctaggtgctgtggggaacacagaagaaatggaagacagagtctctgcccgctgtgctcgtatctagaagtggctgcatcacaaggttgggggatgaccgcagtgtctaccccctaccccgtgagtggcttgggatacctttgctacatgtcagtggcaccccagacattcaccccctcccagacccacccagccttggggatctgcaaagccatggttgggggaaggaaggagggggcgaggagacagatgaaggaacttcattgtctcaggttctgtgtgactgaccccatgaaaggccctggggagggagtcatggggccctgctgaccttttactgtctgtgggaactcctttgtatagaggagagttttgactgacgtcaacgtgggtcttggtatttcctctttccccattttcaggtgactcgccgggccctattccctggagattctgagattgaccagctcttccggatctttcggactctggggaccccagatgaggtggtgtggccaggagttacttctatgcctgattacaagccaagtttccccaagtgggcccggcaagattttagtaaagttgtacctcccctggatgaagatggacggagcttgttatcggtgagagtgggcacctgttttccctcattcatttctcccagggaagggcttttccaggatgaaggaaggatgagaccctgaaatctgggcctcagtgtttcatttccctggttcctgctctccctgttggcacactgattcagctatgggaggatggaagtgagaattctgccttgggtagaaggagttctggtttcctgatttctgggaacacctgctgcccatttagtccactatcacatcattgaagtcaacatgcatctctccctctagcaaatgctgcactacgaccctaacaagcggatttcggccaaggcagccctggctcaccctttcttccaggatgtgaccaagccagtaccccatcttcgactctgatagccttcttgaagcccccagccctaatctcaccctctcctccagtgtgggcttgaccaggcttggccttgggctatttggactcaggtgggccctctgaacttgccttaaacactcaccttctagtcttggccagccaactctgggaatacaggggtgaaaggggggaaccagtgaaaatgaaaggaagtttcagtattagatgcacttaagttagcctccaccaccctttcccccttctcttagttattgctgaagagggttggtataaaaataattttaaaaaagccttcctacacgttagatttgccgtaccaatctctgaatgccccataattattatttccagtgtttgggatgaccaggatcccaagcctcctgctgccacaatgtttataaaggccaaatgatagcgggggctaagttggtgcttttgagaaccaagtaaaacaaaaccactgggaggagtctattttaaagaattcggttgaaaaaatagatccaatcagtttataccctagttagtgttttgcctcacctaataggctgggagactgaagactcagcccgggtggggctgcagaaaaatgattggccccagtccccttgtttgtcccttctacaggcatgaggaatctgggaggccctgagacagggattgtgcttcattccaatctattgcttcaccatggccttatgaggcaggtgagagatgtttgaatttttctcttccttttagtattcttagttgttcagttgccaaggatccctgatcccattttcctctgacgtccacctcctaccccataggagttagaagttagggtttaggcatcattttgagaatgctgacactttttcagggctgtgattgagtgagggcatgggtaaaaatatttctttaaaagaaggatgaacaattatatttatatttcaggttatatccaatagtagagttggctttttttttttttttttggtcatagtgggtggatttgttgccatgtgcaccttggggttttgtaatgacagtgctaaaaaaaaaaagcattttttttttatgatttgtctctgtcacccttgtccttgagtgctcttgctattaacgttatttgtaatttagtttgtagctcattaaaaaaatgtgcctagttttatagttcatctctttcctcctcttatttactgaaagaatggtgggagacagaatatgaatgtgtgtatgtgatcattgatttcagaccccttttcctaatctctctgtgcatggctgcccaccccaccccattttggctagtgctgacggtgaacaaagtggttattatcatccctatttatggctggggaaactgaagcctatatacttcctacttcactttctccacacaccagcaaacctcctttcccccagccaacataccacacacacaccacaccacacacacatcatatacacacatataccacacacaccacgtatacatataccaaatacacacacaccacatacacaccatatatgcacacacaccccatacatacacacacccatgcacatacatagcggcaggaagagggctcccggggaatttgcctttcgacactgcatttcccagtaagcccgccgtttttcctttctgtttcatatcacagacagaaaagttttccaaagattcttttatttacatttacatacgattctgaaaaagcgtctccaagctaccacttcttgtagttgccattgtctcattccaccaaaaaacatctcagaccgcccgcggccaccccaaatacgcctgtccactgaagcctcactaaaaggaggaagcgctgatgtcagggttacttaaattcccaggctccggatccctagaagaggtatttccctttacgcccgcgaatttgtcatagaaggcagggcactagagccagccccagccaagtccagggggaggggcgaaggtcagtagcggccttcctaaggcttccttcaacccctccttgcctgccagtcaagtaccgtattttcgcagtactggttaaagtttcactttgacccgcctccatcactcacctgattagatgtttatgagtcaaaaggcggggtcatggggtgtcgagattttattggtggatacatacgcctgtcggcagtgtaccgccccctgtcttcaggagcttgctctttaatggctccttacctcgtccatcttcgaggtttctccctcgctattggcttgtggccccgcctgtcgcgtcccttgctcgtacttgttggtgacagcgcccaaagagactcgcctttctccagaggattggtggatgagtgcacatatagcccaccctcgaaggtaggcgggtaatcgagctattggctggagccccgccccagggcgaggaggagaaggaggggcaggagggtttggttgagctgcagctgtttgtctgttcgacacaggcttggggccgacgggggagacggagccccaggtaccgagctgatggagcccaaagggcaggggcggaagcgcccgggagatgagagcagcctggcctgagagcggaggcgggtctggtcctaagcgaggggttagagtggcccaccggagaggggagaagggggccgggccccggcaggcctaatgggggtcgctgaggaggggactgggcggcctgggaccccgaagttggtgagtcgggaaggcggctgggctgtggcggcggccaggccgagggccgggggctggaggcctggagcttgagtgagggcaggggcaggcctcattaagcagcgctgaagagggaggagctggggaaaggaacagggcagcgggtgaggtaagcccatttgccgggaggtgaggagggtcagacctgtcgcccgagccccgggggtgactggggctgggtccctgcagagaggttcattggaagggcctgagaagggttcttagttgggtaagaagcgttcttttcagggaaagtgcctattgtaaaaagaactgagggtgctatggtgttgagctgagagagatttgggttcagtgagggagaactggggaaaatgaagaaggctgtattaatctagaagactaaggtagttgaagtaatggaagcagggcctggtatcagttatgggaacttctgggaatgctgaagggtgggctgggggctctgggtcttgggagtacacactcttttgttccctttagtgtttagatgtggtaatttgaagctttttaaaactcccagggtagggatgaagatcaaagtaatttttttttttccatgactgttggctgctccaaactcagcccctacactttctgttggcctcatagctggtctatactgcagtctgtttcttaacttactgtttcatgtcctatgaaagagctaagaagttggattgggggcatgttttgtccacttctttcccacttaataatgtggtctatagcaaataccatgtctcctagaactgagaatctatttcatatctatttcattatctacatgggaaaggggcttagagatcctcagccatcaggagatcttctgatcatagttggtgaaacttttgtgggacttagacttgacttgggtatttcccaggcaggtaatggagttaacaggtccgaaactatgcggtgatatcactgaggaagagatttggggaagagtgagaaattccatttcaaaagcttggcatcaccccttgttctttgtctacttcaaaagcccagatttctgtgctgttagaaagttgggtcaaactatgaagtatctggggaagatggtgagtagagaaaaagatacagaggtgcagtagcccacgcctgtaatcccagcactttgggaggctgagacaggaggatcacttgagcccgggagttcgagggtgcagtgagccatgatcttcccactgcactccagcctgggcaacagaatgagaccctgtctccaaaaaaaaaaaagacaaagattgccaaagcagaggagtggagtaccctcctccccamatatttttaatggtctgctagccttcttagtccctcatagattggagcctrttggattttcccttactgtacttcctccttttctgcgtctctaccaatatattttatcactacatttcttttttttttttttttttttttgagacggagtctcactgcaacctccacctcccaggttcaagagattctcctgcctcagcctcccaagtagctgggactacaggcgtgcgccaccacgcccagctaatttttgtatttttagtagagacagggttttaccatgttggccaggatggtctcaatctcttgacctcatgatccgcccacctcggcctcccaaagtgctgggattacaggcgtgagccaccacacccggccatcactacatttcttaattacaaaagttaatatgtacatattttaaaatatggaaggtgtacagcagtttaagaagtrtaaatcctcccacacataccttattcatatttcatttaggaaggtcaaggatcagagacagcaaatcagactaatcttgctttgctttgggggatgtgtcacaaaaggcaattgtgttttcatgttctcatcaaactctagtcttattctttctacagttttcccttctgggatgatactctgttatttattgtgttcctttcacagttcattttgtcttctaccaagtccgacaagcagagggctgtactgtgtgttattcaccttgagtacacacaaacacacacaccccaagttgtgtgctgggtgtcctaggaagtgcccaaagagatggaacaaaactttatggggagaaaggatcattttggttgggataattgttggcatctctgctaaagaaaggaatttcagacccttatctcaaattcatggtctctggatgttcatggtctctgcatgttcacattacttgactatccctttcttatccatgatgatgatggttctcctaagaggcccctgtatttgtctttcttttcttttcttctatttttagagacagggtcttgctttgtcacttaggctggagtacagtgtgtgtctttctgtagggatctgagaagctccaagcttatctggatttgaaatcggttttcctctaaatctcagagtcagagtacagctggggcatttcatactaccaccttattaattgaatttgtccttactagctttaaaagccctctgttgtacccagcctttgtacagcgcccattggaaacctcggttttttcccccaaggaacttttctcacctgcaagccagtcctagagacagttgtgtaggagtatgtgtgtgtgtttttagacggagtttcacttttgtcacccaggctggagtgcagtggcatgatctcggctcactgcaacgtctgcctcctaggttcacgcgattctcctgcctcagcctccagagtagctgggattacaggcgtgcaccaccacgaccagctaatttttgtattattagtagagacgggatttgaccatgttggccaggctggactctaactcctgacctcaggtgatccacgtgcctcagcctcccaaagcactgggattacaggagtgagccaccgcgcctggccgtgtgtgcgtgtgtgtgtgtgtgttttaatcctatctaatttttccaacagttttttgcatcctaagagagtttaggagtagaattatcaataaggaatttcatacatagacctggagttgcaaaaatatatttggagaagagagctttcccattgcccttcaagtcatacctcatatcttttaaaatttttttcctggacaatccctactgcataacatacctcatatcttctaactcttactttacctgggagcaaatattgcttattggtatgaattttacttctgagaaggaggcatagggtagaagaagcaagcgtatagtttgctccctaatcctaaagcatttcagattggaaggtaaccaaagtgtgagacaatgaacttataataaggaaatgcagcagccctcttggaggaaggataccataaaaccctacatggtatactcccacttccgttttgggaaagatttagccattgactcaacagtaactgaactgaataaggagctacccaggtgaacaaagtatgtgtacatttctgggcaaggttgtagcttctgttcagggacagtgggtaccttttcagagtgtctcctggttctgtggtgttatggctcctttttttaaacttgtgtttctcaagtcaggaattaatagatagtggcccaaagcttttgaccgttcaacatcaactgaaaattcagcgaactttgtttttagctatagttgcctcagtgtttgggtgggagggccacatattgggtgtgattaggccatctgaggcatagtaacgggtgacaggaaaagcagttagcccatgcgagttgcaatagtaccttgtgggcaagatcccaagggggccctccatccaagggagatcacagaggagccagggagagaattgattctgaggcctattaaaaatattcccaaatggggccgtgtgcggtggcatgygcctgtaatcccagcactttgggaggctgaggcgggtggatcacgaggtcaggagattgagaccatcctggctaacacggtgaaaccccgtctctactaaacaaaatacaaaaaattagctgggcgtggtggtgggcgcctgtagtcccccagcttctcgggaggctgaagcaggagaatggcgtgaacctgggaggcagagcttgcagtgagccgagatcgcgtcactgcactccagcctgggcgactgagcaagactccgtctcaggaaaaaaaaaaaagaacccaaatggaattgagtaagatctgtccagatggtacagaaagggaggagttgattgggggagagaagtagaattacttagccttaatttagggagcatttaatgagcacctactagggatcaggcagcatgctgtgctctgaagattttaagataaactcccacttttaaagaagttcatagtttagcagagcagacagacacaatttatatactgtgataatgtgatacatactattatagaaatacagtctttttttttttttttgagacggattcttgctttgctgtccaggctggagtacagtggtgcaatctgtgctcactgcaacctccgcctcccgggctcaagcaattctcatgtctcagcctcctgggtaactgggattacaagcctgtgccaacatgcccagctaatttttgtatttttagtagagacggggtttcaccatattggccaggctggtctcgaactcctaacctccagtgatccatctgccttggcctctcaaagtgctgggattacaggtgtgcgccaccacacctggccagaaatacagtcttaatactgtgggaccctacgggcctctagagaatgattaattctgtgggggagagggtgattatgtaatttcactgaagtaacatttgagcttggtcttatgagatatatagaattttgctaggcagacaagtagggacgggcattccaatcttacctaggtcaataatagggagtttgtactaccatactgataagaggtaagtatgctttttgcctcttggagaaatataagggaaagggtgcgagatgtggaaggaatctcatttaatccaatgactcattaggtaacactggatcaacaaaatgaagagctgagccaagtggtagaactctcatttcaagattttggtgacttgggtttaaacagagttggagagggagatgaaggtatttactggtttctgctctatcttccctacttagtaaaactctcacattaatcgcagggcccaccaaattctgcaaaagttaccgcttgttttcctattgcctctcattgaattgcttctatttcaactgtcctggcagggtttggtcatagaccttctagaaaagagtagtgatgaattaattcttctgtcagaaagatatgggactgcatcccagttgccaaggaaggcctgggtcttcttaatttgtttttagtcccaaagcaagtacttacctaaactgaatagaggcaggaactctatccagtctaagctctcgatcctgtcctggtgttctctttagagttcagcatttcctgcttccttaagaagtatagtggtataagaggcaggagtacctgactaggagtcctacatttactgcttagcagttggctgtatggtaacacttgacaagttgactaattttattttattttttatttatttatttattttttgtgcaaatggtggcctttaataccaagaaagaccatgacaagtgacagaacaggagcaaattccctagtgtagtgccgagctagccctttgcaggaccctaaaacctgatctagtaacagaataaatcagtgtatttacatttatgtttgccctgaaaacccaggtaaggtctgaagcctgaggcatctctccttcctttcctcctccctctcttcctacctccttgccttcgttcacttcctcaattcattcctctcccttctcccttcctctcttttccttcttttcctttctgcttttcccttttctcctttttctcctcattctctttaccatctacctatgtgtccctccaagcccctctgctatttctcccctgctcactccctctgctgttgtctccctcaggttcagcttccggggtggggaggcaagaaagggtcctcagctcagggagcacttgttggtgttctttatgtcacaagttttcaggtcagtactgggaggcttgttgcygtttcctgatctccggcctcctgacttgagcaagatgtcccgggccagggaactaaaagcctcatccacattcatactggatttagcactagtttcgaaaaatcggattccatgctctcgagccaacttatcggcctgctccttctgcaccttcctcttggcctccatgtcacatttgttccctagcaagaggtgctccaccccagctgaggcattctccatgatgcttttcatccagttctgaatattctcgaaagatttctcatccgtgatgtcgtatgctaggataatgcccatggctccacggtagtaggcagtagttattgtcttgaaccgctcttggccagctgtgtcccagacttgtagtttgatcttcttcccctctatatccacagtgcggatcttgaaatcaattccratggtggagatgtaagtgttgttgaagttgtcctctgcaaagcgaatgatcagacaagtcttgcccacccccgagtccccgatcagcagcaacttgaagaggtggtcrtaggctttggccatggcggacaccgggggagccggggaagggatggggctatttatttatttttgagacggaatcgctctgttgtccaggctggagtgcagtcgtgtgatctcggctcactgctacctctgcctcccaggttcaagcaattctcgtgcctcagcctcctgagtagctgggattacaggcacgcaccaccacacccagctaatttttgtatttttagtagagacaggttttcaccacgttggccaggctggtctcaaactcctgacctcaggtgatctgcccatctcgccctcccaaagtgctaggattacaggtgtaagccacsacgcctagcccaaattgactaattgtatgtgtctcggtttcctcacctataaaatatagagactggactaaatgacctctagactggctctgatctgcctgactgaccttaaggctgacaactggtactgggttggactccagtggctatatataccgagaactctgtctctgttgataggtgatagacttctggagacttcatatgtatttggtttagggactcaaagctaacaagtggaagggggcttgaggaatggagtcttactctagctgggactgctaagacacttttactgttatgcctactttgctgcactgcttgggagagttgcccacattaaagaacatcctccatgggtctcctgcatctagtgggctaacccatggtcaggcctcaatcctccctagttaatgggtcattttataagtcattcttgtagagccgtacttctttttttttttttttgatggagtcttgctctgtcacccaggctggagtgcagtggcaaagtctcgacccactgcagcctctgcctcccaggttcaagcaattctcctgcttcagcctcccaagtagctgagattacaggtgtcagccacmacacctggctaatttttgtgtttttaatagagacggggtttcaccatgttcgccagactggtgttgaattcctgaccttaggtgatccgcccacctcagcctcccaaagtgctgggatttcaggcatgagtcactgcaccyggcagagctgcacttctaagggaagttaaatctgatttcttctcttctgagctaaaaaggttgaaaggaagagaaacctgccccatctcccttttttttgtctcgggtttgaaggtaataatcatcataccacttgactggtttaccaaaaaaaaaaaaaaaaattagtatttttgtgggaaaaaatgagaatagaaaataaataattgaatcttatatgtattatttcatttctgtaccacagaatttttgagagtctagctattatattttttaaatgatacccttataaacatgataagattaaagatcaaagcttagaggtggctcaacaattgctgtgaacagggaggaaggcaggacatattctttctttttcagaggtgggatctcactatgttgcccaggctggtctcaaactcctgggctcaagtgatcctcctgccttggcctcccaaaatgctggtattacaggcgtgaaccatgatgtgcagccagaacatactcttaaggctacatattagggtacgaggtagtcttttctaagtcagtagttactgatctctgagaatccaaggttgcttagtagcaagaaagcttgctgaccacatctgggctctggcttgacttcccatctctgagagttagtgacagagactttgcaactcaagcgtgtctgcaattgtttcctgtctttacactcccccagagctcaagtgatatgtttagccatgagaattcagtccattctaactcccacattttcctktattgtagagtagtaacattgaggcttaatattctaccccttggatcacatgctttgaaatacataaaaatgtaagggagtaagttgaaaaaaccagtaactttttctattgtttcttgagagtatagcatatatatgtcacctgaaggaaacttgatcagcttatcatctgtccttttttttttattatggtgtcacctgtcttctcttttatttattttttattttgagagayggagtcttgctctgttgcccaggctggagtacagtggcataatctcagctcactgcaacctccgccctctgggttcaagcgattctcctgcctcagcttcccaagtagctgggactacaggcatgtggcgctacacccagctaatttttgtattttttagtagagacggggtttcactatatgttggccaggctggtctcaaactcctgacctctcaaacaccagagtgagactctctctaaaaatggaaaataaattttaaaatgttataattaaagatactcatttaaattgaataaatttagctttatgaaaaatttgctgtatcatctttattttgatcctttcgtcataggccattgaaaacttaatcataaaatggtacatgtatatctgaatttttaagactgactgaccaaggggactacagaatacccagtagaatcaaagtaattgtcatgttcctctgtattaatctagtctactttgggaccttgagttctcacctctcattcttttgctaacttcctctttaccctttagttatgtctccttttttttttttttttttttccagagatagcgtcttgttctgtcgcccaggctggagtgcagtggtgtaatcagctcactacaaccttcaactcctgggctccagtgattctcccaccacagcctctggagtagctgggattacaggcacataccaccatgcccagctaatttttttaaatgttttctagagactcagtctcgctatgttgcctaggctggtctcaaactcctcacctcaagcaaggcttccccttttatctcccaaacccctgggattacaggcatgggccgctctgccaggcctgttttttctctttttctttctctgtaccactttcatattgtggcttcttccctgcccccgatctcccccctacccaccccaggtggagtcttgctctgttacccaggctggagtgtggtggcacgatctcggctcactgcaacctccgcctcccgggtttaagcagttctgcctcagcctcccgagtaggattacaaatgccggccaccaaccacacccggctaattttttttttttttttttagactgagtctcgctgttgctctgtcgccaggctggagtacagtggtgcaatctcagctcactgcaacctccacctcacaagttcaagcagttcacctgcctcaacctcccaagtagctgggactacaggcacgcgccaccacgcccagctaatttttgtatttttagtagagacggggtttcaccatgtttgccaggcttgtctcaaactcctgacctcctgatctgcctgcctttgcctcccaaagtgctgggattacaggcgtgagccactgtgcccgccttttattttttgagacggagtctcgctctgtcacccaggctggagcacagtggcgcatcagctcagtgcaccctctaccttctgggtttaagcgattctcctgcctcagcctctggagtagctgggattacaggtatgcaccaccacacccagctaattttttttgtatttttagtggagacggggtttcaccatgttggccaggcagggctcgaacttctgacctcaggtgatccacctcagcctcccaaagtgctgggattataggtatgagctactgcacccaggctgtggctgctttttaggaatatattgataacaactaatattgagatatattttaatagctattagcactatgctaaacacatctttcacttattatttgtagctatgaggatggtattttttccattttacaaaggtagaaggtaaggcttagagaggtagagaaattctctttatatcatattagtaatgattagtagcttaatatttatttagcacttagtatctatcaaatacttaaaatactttagttatttatatgcattatctcatttaatccttacaacacccttatgaagtaggtgcttataaggctattatctcattttacagatgaggaaatgaatgcacacatatatttagtgacttgctcaaggttcatagctagtaagtagagctgaaaaacaaaygtggagaattggactccagagcctttattcctctgaattgcctcctgtatgattttctgtctttacgatctagtaagtggggttactgaaawtttttaaccccagtttaactccagtcccactaattgtggtgacaaaataatgatgtttccccacatatgccatagagtatgatgtctgtgaagtcactaggatctgctttggaaaagcgaaagagtaatttgaacaagcaaagtacaactctcaagcaatgcttaggtttgggagagaggtttttgcatgctctgcctatgctaacttccctttgaatttcatagttcctttccgctyagagtcaggatgatgaaatgtattcagatttagacgattagaatctcaaagtcccaactcttctctctgttccctgccccaccagcagctttcttagccctcttagaagatagaggagctgattcagtstattctttcatcaaatactgattgcttgcagacttaacgccctataccatcctctggagacttctgcatgtctttagaaggtatacctttctctgcctctaatttggagggctacagctgttaggcccctttggtgtggagggtaatctaatccctaggcaccagcaagacagctgcaagttgagagtaggtcaagcttactgattcttgatagactttcagatttggaaagatggcagaaacaaagtgaaaaaagagttgttaatgaaacaaagagttgataatgaatgtgatctgttggttgtatttctctctttaccttcaaccaaaaatgagaaaggatagattttgtggcaatgggaccctggttagatctttagaaatgtcttatcagggagaccggtcatatataaaggatacagcagcaactacccttctgcccttaggagtggtgactcttatcccacacccctagagtgaatctctcattttgacaaagagctaaggaaaaatgaaaagaaggccaggcacrgtggctcatgcctgtaatatcagcactttggaaggccaaggcgggcagatcacctgaggtcaggacttcttagactagtctgaccaacatggagaaactccgtctctactaaaaatacaaaattagccaggcgtggtggtgcatgcctgtaatcccagcwactcgggagactgaggtgggagaattgcttgaacccgggaggcagaggttgtggtgagccaagattgtgccattgcactccagcctgggcaacaagagtgacgtctcaaaaaaaaagaagaaaaggaaaagaagagcacagcaccaggatgccaaggagatactggggatctagggtaccggtgggtggatctggatattcttcaggccagctaaaggttgatcactttgtgtgactcaaacaaaaaactttgaagacctggtggggaattactggggaattaaaaactctcagttttcagtctctctatttcggctcccttggcagttagagattatgtggtagggcagactccagaagcagttcttattttgctcttcccaactcttaccactgaggatcagctgcctgggaccttctcagagctaagtcctcatagaagcaaggagatgaagaggttctatccttctctgaaaagsgattgcagcttcaatggacgtatgtttaattttattcacttttttttcttgcaggagtgttgaagcctggaaatcccctccccttccccctcccccctttacagtatccccctccctccaccctttcccattctgataatctggccatgactagcagaagcacagctaggcccaatgggcaaccccaggccagcaaaatttgccagttcaaattggtcctgctgggagaatctgcagtgggaaagtcaagcctggtattacgttttgtcaaagggcagttccatgagtaccaggagagcaccattggaggtgagtgccttggggtaataggagattgaatgtttggtaagggtttttttttttttagatggagtcttgctctgttacccaggctggagtgcagtggcgcaatcttggcttactgcaacctctgtctcccaggttcgagcgattctcatgcctcagcctcccgagtaactgggattacaggtgcacaccgtggcacctgtctaatttttgtatttttagtggagagggggtttcaccatcatgttggccaggttggtctcaaactcctgacctcaggtgatctgcctgcctcggcctcccaaagtgctgggattacaggcgtgagtcaccacgccgggccggtaaggcttttgaaaagagatataagacctgattatggagctggccctcttartcccattcttttccccagaaatggaaaccctttataaaaacagaggccggtcccagtggcccaccactttgggaggccaagatgggcggatcacctgaggtcaggagttcgagaccagcctgcccaacatggcgaaatcctgtctctactaaaaatacaaaaaattagccaggcgtggtggcaggcgcctgtaatcccagctactcgggaggctaaggcaggagaatcacttgaacccagggggcagaggttgtagtgagccgagattgcgccactgcactccaccctgggcgacaagagcaaaactccatctccaaaaaaaaaaaaaaatcaaaatctggtaaaataggctgggcatggtgggtcacacctgtaatcccagcatttgggaggccaaggcaggcggatcacttgaggccaggagttcaagaccagcctggccaacaaggtgaaatccccgtctctactaaaaatacaaaaaattagctgggcgtggtggcacatgcctataattccagctactcaggaggctgaggtaggagaactacttgaacccaggagatggaggttgcagtgagccaagattgcgccattgcactccagcctgggtgactagagtgaaaatccgtctcaaaaaaacaaaacaacaacaacaacaacaaagattagccgggcatggtggcacatgcctgtaatcccagctacttgggaagctgaggcaggagactcgcttgaactcatgaggcggaggttgcagtgagccaaaatcacgccagtgcattttatcctaggcgaaggagcgagactgtttcaaaaacaaaaaaaaatctggtaaaatagaggctggaactaatgcaaaatacaaagggtgtctgtctttctcatctttgctaccttttccccactactaccccaaaatagggtgctaattcaataaaggatcttttatgagaacttccaaattattccttccccttgttatttttatttatttatttatttatttttgagacggagtctctgtcgcccagactggagtgcagtggtgcaatcttggctcattgcaacttctgcctcccaggttcaagtgattctcgtgcctcagcctcctgagcagcggagattacaggcacataccaccatgcccggctaatttttgtatttgtatagagacagggtttcaccgtgttggccaggctggtctcaaactcctgacttcaagtgatccacccgcctcggcctcccaaagtgctgggattacaagcatgagccaccgtgcctggcctctttcccctttttattagtcatcttggaaatgtattcctggacctgcagcagattatatgaaaaagtaacagccaaataatattgataatgatgggacttgccatcaagctttaaaatcttctaattaattcttttttttttttttttttttttttggatactgagtctcaccctgttgcccaggctggagtgcagtggtgcagtggttgcccattgcaacttccgcttccccagttcaagcacttctgctgcctcagcctcccaagtagctggaattacaggcgtccatcaccatgcctggttaacttttgtgtttttagtagaggcggggtttcactatgttggccaggctggtctcgaactcctgacctcaagccatccacctgccttggcctcccaaagtgctgggattacaggcatgagccactgcgcccagccaatcctctaattaattcttttgtttgtttgcgtttgtttgtttgttttttgagacggagttccgctcttgttgcccaggctgaagtgcagtggcgccatcttggctcactgcaacctccacctcccaagttcaagggattctccagcctcagcctcccgagtagctgtgattacaggtgtccaccaccacgcctggctaatttttgtatttttagtagagacgggttttgccgtgttggccagactggtctcgaactcctgacctcaggtgatccacctgcctcagcccccacctcccaaagtgctgggattacaggcgtgagctaccgtgcccagcccaatcttctaattaattcttgatgtgacttttatctgaagctattttctctgtcatttgttattctcctattttggttagaagaaggatgactcgtataagtgccagttcttctgtccctcttagtttatgatgtacccccattccttagctagtgacatttctggcaggaaggacttagccaagggcagtcttaatcctggtttcaagacttacatgtaaggagaactcaaaaccttttcctgtagctgactatcctgggtggtgactggtcttagtgtagggcagttacattttgaagggggggagggatgttcccattcatcctcccacttacagcatcttcccctccattctctcatccatagcggccttcctcacccagtccgtttgtctagatgacacaacagtgaagtttgagatctgggacacagctgggcaggagcgatatcacagcttagcccccatgtactacaggggtgcccaagctgcaatcgtggtttacgacattactaatcaggtaagtgagctaagaagactgtccttgttggctggacatggtggcttacgcctataatcccaacactttaggatgccaaggcgggaggatcatgaggtcaagagattgagaccatcctggccaacatggtgaaaccccgtctctactaaaattacaaaaattagttgggcgtggtggygsgcgcctgtagtcccagctactcgggaggctgaggcaggagaatcgcttgaacccaggaggcggaggttgcagtgagccgagatcgagccactgcactctagcctcggcgacagagcaaaactccgcctcaaaaaaaaaagaaaaaagactgtccttgcttatatttagaggagttagtttggggcagggggtaagggggcagaaaacgggttcttgaaatagcaaataagagtacaaattatgcttccaagtgctaagaagacagataatgaattatcagagacctgtggtttcactgagggaagaccacctagaagaggtgaattttgagactcattttaaaaggtgatggatatggattggcagtcattccagcctactcattctcttcatgttttcctaggaaacctttgcccgagcaaagacatgggtgaaggaactacagcgacaggccagtcctagcatcgttattgccctggcagggaacaaagctgacctggccaacaaacgtatggtggagtatgaagtaaggtggcccgtggagttcctctctaacacttcctctgttcctgggacctctttttttccaaaccagccctctctgaaaacgtcaacagaggacatycattgtctcattccccagttctacaccaagttaaatacagcaacactgtgaccctaatgacagccaggagattttcaaaggagtcaggagaaaactccagagcagagggttagggargtaccagctgtgggggtaccagtgtgaaaacaggaaggagggagcaattaaatttgtggtaagggactattcaagtgtcacaacccaaaagcccccaactaacttaccctctcccctataattaagctttctgacatttgtgtgttggactgagtggacatggggtcatcttgagggagttgtcattaaattatgcatctaggctagctggctcaaaggggtattaattaaggggagggaacctaggattttgcctagctgttgtgctgcatgggagtggaaaggcaatactcgttcccaccctacattctgagcactaatacatcccactccttgcaggaggcccaggcatatgcagatgacaacagcttattgttcatggagacttcmgccaagacagctatgaacgtgaatgatctcttcctggcaataggtaaggtcagaacatcctgaggtcctcctttttccctcgtttataggcaaaattatagctaacccaaatcaaggataggtgcgagtatctccttttgcaaaaactttaggtatggaaataccttaactttctgttatgacctccatccttggctgcagctttagctcccttgtcttcaatgtgtaagtttgccggccaggtgtggtggctaacacctgtaatcccagcattttgggaggccgaggcgggcggatcacgaggtcaagagatcaagaccatcctggccaatgtggtgaaaccccgtctctactaaaaatacaaaaattagctgggcgtggtggygcacacctgtagtcccagctacttgggaggctgagccaggataatcacttgaacccgggaggtggaggttgcagtgagccgagattgtgccactgcactccatcctggcaacagagcgagactccatctcaaaaaaaaaaaaaaagtttgcaaatagtgaaccctcccatcttcagaacattcttttaatctctcaaattctcccttttccccaattcagtagccgtttttggcgggtggaggcagaggggtagggaagtaaagtctaccatactttgttctcttctctttttatctctagctaagaagttgccaaagagtgaaccccagaatctgggaggtgcagcaggccgaagccggggtgtggatctccatgaacagtcccagcagaacaagagccagtgttgtagcaactgagggggtggctagcagcaaacaagtatggagctagcacaagagctaagaaataacckccatccctacccctcagcacacarcccctacggtaacagcacactgagccctggctcccaagggctgcctcctgacagctccgtcatggcactttttaacgcttcagcaacaaacaccaggcagctgttgccactggcctcctaccccctactctggggcttgggggtcaactccccccaggacttaccttccaaaacaaactttcttcactttgtattataggtacaagacagcgacttaygtatcttttctcctcctccctagtgttcctccccattttttcagaaaacrcttctgactcctgtcccttccccttctgcttttggtcagtccctgttcttgagcctcttttctcctctccccaggatgcwgaaagtggtgaacccaggaactgaggaaggaggtttccagttcatttacattaagggccctgggggagaataaagctcagagcaggagggagtaaggaaacatttcctttttgtttttatttggttggagtttctcatatttgaaaacattgcggtatccatgatttggccttgtggagggtgttcctaggtagaggtgagaatggggaggcaagatctcaggcaccargcaggaggtgcckkgtaagctaactgggcggaggtggaggtgcagtgtcaactgtggctctgtaactcttcaaaggcccagtttcccctcacgcagcctcttaggtagcgtttcccctaatcgtgggggttggaccccagagtcttccaaagaattttcactggttgcctrcrtctttggctctgctgtgatctgattggaggagggacagtttctggtacccatcctctgatttatacatatgcrttttttcccctctggcctttagatggcctcagccccagccaccatatacccctgcagtttgcactttaattgatggtagttcagttggggtacttgttttatggaagttttgattgatttacttgccctcccaccttctttttaattcaatgaaatctgaggttaatgcgaggttcgaggagaggttatagataaaactaccagtggcagctactcaagtcctatctccactgttagcttcctccaactctaattattaacctatattcttgccaagctaactattgactataggtttgcctttcctggagaattaattgagcaattgaggagtgtctcaggatagcacaggccaaggtaggggagtaaaaaggaggtcaggcaaaagggaggagttttctgtcctttcccaggtttcacactcaatttgatatccattaccatgtcttttctacttccttgtaaataggtatgatctttattcccactgtacagtctgttctatcctctgcctcccatcaggccctgtttctttgttcctttgttaatatcttgaatttagtccctccatccttaatccccccatccctccccatcatgcaaccagtggtttaatccatgtaccaataggggctagtaccacagaggcctcctgtggtgccctcgtatcataccacctgttcctgtggagagggaatgaccggcactgaargtaccttacaactggctcatattatcagaggaccttggtcctttctaaatctctagtctctcttcatatccttcatcaggtgttttaagatgtctctgagaagccatcaaggcaaaagagaactttaagttccttgttccagcccggagttttgggaaagaaagaaaggaaaggtcacagtgacctaggattggaaccttcctgcccttttggcttgcagactgccttctatcccagaacagctgagaaatctatgaagctgagattctgaaggacccagcttaggttcttccacttaggcctcaattcccttccttttccaggggcagccttagttcccatggccctgaaacacacacatttcccccttcctttcccagaagccactggccccccatagcacccagtgcatcctttttacaagtggaagaactaggatggctttccaaagtcttctagaaatgaagttctttctctgtgcagctttcccccttggagcaggagtgaagatgtttcattatcttgggcctgggaaaccacttccccaggcttctccctccccccacccccataggaacaggatttggccttagcttytgggcstatcggctgccttccctctacttcctaccacctcttctgccttcctttgagctctgttgggcttggggatcttagttttcttttgtttatttcccagctcatttttttcttctggtcmgtttttttaagggggggtgttgtggttttttgtttttgttttgcttctgagaaagcatttgcctttcttcctctcccaacataacaatcgtggtaacagaatgcgactgctgatttaccgatgtatttaatgtaagtaaaaaaaggaaaaaaagaaaagggcattggagtgttgcttttttttattttattgttattattattattatttttgctatttgtcaggtactaggaatttggaagaaaggatacccagtaatgttctactgaatcagaaacacacctttccctgcatcttgatacatctttattccctttaatcttttcttaaacatctagtttagaaaatagcccttctattgctatttaatcacccctcttctaaggccactagattgttcatcaaatcaaaccctattatatctttttaggccctcttaacagaatgtatatgtgtagggtatggtctgtggatctttgggcccactgatcagattagagagaggggtgctatttgaagtagtatacaaaaatgtatgtgcatatttctttttttttttttaattgagacggagtctctgtcgctagcctggagtacagtggcacgatcttggctcacagcaatctccgcctcctgagttcaagtgattctcctgcctcagcctcctgagtagctaggattacaggcacgcaccaacacacccagctaatttttgtatttttagtagagacggggtttcaccatgttggtcaggctggtcttgaactcctgacctcgtgatccacccaccttggcctcccaaagtgctgggattacgggcgtgagccactgcgcccggccgtatgtgcatatttctaggatccatttctatatgtttctcaaaggggtccatgacccaaaggttgaaaaacatcactgagttagttttcttgtagcttccacctcaacgggaaaatttcccctggatctgctcttgactcctagtgtacttcaaacccttcagtccaccacagtctaaaggtcgagggaagggaaatgaaataggattatgtgtggttgcagtaggctttaaattccaaagaatctgaaggtggataggaaagaggactggtgccagacaaatctgacattctaggcctgtctctgtcaacttaaccagctgtggccttgatcaagttagttagtgccttccgcctcgtttcttcatctgtaaagtaaaagctgaagattaaggtcaattatgtaaagtatgtgtgtcacacaaaagtagatgacactattaggaaggaggcttttagatagtccctaactgacttctctgtatcttcctttggctgagacttttttttttttaggttgaagctcgctttctctctctctccctctttctccctctctctctctctctcactctctctctctccatatatatatacatatatatatatatatatattttttttttaacaactggtaggataggttgggcattagccttcttcagtgatttgattgtatacagattgaaatcctttccatttccaaacacttaagagccaaagccaacttgccaacttttcactgtcggttcccttaccttatatctcttggtaataccccccacccccgttccctgattcctggtaaaagctctagttggagagccgaaaggaaaggaaatgatctttcaaaattaaaggtgaacaccttcacttaaactgattaaaattgcagctccaccgtccggcctctagagggcagtgtatggatacatttgtccagattgggggactaggtttgataaattttgtcctgcatcaaatgacaaaagggtaataggaaatgtattatatttatgccccttactttgagataagagactacaaccttcatacttcggggtgttaagctgccattgctcttgttaaggggcagtttgttttttaagagatggggtcttgctctgttgtccaggctggagtgcagtgccgcgatcttggctcagtgcaacctcgaactcctgggcttaagcgatcctcccgcctcagcctcccgagtactgggactacaggcgtgtgccaccaaggggcgattattattttttttttctacgcaaaataaaagacggctattcagtgttgttgtttcatttttgtttggggagaaattcgactagcccaaggaatctcaaattcttggaaccactattttaggcatttctgttatcattcctggaatacgagaactaagcgattgactttgctttccctaaaagataaacagggtagttgtagttgcaacagagtagatagaggtaggtctaccctgggtttaaagtggagatcacagccggggaaaaccggactggatcccgaggcctcctccagggaggggcggcaggggtgtctcaaaatctcccacctgtcagcccaacttttggattccttgtcaccttccacactgcccgagctccggacatacagccctggtgcacaagggtcccattctttgcacaccaggggtataatggactccggactgttggcgagagtgacagcaaaaagagccagcctcttctcccaggcttcttagcaacctgcctgtctcggctccaggaggcgggttccagccaatggttgagccacccgcttccagccaatggctgagggataagctgaggggagtgagaggtcacttactgcagccggacataacggcgctggccccgccccttctcgagaactcgcagagctgggctggtaaaattgcagtgctgaagacactggacccggtaaggagactgggggtggtaaagaagctggggaggaagggctgctgagctgggcagcggagggggccttggtgtccagctgtgctccgaacctcaagggcaacaaaactatcagtacctgcctccactccttctgtctgggtgctcttgagatcgcggggtgttgccgcaagacccttttgtgcctggatgccggacgtatgttcctacctaacgtgcccatggggagtgaggggtcatcacctgcaccaacgggtggcatttctgtattacagcaaaaggctgtccctcccaaacctgggattctgggctcactgagttcacctgcgagtcagccctacctgcactgctctggtctagtacaaacaggctgctggcattgaggtaggtggcagagagagtaatggtcccatggcccaggggcaaggtgaagactgctcctattcccatctctaggtttcctttcctccctacccacgacccacccaccccagcacattggtctccagcatctcatcagcagtttagacatttgtcacccctcctcactttggccctgctgggtcagtgctctctgttcagcaatttgaggaagaaacttgcagggcagagagcagaaaaattaccttccttctccagcctgcccctgacactctggccattaactcctcaatttgctgagctcactacagtggcacagagaagattgaggtggtccgggaccctaggttggggtccagttcccagctgggttcaattttttttagggtgaatggagggagagttggggactgaaaagccttcaaagacaatgttattacagcagtctccccttatccaaagtttccttttcctgagtttcagttagctatggtcaaccgcttggaaaatagttgaacacagtacaataagatattttgaggctgggagtggtggctcatgcctgtaataatcccaggactttgtgagaccaagtttgaaggatcacttgaacccaggagtttgagaccagcctgggcaacatagtaagacctcatctctacaaaaaaaaaaaaaaaaagaccatgcatggtggcacacgcctgtggtccccgctactcaggaggttgaggcaggaggatggcttgagcccagaagtttgatgctatagtgagctgagatcacgccactgcactccagcctgggcagagcaagaccctgtcaggggcagggggaggggaggggaagccggacagtggctcatgcctgtaatcccagcactttgggggctaaggcagcaagaggccaggagttcaagaccagccctgacaacatagactcccatgtctacagaaaaattagccaggcttggtgacacacacttgtagtcccagctgctggggaggctaaggcaggaggatggcttgagcccaagaggttgaagcttcagtgagccatgatcgacacttgctccatcgcccaggctttttttttttttgagacaaggtcttgccctgttgcccaggctggagtacggtggcgccatcataattcattgcagtctcgacctcctggactcaagccatcctctcatctcagcactcctctccccaccaccccggtagctgagactacagacaggcaccaccatgcccagttaatttgtttttttttttctagagacacagtctcactatgttgcccaagctggtcttgaactcctggagtcaagtgatcctccttccttggcctcccaaaattttgggattataggcatgagccaccatgactggccaaaaaaaagtatattttgagagagagaccacattcatataacttttttttgtttttgttttgagacagggtctcgctctctgttgcccaagctgaagtgcagtggcacagtcagctcactctgtaacctcaaactcctgggcttagatcttctcagcctccagagtagatgggaccacaggtgcgctccaccatgcccaactaactttttattttgtagggacggagtctccaactcctggcctctagcagtcctcctgtgtaggtctcccaaagtgctagtgtgtccggaattggtgggttcttggtctcactgacttcaagaatgaagccgcggaccctcgcagtgagtgttacagttcttaaaggcagcgtgtccggagtttgttccttctgatgttcagatgtgtttggagtttcttccttctggtgggttcgtggtcttgctggctcaggagtgaagctgcagaccttcacagtgagtgttacagctcataaaggcagtgtggacccgaagagtgagcagcagcaagattcattgtaaagagggaaagaacaaagcttccaccgtgtggaaagggacccaagcgggttgccactgctggcttgggcagcctgcttttgttctcttatctggtgccacccacatcctgctgattggtagagccgagtggtctgttttgacagggtgctgattggtgcgtttacaatccctgagctagacacaaaggttctccacatccccaccagattagctagatacagagtgttgattggtgtattcacaatccctgagctagacataaaggttctccaaggccccaccagagtagctagatacagagtgttgattggtgcattcacaaaccctgagctagacacagggtgctgataggtgtatttacaatccctgagctagacatgaaggttctccacctccccaccagactcaggagcccagctggcttcacccagtggatcccgcactggtgctgcaggtggagctgcctgccagtctcggtgccatgcgcccgcactcctcagcccttgggtggttgatgggactgggtgccgtggagcaggggtcggtgctcctcggggaggcttaggccccacaggagcccacggcgaaggggggctcaggcatggcgggctgcaggtcccgagccctgccccgcggggaggcagctaaggcccggcgagaaatcgagcgcagcgctggtgggccggcactgctgggggacccagtacaccctccgcagctgctggcccaggtggtaagcccctcattgcccggggccggcagggccagccggctgctccgtgtgcggggcctgccaagcccacgcccacccggaactccagctggcccgcaagctccgcgctcagccccggttcccgctcgcacctctccctccacacctccctgcaagctgagggagccgactctggccttggccagcccagaaaggggctcccacagtgcagcggcgagctgaagggctcctcaagtgccgccaaagtgggagcccaggcagaggaggcaccgagagtgagcaagggctgtgaggactgccagcacaatgtcacttctcactagg
